United States Patent Application Publication US 2007/0214517 A1 - sequence listing, part 2

SEQ ID NO: 1901 - DNA, 1375 bp, Zea mays subsp. mays
  misc_feature (1)..(1375): Ceres Seq. ID no. 12410950
  misc_feature: MA Experiment ID: 108523 Result: Down-regulated in Transcription
  misc_feature: MA Experiment 108523 PARAMETER Experiment Name: Zm_42deg_Heat_P Parameter: Age (day) Value: 8
  misc_feature: MA Experiment 108523 PARAMETER Experiment Name: Zm_42deg_Heat_P Parameter: Organism Value: Zea mays
  misc_feature: MA Experiment 108523 PARAMETER Experiment Name: Zm_42deg_Heat_P Parameter: Plant Line Value: 35A19
  misc_feature: MA Experiment 108523 PARAMETER Experiment Name: Zm_42deg_Heat_P Parameter: Temperature (deg C) Value: 42 vs. 22
  misc_feature: MA Experiment 108523 PARAMETER Experiment Name: Zm_42deg_Heat_P Parameter: Timepoint (hr) Value: 6
  misc_feature: MA Experiment 108523 PARAMETER Experiment Name: Zm_42deg_Heat_P Parameter: Tissue Value: Aerial
  misc_feature: MA Experiment ID: 108528 Result: Down-regulated in Transcription
  misc_feature: MA Experiment 108528 PARAMETER Experiment Name: Zm_Imbibed_Seeds_P Parameter: Age (day) Value: 5 vs. 2
  misc_feature: MA Experiment 108528 PARAMETER Experiment Name: Zm_Imbibed_Seeds_P Parameter: Organism Value: Zea mays
  misc_feature: MA Experiment 108528 PARAMETER Experiment Name: Zm_Imbibed_Seeds_P Parameter: Plant Line Value: 35A19
  misc_feature: MA Experiment 108528 PARAMETER Experiment Name: Zm_Imbibed_Seeds_P Parameter: Tissue Value: Aerial vs. Embryo
  misc_feature: MA Experiment ID: 108529 Result: Down-regulated in Transcription
  misc_feature: MA Experiment 108529 PARAMETER Experiment Name: Zm_Imbibed_Seeds_P Parameter: Age (day) Value: 5 vs. 2
  misc_feature: MA Experiment 108529 PARAMETER Experiment Name: Zm_Imbibed_Seeds_P Parameter: Organism Value: Zea mays
  misc_feature: MA Experiment 108529 PARAMETER Experiment Name: Zm_Imbibed_Seeds_P Parameter: Plant Line Value: 35A19
  misc_feature: MA Experiment 108529 PARAMETER Experiment Name: Zm_Imbibed_Seeds_P Parameter: Tissue Value: Roots vs. Embryo
  misc_feature: MA Experiment ID: 108530 Result: Down-regulated in Transcription
  misc_feature: MA Experiment 108530 PARAMETER Experiment Name: Zm_Imbibed_Seeds_P Parameter: Age (day) Value: 6 vs. 2
  misc_feature: MA Experiment 108530 PARAMETER Experiment Name: Zm_Imbibed_Seeds_P Parameter: Organism Value: Zea mays
  misc_feature: MA Experiment 108530 PARAMETER Experiment Name: Zm_Imbibed_Seeds_P Parameter: Plant Line Value: 35A19
  misc_feature: MA Experiment 108530 PARAMETER Experiment Name: Zm_Imbibed_Seeds_P Parameter: Tissue Value: Aerial vs. Embryo
  misc_feature: MA Experiment ID: 108535 Result: Down-regulated in Transcription
  misc_feature: MA Experiment 108535 PARAMETER Experiment Name: Zm_Meristem_P Parameter: Age (day) Value: 8
  misc_feature: MA Experiment 108535 PARAMETER Experiment Name: Zm_Meristem_P Parameter: Organism Value: Zea mays
  misc_feature: MA Experiment 108535 PARAMETER Experiment Name: Zm_Meristem_P Parameter: Plant Line Value: 35A19
  misc_feature: MA Experiment 108535 PARAMETER Experiment Name: Zm_Meristem_P Parameter: Tissue Value: Root Meristem vs. Above Root Meristem
  misc_feature: MA Experiment ID: 108543 Result: Up-regulated in Transcription
  misc_feature: MA Experiment ID: 108544 Result: Up-regulated in Transcription
  misc_feature: MA Experiment ID: 108547 Result: Down-regulated in Transcription
  misc_feature: MA Experiment 108547 PARAMETER Experiment Name: Zm_Imbibed_Seeds_P Parameter: Age (day) Value: 4 vs. 2
  misc_feature: MA Experiment 108547 PARAMETER Experiment Name: Zm_Imbibed_Seeds_P Parameter: Organism Value: Zea mays
  misc_feature: MA Experiment 108547 PARAMETER Experiment Name: Zm_Imbibed_Seeds_P Parameter: Plant Line Value: 35A19
  misc_feature: MA Experiment 108547 PARAMETER Experiment Name: Zm_Imbibed_Seeds_P Parameter: Tissue Value: Aerial vs. Embryo
  misc_feature: MA Experiment ID: 108689 Result: Up-regulated in Transcription
  misc_feature: MA Experiment 108689 PARAMETER Experiment Name: Zm_Drought_Roots_P Parameter: Age (day) Value: 9
  misc_feature: MA Experiment 108689 PARAMETER Experiment Name: Zm_Drought_Roots_P Parameter: Organism Value: Zea mays
  misc_feature: MA Experiment 108689 PARAMETER Experiment Name: Zm_Drought_Roots_P Parameter: Plant Line Value: 35A19
  misc_feature: MA Experiment 108689 PARAMETER Experiment Name: Zm_Drought_Roots_P Parameter: Timepoint (hr) Value: 24
  misc_feature: MA Experiment 108689 PARAMETER Experiment Name: Zm_Drought_Roots_P Parameter: Tissue Value: Roots
  misc_feature: MA Experiment 108689 PARAMETER Experiment Name: Zm_Drought_Roots_P Parameter: Treatment Value: Drought vs. No Drought
  misc_feature: MA Experiment ID: 20000487 Result: Up-regulated in Transcription
  misc_feature: MA Experiment 20000487 PARAMETER Experiment Name: Zm_50mM_NH4NO3_L_to_H_P Parameter: Organism Value: Zea mays
  misc_feature: MA Experiment 20000487 PARAMETER Experiment Name: Zm_50mM_NH4NO3_L_to_H_P Parameter: Timepoint (hr) Value: 4
  misc_feature: MA Experiment 20000487 PARAMETER Experiment Name: Zm_50mM_NH4NO3_L_to_H_P Parameter: Tissue Value: Leaves
  misc_feature: MA Experiment 20000487 PARAMETER Experiment Name: Zm_50mM_NH4NO3_L_to_H_P Parameter: Treatment Value: 50mM NH4NO3 vs. 100mM Mannitol
  misc_feature: MA Experiment ID: 20000535 Result: Down-regulated in Transcription
  misc_feature: MA Experiment 20000535 PARAMETER Experiment Name: Zm_Hybrid_Seed_Dev_P Parameter: DAP Value: 30 vs. 12
  misc_feature: MA Experiment 20000535 PARAMETER Experiment Name: Zm_Hybrid_Seed_Dev_P Parameter: Organism Value: Zea mays
  misc_feature: MA Experiment 20000535 PARAMETER Experiment Name: Zm_Hybrid_Seed_Dev_P Parameter: Plant Line Value: 35A19
  misc_feature: MA Experiment 20000535 PARAMETER Experiment Name: Zm_Hybrid_Seed_Dev_P Parameter: Tissue Value: Embryo vs. Unfert Floret
  misc_feature: MA Experiment ID: 20000626 Result: Down-regulated in Transcription
  misc_feature: MA Experiment 20000626 PARAMETER Experiment Name: Zm_Herbicide-Treatments_P Parameter: Timepoint (hr) Value: 12
  misc_feature: MA Experiment 20000626 PARAMETER Experiment Name: Zm_Herbicide-Treatments_P Parameter: Tissue Value: Aerial
  misc_feature: MA Experiment 20000626 PARAMETER Experiment Name: Zm_Herbicide-Treatments_P Parameter: Treatment Value: Roundup vs. No Treatment
  misc_feature: MA Experiment ID: 20000630 Result: Down-regulated in Transcription
  misc_feature: MA Experiment 20000630 PARAMETER Experiment Name: Zm_Herbicide-Treatments_P Parameter: Timepoint (hr) Value: 4
  misc_feature: MA Experiment 20000630 PARAMETER Experiment Name: Zm_Herbicide-Treatments_P Parameter: Tissue Value: Aerial
  misc_feature: MA Experiment 20000630 PARAMETER Experiment Name: Zm_Herbicide-Treatments_P Parameter: Treatment Value: Roundup vs. No Treatment
actggcatgggcagggacaagtaattcattctgatacatataatcccaagctcctctatcatagggatatatggatataagacgtgatttccatatggccgaaggggaaggagaatggagctactccaagaattgtaggcgccaacaagtagctgtccgcgagaccaggccaatggtcgagactgccgtcaagcaggtatacgcagctctcctccccagaaccatggtcgtcgccgacctcggatgctctgcaggaccgaacacgctgctcttcatctctagcgtcctgagcagcatcgctgctgcggctggtgctgaacggtgcaagccgccgagcggcggcggagacgatgacgaccatcacgtggagcttcagttcgtcctgaacgacctccccggcaacgacttcaaccacctgtttcggtcagtcgaggaggagttcagaagggcagcaggttgtgaaaggggtcctcctcctcctccctactatgtcatggggctaccggagtcctattacaacaggctgtttcctcgtcagagtgtgcatctgttccactcctcctactgcctccactggcgctcccaggaacctgagggactagaggcgtggagaaagccttgcctgaacgaggacaacatctacatcgcaaggagtaggaccacgacaccttctgtggcgaaactgttccaggagcagttccagaaggacttctccctcttcctcaagctgcgccacgaagagctcgtgcatggagggcgaatggtgcttgtatttctcggcaggaagaacgaggacgcgtacagtggcgacctcaaccagctcttcgcactggtcgcaacagcgttgcagtctcttgttttgaagggccttgtggagaaggaaaagctagagtctttcaacctaccgatctacgggccgtcggtgggagaagtggaggatctggtcacgcagagcggtctgttcagcatggatctgatcaagcagttcgagatgaactgggaccctctcgacgactcggagggtgacgacgtcgtcgaggacagcgctcgcagcagcatgaatgtcgccaagtacatcagatccgtgctgaagtctttaattgtccgccattttggagaagccataattgatgcatggtttgccgagttcaggcgccttgtcgctgagcacctcgagaaggagaagaccaagttcactaccttcgccatgtgcttgaagaaagagtgatatagatgtatcgatctacatatacgtatgtgtattgtatttcgtacggtgtagctaatatactcatatgtgatatatcatgtgtatttcatgggacacgtacaattgagtatatgtgtgcatgcattatacatatggtacggtcgt

SEQ ID NO: 1902 - protein, 385 aa, Zea mays subsp. mays
  peptide (1)..(385): Ceres Seq. ID no. 12410951
  misc_feature (36)..(375): Pfam Name: SAM dependent carboxyl methyltransferase Pfam Description: SAM dependent carboxyl methyltransferase
  misc_feature (9)..(385): Homolog of NCBI NO: 15237695 NR Description: S-adenosyl-L-methionine:carboxyl
  misc_feature (1)..(382): Homolog of NCBI NO: 6651395 NR Description: floral nectary-specific protein [Brassica rapa
  misc_feature (2)..(385): Homolog of NCBI NO: 15234420 NR Description: S-adenosyl-L-methionine:carboxyl
  misc_feature (1)..(384): Homolog of NCBI NO: 34911486 NR Description: putative S-adenosyl-L-methionine:salicylic acid
  misc_feature (1)..(384): Homolog of NCBI NO: 34911508 NR Description: putative S-adenosyl-L-methionine:salicylic acid
  misc_feature (12)..(159): Homolog of NCBI NO: 9789277 NR Description: SAM:benzoic acid carboxyl methyltransferase
  misc_feature (140)..(384): Homolog of NCBI NO: 9789277 NR Description: SAM:benzoic acid carboxyl methyltransferase
  misc_feature (1)..(123): Homolog of NCBI NO: 34809619 NR Description: Chain X, Crystal Structure Of Salicylic Acid
  misc_feature (140)..(382): Homolog of NCBI NO: 34809619 NR Description: Chain X, Crystal Structure Of Salicylic Acid
  misc_feature (1)..(375): Homolog of NCBI NO: 23957318 NR Description: S-adenosyl-L-methionine:salicylic acid
MDIRRDFHMAEGEGEWSYSKNCRRQQVAVRETRPMVETAVKQVYAALLPRTMVVADLGCSAGPNTLLFISSVLSSIAAAAGAERCKPPSGGGDDDDHHVELQFVLNDLPGNDFNHLFRSVEEEFRRAAGCERGPPPPPYYVMGLPESYYNRLFPRQSVHLFHSSYCLHWRSQEPEGLEAWRKPCLNEDNIYIARSRTTTPSVAKLFQEQFQKDFSLFLKLRHEELVHGGRMVLVFLGRKNEDAYSGDLNQLFALVATALQSLVLKGLVEKEKLESFNLPIYGPSVGEVEDLVTQSGLFSMDLIKQFEMNWDPLDDSEGDDVVEDSARSSMNVAKYIRSVLKSLIVRHFGEAIIDAWFAEFRRLVAEHLEKEKTKFTTFAMCLKKE

SEQ ID NO: 1903 - protein, 377 aa, Zea mays subsp. mays
  peptide (1)..(377): Ceres Seq. ID no. 12410952
  misc_feature (28)..(367): Pfam Name: SAM dependent carboxyl methyltransferase Pfam Description: SAM dependent carboxyl methyltransferase
  misc_feature (1)..(377): Homolog of NCBI NO: 15237695 NR Description: S-adenosyl-L-methionine:carboxyl
  misc_feature (1)..(374): Homolog of NCBI NO: 6651395 NR Description: floral nectary-specific protein [Brassica rapa
  misc_feature (1)..(377): Homolog of NCBI NO: 15234420 NR Description: S-adenosyl-L-methionine:carboxyl
  misc_feature (1)..(376): Homolog of NCBI NO: 34911486 NR Description: putative S-adenosyl-L-methionine:salicylic acid
  misc_feature (1)..(376): Homolog of NCBI NO: 34911508 NR Description: putative S-adenosyl-L-methionine:salicylic acid
  misc_feature (4)..(151): Homolog of NCBI NO: 9789277 NR Description: SAM:benzoic acid carboxyl methyltransferase
  misc_feature (132)..(376): Homolog of NCBI NO: 9789277 NR Description: SAM:benzoic acid carboxyl methyltransferase
  misc_feature (1)..(115): Homolog of NCBI NO: 34809619 NR Description: Chain X, Crystal Structure Of Salicylic Acid
  misc_feature (132)..(374): Homolog of NCBI NO: 34809619 NR Description: Chain X, Crystal Structure Of Salicylic Acid
  misc_feature (1)..(367): Homolog of NCBI NO: 23957318 NR Description: S-adenosyl-L-methionine:salicylic acid
MAEGEGEWSYSKNCRRQQVAVRETRPMVETAVKQVYAALLPRTMVVADLGCSAGPNTLLFISSVLSSIAAAAGAERCKPPSGGGDDDDHHVELQFVLNDLPGNDFNHLFRSVEEEFRRAAGCERGPPPPPYYVMGLPESYYNRLFPRQSVHLFHSSYCLHWRSQEPEGLEAWRKPCLNEDNIYIARSRTTTPSVAKLFQEQFQKDFSLFLKLRHEELVHGGRMVLVFLGRKNEDAYSGDLNQLFALVATALQSLVLKGLVEKEKLESFNLPIYGPSVGEVEDLVTQSGLFSMDLIKQFEMNWDPLDDSEGDDVVEDSARSSMNVAKYIRSVLKSLIVRHFGEAIIDAWFAEFRRLVAEHLEKEKTKFTTFAMCLKKE

SEQ ID NO: 1904 - protein, 351 aa, Zea mays subsp. mays
  peptide (1)..(351): Ceres Seq. ID no. 12410953
  misc_feature (2)..(341): Pfam Name: SAM dependent carboxyl methyltransferase Pfam Description: SAM dependent carboxyl methyltransferase
  misc_feature (106)..(350): Homolog of NCBI NO: 9789277 NR Description: SAM:benzoic acid carboxyl methyltransferase
  misc_feature (1)..(89): Homolog of NCBI NO: 34809619 NR Description: Chain X, Crystal Structure Of Salicylic Acid
  misc_feature (1)..(351): Homolog of NCBI NO: 15237695 NR Description: S-adenosyl-L-methionine:carboxyl
  misc_feature (1)..(351): Homolog of NCBI NO: 15234420 NR Description: S-adenosyl-L-methionine:carboxyl
  misc_feature (1)..(350): Homolog of NCBI NO: 34911508 NR Description: putative S-adenosyl-L-methionine:salicylic acid
  misc_feature (1)..(125): Homolog of NCBI NO: 9789277 NR Description: SAM:benzoic acid carboxyl methyltransferase
  misc_feature (1)..(350): Homolog of NCBI NO: 34911486 NR Description: putative S-adenosyl-L-methionine:salicylic acid
  misc_feature (1)..(348): Homolog of NCBI NO: 6651395 NR Description: floral nectary-specific protein [Brassica rapa
  misc_feature (106)..(348): Homolog of NCBI NO: 34809619 NR Description: Chain X, Crystal Structure Of Salicylic Acid
  misc_feature (1)..(341): Homolog of NCBI NO: 23957318 NR Description: S-adenosyl-L-methionine:salicylic acid
MVETAVKQVYAALLPRTMVVADLGCSAGPNTLLFISSVLSSIAAAAGAERCKPPSGGGDDDDHHVELQFVLNDLPGNDFNHLFRSVEEEFRRAAGCERGPPPPPYYVMGLPESYYNRLFPRQSVHLFHSSYCLHWRSQEPEGLEAWRKPCLNEDNIYIARSRTTTPSVAKLFQEQFQKDFSLFLKLRHEELVHGGRMVLVFLGRKNEDAYSGDLNQLFALVATALQSLVLKGLVEKEKLESFNLPIYGPSVGEVEDLVTQSGLFSMDLIKQFEMNWDPLDDSEGDDVVEDSARSSMNVAKYIRSVLKSLIVRHFGEAIIDAWFAEFRRLVAEHLEKEKTKFTTFAMCLKKE

SEQ ID NO: 1905 - DNA, 904 bp, Zea mays subsp. mays
  misc_feature (1)..(904): Ceres Seq. ID no. 12405189
  misc_feature: MA Experiment ID: 108529 Result: Up-regulated in Transcription
  misc_feature: MA Experiment 108529 PARAMETER Experiment Name: Zm_Imbibed_Seeds_P Parameter: Age (day) Value: 5 vs. 2
  misc_feature: MA Experiment 108529 PARAMETER Experiment Name: Zm_Imbibed_Seeds_P Parameter: Organism Value: Zea mays
  misc_feature: MA Experiment 108529 PARAMETER Experiment Name: Zm_Imbibed_Seeds_P Parameter: Plant Line Value: 35A19
  misc_feature: MA Experiment 108529 PARAMETER Experiment Name: Zm_Imbibed_Seeds_P Parameter: Tissue Value: Roots vs. Embryo
  misc_feature: MA Experiment ID: 108535 Result: Down-regulated in Transcription
  misc_feature: MA Experiment 108535 PARAMETER Experiment Name: Zm_Meristem_P Parameter: Age (day) Value: 8
  misc_feature: MA Experiment 108535 PARAMETER Experiment Name: Zm_Meristem_P Parameter: Organism Value: Zea mays
  misc_feature: MA Experiment 108535 PARAMETER Experiment Name: Zm_Meristem_P Parameter: Plant Line Value: 35A19
  misc_feature: MA Experiment 108535 PARAMETER Experiment Name: Zm_Meristem_P Parameter: Tissue Value: Root Meristem vs. Above Root Meristem
  misc_feature: MA Experiment ID: 108546 Result: Up-regulated in Transcription
  misc_feature: MA Experiment 108546 PARAMETER Experiment Name: Zm_Imbibed_Seeds_P Parameter: Age (day) Value: 3 vs. 2
  misc_feature: MA Experiment 108546 PARAMETER Experiment Name: Zm_Imbibed_Seeds_P Parameter: Organism Value: Zea mays
  misc_feature: MA Experiment 108546 PARAMETER Experiment Name: Zm_Imbibed_Seeds_P Parameter: Plant Line Value: 35A19
  misc_feature: MA Experiment 108546 PARAMETER Experiment Name: Zm_Imbibed_Seeds_P Parameter: Tissue Value: Roots vs. Embryo
  misc_feature: MA Experiment ID: 108548 Result: Up-regulated in Transcription
  misc_feature: MA Experiment 108548 PARAMETER Experiment Name: Zm_20uM_KNO3_H-to-L_P Parameter: Age (day) Value: 11
  misc_feature: MA Experiment 108548 PARAMETER Experiment Name: Zm_20uM_KNO3_H-to-L_P Parameter: Organism Value: Zea mays
  misc_feature: MA Experiment 108548 PARAMETER Experiment Name: Zm_20uM_KNO3_H-to-L_P Parameter: Plant Line Value: 35A19
  misc_feature: MA Experiment 108548 PARAMETER Experiment Name: Zm_20uM_KNO3_H-to-L_P Parameter: Timepoint (hr) Value: 4
  misc_feature: MA Experiment 108548 PARAMETER Experiment Name: Zm_20uM_KNO3_H-to-L_P Parameter: Tissue Value: Roots
  misc_feature: MA Experiment 108548 PARAMETER Experiment Name: Zm_20uM_KNO3_H-to-L_P Parameter: Treatment Value: 20uM KNO3 vs. 60mM KNO3
  misc_feature: MA Experiment ID: 108689 Result: Down-regulated in Transcription
  misc_feature: MA Experiment 108689 PARAMETER Experiment Name: Zm_Drought_Roots_P Parameter: Age (day) Value: 9
  misc_feature: MA Experiment 108689 PARAMETER Experiment Name: Zm_Drought_Roots_P Parameter: Organism Value: Zea mays
  misc_feature: MA Experiment 108689 PARAMETER Experiment Name: Zm_Drought_Roots_P Parameter: Plant Line Value: 35A19
  misc_feature: MA Experiment 108689 PARAMETER Experiment Name: Zm_Drought_Roots_P Parameter: Timepoint (hr) Value: 24
  misc_feature: MA Experiment 108689 PARAMETER Experiment Name: Zm_Drought_Roots_P Parameter: Tissue Value: Roots
  misc_feature: MA Experiment 108689 PARAMETER Experiment Name: Zm_Drought_Roots_P Parameter: Treatment Value: Drought vs. No Drought
  misc_feature: MA Experiment ID: 20001610 Result: Down-regulated in Transcription
  misc_feature: MA Experiment 20001610 PARAMETER Experiment Name: Zm_50ppm_KNO3_L-to-H_P Parameter: Age (day) Value: 19
  misc_feature: MA Experiment 20001610 PARAMETER Experiment Name: Zm_50ppm_KNO3_L-to-H_P Parameter: Organism Value: Zea mays
  misc_feature: MA Experiment 20001610 PARAMETER Experiment Name: Zm_50ppm_KNO3_L-to-H_P Parameter: Plant Line Value: 35A19
  misc_feature: MA Experiment 20001610 PARAMETER Experiment Name: Zm_50ppm_KNO3_L-to-H_P Parameter: Timepoint (hr) Value: 2
  misc_feature: MA Experiment 20001610 PARAMETER Experiment Name: Zm_50ppm_KNO3_L-to-H_P Parameter: Tissue Value: Roots
  misc_feature: MA Experiment 20001610 PARAMETER Experiment Name: Zm_50ppm_KNO3_L-to-H_P Parameter: Treatment Value: 50ppm KNO3 vs. 50ppm KCl
atcaacaacatacacacaagcaaaacaaaaagctaagaagctccgtagctaaattcagatattacaaacacaaaaaaggagtgcagaaccaaaatggctgcctcgaccttccttctcattgcttttctagcattgatcacttctcaggccattgcctctgatcctagcccgctccaagacttctgtgttgccgataaagactctccggtgaaggtgaatggatttgtttgcaaggaccctatggctgtgaacgctgacgacttcttcaaggctgcaaaacttgaccagccaagggacaccaccaaaagcaaggtgggatccaacgttactctaatcaatgtcatgcagctgcctggactcaacacgttggggatctcgttggctcgcattgactacgcaccattaggtcagaatcctccacacacacacccacgtgccactgagatcctcactgtgcttgaggggacactctacgtcggatttgtcacctccaaccaagctgatagaagcaacaggctatttgccaaggttctcaacaagggcgatgtgtttgtattcccccaaggactaatccacttccagttcaacccagtacatgacaagccagcagtcgcgctcgctgctctaagtagccagaaccctggagctattactattgccaatgcagtctttggatcaaagccacctatctcggatgatgtcctagctaaggcctttcaagtgcaaaaggggacaattgattggcttcaagctcagttctgggagaacaaccactactgaaaaaatcaagtctgagttcaacatatgagaataaagaaatgtacttgtattttacatactactctatgtgttaacctttttctaggttgcgactgataataaaataaatgttcagtatttatgt

SEQ ID NO: 1906 - protein, 228 aa, Zea mays subsp. mays
  peptide (1)..(228): Ceres Seq. ID no. 12405190
  misc_feature (61)..(216): Pfam Name: Cupin Pfam Description: Cupin
  misc_feature (1)..(227): Homolog of NCBI NO: 7447340 NR Description: germin-like protein - barley
  misc_feature (1)..(228): Homolog of NCBI NO: 40253802 NR Description: putative germin A [Oryza sativa (japonica
  misc_feature (2)..(227): Homolog of NCBI NO: 9837111 NR Description: germin A [Hordeum vulgare]
  misc_feature (1)..(228): Homolog of NCBI NO: 5499732 NR Description: germin-like protein 2 precursor [Oryza sativa]
  misc_feature (3)..(228): Homolog of NCBI NO: 40253797 NR Description: putative germin A [Oryza sativa (japonica
  misc_feature (1)..(228): Homolog of NCBI NO: 40253804 NR Description: putative germin A [Oryza sativa (japonica
  misc_feature (1)..(228): Homolog of NCBI NO: 5499730 NR Description: germin-like protein 1 precursor [Oryza sativa]
  misc_feature (2)..(228): Homolog of NCBI NO: 5869975 NR Description: germin-like protein [Triticum aestivum]
  misc_feature (1)..(228): Homolog of NCBI NO: 40253800 NR Description: putative germin A [Oryza sativa (japonica
  misc_feature (1)..(228): Homolog of NCBI NO: 7447336 NR Description: germin-like protein 6 - rice
MAASTFLLIAFLALITSQAIASDPSPLQDFCVADKDSPVKVNGFVCKDPMAVNADDFFKAAKLDQPRDTTKSKVGSNVTLINVMQLPGLNTLGISLARIDYAPLGQNPPHTHPRATEILTVLEGTLYVGFVTSNQADRSNRLFAKVLNKGDVFVFPQGLIHFQFNPVHDKPAVALAALSSQNPGAITIANAVFGSKPPISDDVLAKAFQVQKGTIDWLQAQFWENNHY

SEQ ID NO: 1907 - protein, 179 aa, Zea mays subsp. mays
  peptide (1)..(179): Ceres Seq. ID no. 12405191
  misc_feature (12)..(167): Pfam Name: Cupin Pfam Description: Cupin
  misc_feature (1)..(178): Homolog of NCBI NO: 7447340 NR Description: germin-like protein - barley
  misc_feature (1)..(179): Homolog of NCBI NO: 40253802 NR Description: putative germin A [Oryza sativa (japonica
  misc_feature (1)..(178): Homolog of NCBI NO: 9837111 NR Description: germin A [Hordeum vulgare]
  misc_feature (1)..(179): Homolog of NCBI NO: 5499732 NR Description: germin-like protein 2 precursor [Oryza sativa]
  misc_feature (1)..(179): Homolog of NCBI NO: 40253797 NR Description: putative germin A [Oryza sativa (japonica
  misc_feature (1)..(179): Homolog of NCBI NO: 40253804 NR Description: putative germin A [Oryza sativa (japonica
  misc_feature (1)..(179): Homolog of NCBI NO: 5499730 NR Description: germin-like protein 1 precursor [Oryza sativa]
  misc_feature (1)..(179): Homolog of NCBI NO: 5869975 NR Description: germin-like protein [Triticum aestivum]
  misc_feature (1)..(179): Homolog of NCBI NO: 40253800 NR Description: putative germin A [Oryza sativa (japonica
  misc_feature (1)..(179): Homolog of NCBI NO: 7447336 NR Description: germin-like protein 6 - rice
MAVNADDFFKAAKLDQPRDTTKSKVGSNVTLINVMQLPGLNTLGISLARIDYAPLGQNPPHTHPRATEILTVLEGTLYVGFVTSNQADRSNRLFAKVLNKGDVFVFPQGLIHFQFNPVHDKPAVALAALSSQNPGAITIANAVFGSKPPISDDVLAKAFQVQKGTIDWLQAQFWENNHY

SEQ ID NO: 1908 - protein, 145 aa, Zea mays subsp. mays
  peptide (1)..(145): Ceres Seq. ID no. 12405192
  misc_feature (1)..(133): Pfam Name: Cupin Pfam Description: Cupin
  misc_feature (1)..(144): Homolog of NCBI NO: 7447340 NR Description: germin-like protein - barley
  misc_feature (1)..(145): Homolog of NCBI NO: 40253802 NR Description: putative germin A [Oryza sativa (japonica
  misc_feature (1)..(144): Homolog of NCBI NO: 9837111 NR Description: germin A [Hordeum vulgare]
  misc_feature (1)..(145): Homolog of NCBI NO: 5499732 NR Description: germin-like protein 2 precursor [Oryza sativa]
  misc_feature (1)..(145): Homolog of NCBI NO: 40253797 NR Description: putative germin A [Oryza sativa (japonica
  misc_feature (1)..(145): Homolog of NCBI NO: 40253804 NR Description: putative germin A [Oryza sativa (japonica
  misc_feature (1)..(145): Homolog of NCBI NO: 5499730 NR Description: germin-like protein 1 precursor [Oryza sativa]
  misc_feature (1)..(145): Homolog of NCBI NO: 5869975 NR Description: germin-like protein [Triticum aestivum]
  misc_feature (1)..(145): Homolog of NCBI NO: 40253800 NR Description: putative germin A [Oryza sativa (japonica
  misc_feature (1)..(145): Homolog of NCBI NO: 7447336 NR Description: germin-like protein 6 - rice
MQLPGLNTLGISLARIDYAPLGQNPPHTHPRATEILTVLEGTLYVGFVTSNQADRSNRLFAKVLNKGDVFVFPQGLIHFQFNPVHDKPAVALAALSSQNPGAITIANAVFGSKPPISDDVLAKAFQVQKGTIDWLQAQFWENNHY

SEQ ID NO: 1909 - DNA, 934 bp, Zea mays subsp. mays
  misc_feature (1)..(934): Ceres Seq. ID no. 12351299
  misc_feature: MA Experiment ID: 108522 Result: Up-regulated in Transcription
  misc_feature: MA Experiment 108522 PARAMETER Experiment Name: Zm_42deg_Heat_P Parameter: Age (day) Value: 8
  misc_feature: MA Experiment 108522 PARAMETER Experiment Name: Zm_42deg_Heat_P Parameter: Organism Value: Zea mays
  misc_feature: MA Experiment 108522 PARAMETER Experiment Name: Zm_42deg_Heat_P Parameter: Plant Line Value: 35A19
  misc_feature: MA Experiment 108522 PARAMETER Experiment Name: Zm_42deg_Heat_P Parameter: Temperature (deg C) Value: 42 vs. 22
  misc_feature: MA Experiment 108522 PARAMETER Experiment Name: Zm_42deg_Heat_P Parameter: Timepoint (hr) Value: 1
  misc_feature: MA Experiment 108522 PARAMETER Experiment Name: Zm_42deg_Heat_P Parameter: Tissue Value: Aerial
  misc_feature: MA Experiment ID: 108523 Result: Up-regulated in Transcription
  misc_feature: MA Experiment 108523 PARAMETER Experiment Name: Zm_42deg_Heat_P Parameter: Age (day) Value: 8
  misc_feature: MA Experiment 108523 PARAMETER Experiment Name: Zm_42deg_Heat_P Parameter: Organism Value: Zea mays
  misc_feature: MA Experiment 108523 PARAMETER Experiment Name: Zm_42deg_Heat_P Parameter: Plant Line Value: 35A19
  misc_feature: MA Experiment 108523 PARAMETER Experiment Name: Zm_42deg_Heat_P Parameter: Temperature (deg C) Value: 42 vs. 22
  misc_feature: MA Experiment 108523 PARAMETER Experiment Name: Zm_42deg_Heat_P Parameter: Timepoint (hr) Value: 6
  misc_feature: MA Experiment 108523 PARAMETER Experiment Name: Zm_42deg_Heat_P Parameter: Tissue Value: Aerial
  misc_feature: MA Experiment ID: 108559 Result: Up-regulated in Transcription
  misc_feature: MA Experiment 108559 PARAMETER Experiment Name: Zm_5mM_NO_P Parameter: Age (day) Value: 8
  misc_feature: MA Experiment 108559 PARAMETER Experiment Name: Zm_5mM_NO_P Parameter: Organism Value: Zea mays
  misc_feature: MA Experiment 108559 PARAMETER Experiment Name: Zm_5mM_NO_P Parameter: Plant Line Value: 35A19
  misc_feature: MA Experiment 108559 PARAMETER Experiment Name: Zm_5mM_NO_P Parameter: Timepoint (hr) Value: 12
  misc_feature: MA Experiment 108559 PARAMETER Experiment Name: Zm_5mM_NO_P Parameter: Tissue Value: Aerial
  misc_feature: MA Experiment 108559 PARAMETER Experiment Name: Zm_5mM_NO_P Parameter: Treatment Value: 5mM NO vs. No Treatment
gttttggcgcaataaggcgacctgagtcctgaaccgcctcgagccgctctcggcttcgaatcccgacaacctccctccccaagctgcttagccgccgtctgggcctcagacctgcgtcaagcttccggcggcagcccatcgagcaccacaatggcgtccggcggagcggccatctcggcggggcctacaccgccgtcggcgacggcgtcgtcggttgagtggcaccagcggccgccgaacccgaagaaccccgtggtgttcttcgacgtgaccatcgggtccatcgccgccggccgcatcaagatggagctcttcgccgacatcgcccccaagaccgcggagaacttccggcagttctgcactggggagcatagaaaaaatgctttgccacaaggttataagggctgccaattccatagagtgatcaaagatttcatgattcagggtggtgacttcttgaagaatgatggtactggatgcacatcaatctacggtaccaaatttgatgatgaaaattttatagcaaagcatacagggcctggactgctctcgatggcaaacagtggaattaactctaatggatctcagttctttataacatgtgcaaagtgtgactggcttgacaacaaacatgtggtatttgggagagtgcttggagacggtttgctcgtcgtgaggaagattgaaaatgttgcaactggagcgaataacaaaccaaagcttgcctgcgttataagtgagtgtggtgaaatgtagtttgatccctttgtgtggctaatcgtggattcttgacgctgctgatgtagaccctgtttggttgatggaagtacttaaacagtggaaacattgatggaaatgtattgtgtctaggcaacctgcagaataatagaccaaaaaaactaatattcttgtttggcttgggagttcggccttc

SEQ ID NO: 1910 - protein, 201 aa, Zea mays subsp. mays
  peptide (1)..(201): Ceres Seq. ID no. 12351300
  misc_feature (35)..(201): Pfam Name: Cyclophilin type peptidyl-prolyl cis-trans isomerase Pfam Description: Cyclophilin type peptidyl-prolyl cis-trans
  misc_feature (33)..(201): Homolog of NCBI NO: 24586038 NR Description: CG17266-PA [Drosophila melanogaster]
  misc_feature (30)..(201): Homolog of NCBI NO: 17532643 NR Description: Peptidyl-prolyl cis-trans isomerase cyclophilin
  misc_feature (30)..(201): Homolog of NCBI NO: 39597495 NR Description: Hypothetical protein CBG03161 [Caenorhabditis
  misc_feature (30)..(201): Homolog of NCBI NO: 39849992 NR Description: Unknown (protein for MGC:76244) [Silurana
  misc_feature (30)..(201): Homolog of NCBI NO: 5454154 NR Description: peptidyl prolyl isomerase H; cyclophilin H [Homo
  misc_feature (26)..(201): Homolog of NCBI NO: 11602709 NR Description: putative U-snRNP-associated cyclophilin
  misc_feature (27)..(201): Homolog of NCBI NO: 37595420 NR Description: peptidyl prolyl isomerase H [Danio rerio]
  misc_feature (17)..(201): Homolog of NCBI NO: 4454307 NR Description: cyclophilin [Pseudotsuga menziesii]
  misc_feature (1)..(201): Homolog of NCBI NO: 15224944 NR Description: putative peptidyl-prolyl cis-trans isomerase
  misc_feature (2)..(201): Homolog of NCBI NO: 32129321 NR Description: putative cyclophilin [Oryza sativa (japonica
MASGGAAISAGPTPPSATASSVEWHQRPPNPKNPVVFFDVTIGSIAAGRIKMELFADIAPKTAENFRQFCTGEHRKNALPQGYKGCQFHRVIKDFMIQGGDFLKNDGTGCTSIYGTKFDDENFIAKHTGPGLLSMANSGINSNGSQFFITCAKCDWLDNKHVVFGRVLGDGLLVVRKIENVATGANNKPKLACVISECGEM

SEQ ID NO: 1911 - protein, 150 aa, Zea mays subsp. mays
  peptide (1)..(150): Ceres Seq. ID no. 12351301
  misc_feature (1)..(150): Pfam Name: Cyclophilin type peptidyl-prolyl cis-trans isomerase Pfam Description: Cyclophilin type peptidyl-prolyl cis-trans
  misc_feature (1)..(150): Homolog of NCBI NO: 24586038 NR Description: CG17266-PA [Drosophila melanogaster]
  misc_feature (1)..(150): Homolog of NCBI NO: 17532643 NR Description: Peptidyl-prolyl cis-trans isomerase cyclophilin
  misc_feature (1)..(150): Homolog of NCBI NO: 39597495 NR Description: Hypothetical protein CBG03161 [Caenorhabditis
  misc_feature (1)..(150): Homolog of NCBI NO: 39849992 NR Description: Unknown (protein for MGC:76244) [Silurana
  misc_feature (1)..(150): Homolog of NCBI NO: 5454154 NR Description: peptidyl prolyl isomerase H; cyclophilin H [Homo
  misc_feature (1)..(150): Homolog of NCBI NO: 11602709 NR Description: putative U-snRNP-associated cyclophilin
  misc_feature (1)..(150): Homolog of NCBI NO: 37595420 NR Description: peptidyl prolyl isomerase H [Danio rerio]
  misc_feature (1)..(150): Homolog of NCBI NO: 4454307 NR Description: cyclophilin [Pseudotsuga menziesii]
  misc_feature (1)..(150): Homolog of NCBI NO: 15224944 NR Description: putative peptidyl-prolyl cis-trans isomerase
  misc_feature (1)..(150): Homolog of NCBI NO: 32129321 NR Description: putative cyclophilin [Oryza sativa (japonica
MELFADIAPKTAENFRQFCTGEHRKNALPQGYKGCQFHRVIKDFMIQGGDFLKNDGTGCTSIYGTKFDDENFIAKHTGPGLLSMANSGINSNGSQFFITCAKCDWLDNKHVVFGRVLGDGLLVVRKIENVATGANNKPKLACVISECGEM

SEQ ID NO: 1912 - protein, 106 aa, Zea mays subsp. mays
  peptide (1)..(106): Ceres Seq. ID no. 12351302
  misc_feature (1)..(106): Pfam Name: Cyclophilin type peptidyl-prolyl cis-trans isomerase Pfam Description: Cyclophilin type peptidyl-prolyl cis-trans
  misc_feature (1)..(106): Homolog of NCBI NO: 24586038 NR Description: CG17266-PA [Drosophila melanogaster]
  misc_feature (1)..(106): Homolog of NCBI NO: 17532643 NR Description: Peptidyl-prolyl cis-trans isomerase cyclophilin
  misc_feature (1)..(106): Homolog of NCBI NO: 39597495 NR Description: Hypothetical protein CBG03161 [Caenorhabditis
  misc_feature (1)..(106): Homolog of NCBI NO: 39849992 NR Description: Unknown (protein for MGC:76244) [Silurana
  misc_feature (1)..(106): Homolog of NCBI NO: 5454154 NR Description: peptidyl prolyl isomerase H; cyclophilin H [Homo
  misc_feature (1)..(106): Homolog of NCBI NO: 11602709 NR Description: putative U-snRNP-associated cyclophilin
  misc_feature (1)..(106): Homolog of NCBI NO: 37595420 NR Description: peptidyl prolyl isomerase H [Danio rerio]
  misc_feature (1)..(106): Homolog of NCBI NO: 4454307 NR Description: cyclophilin [Pseudotsuga menziesii]
  misc_feature (1)..(106): Homolog of NCBI NO: 15224944 NR Description: putative peptidyl-prolyl cis-trans isomerase
  misc_feature (1)..(106): Homolog of NCBI NO: 32129321 NR Description: putative cyclophilin [Oryza sativa (japonica
MIQGGDFLKNDGTGCTSIYGTKFDDENFIAKHTGPGLLSMANSGINSNGSQFFITCAKCDWLDNKHVVFGRVLGDGLLVVRKIENVATGANNKPKLACVISECGEM

SEQ ID NO: 1913 - DNA, 1416 bp, Zea mays subsp. mays
  misc_feature (1)..(1416): Ceres Seq. ID no. 12373949
  misc_feature: MA Experiment ID: 108528 Result: Up-regulated in Transcription
  misc_feature: MA Experiment 108528 PARAMETER Experiment Name: Zm_Imbibed_Seeds_P Parameter: Age (day) Value: 5 vs. 2
  misc_feature: MA Experiment 108528 PARAMETER Experiment Name: Zm_Imbibed_Seeds_P Parameter: Organism Value: Zea mays
  misc_feature: MA Experiment 108528 PARAMETER Experiment Name: Zm_Imbibed_Seeds_P Parameter: Plant Line Value: 35A19
  misc_feature: MA Experiment 108528 PARAMETER Experiment Name: Zm_Imbibed_Seeds_P Parameter: Tissue Value: Aerial vs. Embryo
  misc_feature: MA Experiment ID: 108545 Result: Up-regulated in Transcription
  misc_feature: MA Experiment 108545 PARAMETER Experiment Name: Zm_Imbibed_Seeds_P Parameter: Age (day) Value: 3 vs. 2
  misc_feature: MA Experiment 108545 PARAMETER Experiment Name: Zm_Imbibed_Seeds_P Parameter: Organism Value: Zea mays
  misc_feature: MA Experiment 108545 PARAMETER Experiment Name: Zm_Imbibed_Seeds_P Parameter: Plant Line Value: 35A19
  misc_feature: MA Experiment 108545 PARAMETER Experiment Name: Zm_Imbibed_Seeds_P Parameter: Tissue Value: Aerial vs. Embryo
  misc_feature: MA Experiment ID: 108547 Result: Up-regulated in Transcription
  misc_feature: MA Experiment 108547 PARAMETER Experiment Name: Zm_Imbibed_Seeds_P Parameter: Age (day) Value: 4 vs. 2
  misc_feature: MA Experiment 108547 PARAMETER Experiment Name: Zm_Imbibed_Seeds_P Parameter: Organism Value: Zea mays
  misc_feature: MA Experiment 108547 PARAMETER Experiment Name: Zm_Imbibed_Seeds_P Parameter: Plant Line Value: 35A19
  misc_feature: MA Experiment 108547 PARAMETER Experiment Name: Zm_Imbibed_Seeds_P Parameter: Tissue Value: Aerial vs. Embryo
  misc_feature: MA Experiment ID: 108556 Result: Down-regulated in Transcription
  misc_feature: MA Experiment 108556 PARAMETER Experiment Name: Zm_Drought_P Parameter: Age (day) Value: 9
  misc_feature: MA Experiment 108556 PARAMETER Experiment Name: Zm_Drought_P Parameter: Organism Value: Zea mays
  misc_feature: MA Experiment 108556 PARAMETER Experiment Name: Zm_Drought_P Parameter: Plant Line Value: 35A19
  misc_feature: MA Experiment 108556 PARAMETER Experiment Name: Zm_Drought_P Parameter: Timepoint (hr) Value: 24
  misc_feature: MA Experiment 108556 PARAMETER Experiment Name: Zm_Drought_P Parameter: Tissue Value: Aerial
  misc_feature: MA Experiment 108556 PARAMETER Experiment Name: Zm_Drought_P Parameter: Treatment Value: Drought vs. No Drought
  misc_feature: MA Experiment ID: 108597 Result: Down-regulated in Transcription
  misc_feature: MA Experiment 108597 PARAMETER Experiment Name: Zm_100uM_ABA_P Parameter: Age (day) Value: 9
  misc_feature: MA Experiment 108597 PARAMETER Experiment Name: Zm_100uM_ABA_P Parameter: Organism Value: Zea mays
  misc_feature: MA Experiment 108597 PARAMETER Experiment Name: Zm_100uM_ABA_P Parameter: Plant Line Value: 35A19
  misc_feature: MA Experiment 108597 PARAMETER Experiment Name: Zm_100uM_ABA_P Parameter: Timepoint (hr) Value: 24
  misc_feature: MA Experiment 108597 PARAMETER Experiment Name: Zm_100uM_ABA_P Parameter: Tissue Value: Aerial
  misc_feature: MA Experiment 108597 PARAMETER Experiment Name: Zm_100uM_ABA_P Parameter: Treatment Value: 100uM ABA vs. No Treatment
  misc_feature: MA Experiment ID: 20000480 Result: Down-regulated in Transcription
  misc_feature: MA Experiment 20000480 PARAMETER Experiment Name: Zm_Drought_P Parameter: Age (day) Value: 11
  misc_feature: MA Experiment 20000480 PARAMETER Experiment Name: Zm_Drought_P Parameter: Organism Value: Zea mays
  misc_feature: MA Experiment 20000480 PARAMETER Experiment Name: Zm_Drought_P Parameter: Plant Line Value: 35A19
  misc_feature: MA Experiment 20000480 PARAMETER Experiment Name: Zm_Drought_P Parameter: Timepoint (hr) Value: 72
  misc_feature: MA Experiment 20000480 PARAMETER Experiment Name: Zm_Drought_P Parameter: Tissue Value: Aerial
  misc_feature: MA Experiment 20000480 PARAMETER Experiment Name: Zm_Drought_P Parameter: Treatment Value: Drought vs. No Drought
  misc_feature: MA Experiment ID: 20000488 Result: Up-regulated in Transcription
  misc_feature: MA Experiment 20000488 PARAMETER Experiment Name: Zm_50mM_NH4NO3_L_to_H_P Parameter: Organism Value: Zea mays
  misc_feature: MA Experiment 20000488 PARAMETER Experiment Name: Zm_50mM_NH4NO3_L_to_H_P Parameter: Timepoint (hr) Value: 8
  misc_feature: MA Experiment 20000488 PARAMETER Experiment Name: Zm_50mM_NH4NO3_L_to_H_P Parameter: Tissue Value: Leaves
  misc_feature: MA Experiment 20000488 PARAMETER Experiment Name: Zm_50mM_NH4NO3_L_to_H_P Parameter: Treatment Value: 50mM NH4NO3 vs. 100mM Mannitol
  misc_feature: MA Experiment ID: 20000492 Result: Up-regulated in Transcription
  misc_feature: MA Experiment 20000492 PARAMETER Experiment Name: Zm_Hybrid_Seed_Dev_P Parameter: DAP Value: 12
  misc_feature: MA Experiment 20000492 PARAMETER Experiment Name: Zm_Hybrid_Seed_Dev_P Parameter: Organism Value: Zea mays
  misc_feature: MA Experiment 20000492 PARAMETER Experiment Name: Zm_Hybrid_Seed_Dev_P Parameter: Plant Line Value: 35A19
  misc_feature: MA Experiment 20000492 PARAMETER Experiment Name: Zm_Hybrid_Seed_Dev_P Parameter: Tissue Value: Fert Kernel vs. Unfert Floret
gcacgagaccattacctagaacatcctaatcgaaaactcggacccaaacccaaacatccatctcatcgatctccttatcccttcccgtcgcataaacccccgccgccgtgacctcgcagcgaccctgccctcgttctaggctttcattgcaggcctcgcgtctccagtggcagggcaagagaaaggagaggatggcgtcgccgataccgcgcgagtgggtcgggctgcagcagtttccggcggctacacagaccaagctgcacgaactcctcggcaaactcaaggaggaggatgtgagcacattaacaattctggtgatggggaaaggtggagtgggaaagtcatccactgttaactccatcgttggggagagggttgcctctgtcagcgctttgccagtctgagggtctgagaccaatgatgtgctcgcgcacaagggcagggttcactttgaacattatcgacactcctgggcttattgaaggtggatacattaatgagcaggccgttgacatcattaagagatttcttctaggcaagactatcgatgttctcctgtacgtggatcgtttggatgcgtatagaatggatacactggatgaacaggttataagagccatcaccaattcatttggaaaagatatttggcgaagatcattggttgtgttgacccatgcccaactctcaccacctgatggaatcgactataatgatttctttacaagaagatcagaggcacttttgcgatacatccactcaggagcaggaatcaacaaacgagaatatggggatttccccttgccaatagcattggtggagaacagtggaaggtgcaagactaatgagcatggggagaagatacttccggacggaactctgtgggttccaaacctgatgaaagaaattactgttgtcatctcaaacgggagcagtcccactcatgttgatcagaagttaattgatggtccaaaccctaacaatcgccgaaagttgttcataccacttatccttgctgtggagtacttcttggtggtaaaaggaatccggagggcgatccatgcagatatcgcaaacgggaaggtagatgactgggagcagcgttaccgggacctggtgggaagcagggacctcgtagagcagaaaggttctacctcccggaaccgcaaagcctaagttggtgtaccagaaaggattctattcgtgttgagacccacccactcgatctgctgctccttttcctaaatctgtgctgggggctttatagagttcgctggtactacttgaaaaaaaaatgctcctgttgtagttgataagattatgtttcccattttatgacgattggccgtcttcgcaattttgaagatgttatcgaatacgtgttattttattgttttaaattatatatggcatggaaac

SEQ ID NO: 1914 - protein, 251 aa, Zea mays subsp. mays
  peptide (1)..(251): Ceres Seq. ID no. 12373950
  misc_feature (1)..(160): Pfam Name: AIG1 family Pfam Description: AIG1 family
  misc_feature (1)..(221): Homolog of NCBI NO: 15217705 NR Description: putative GTP-binding protein
  misc_feature (1)..(221): Homolog of NCBI NO: 32765535 NR Description: TOC33 [Brassica napus]
  misc_feature (1)..(221): Homolog of NCBI NO: 33391904 NR Description: TOC33 [Brassica napus]
  misc_feature (1)..(236): Homolog of NCBI NO: 1076522 NR Description: chloroplast import-associated protein IAP36,
  misc_feature (1)..(236): Homolog of NCBI NO: 25091388 NR Description: Translocase of chloroplast 34 (34 kDa chloroplast envelope protein) (GTP-binding protein OEP34) (GTP-binding
  misc_feature (1)..(236): Homolog of NCBI NO: 21594231 NR Description: GTP-binding protein [Arabidopsis thaliana]
  misc_feature (1)..(236): Homolog of NCBI NO: 25091410 NR Description: Translocase of chloroplast 34 (34 kDa chloroplast
  misc_feature (1)..(236): Homolog of NCBI NO: 15238381 NR Description: GTP-binding protein (gb|AAD09203.1)
  misc_feature (1)..(251): Homolog of NCBI NO: 6689637 NR Description: Toc34-1 protein [Zea mays]
  misc_feature (1)..(251): Homolog of NCBI NO: 7259224 NR Description: Toc34-2 protein [Zea mays]
MMCSRTRAGFTLNIIDTPGLIEGGYINEQAVDIIKRFLLGKTIDVLLYVDRLDAYRMDTLDEQVIRAITNSFGKDIWRRSLVVLTHAQLSPPDGIDYNDFFTRRSEALLRYIHSGAGINKREYGDFPLPIALVENSGRCKTNEHGEKILPDGTLWVPNLMKEITVVISNGSSPTHVDQKLIDGPNPNNRRKLFIPLILAVEYFLVVKGIRRAIHADIANGKVDDWEQRYRDLVGSRDLVEQKGSTSRNRKA

SEQ ID NO: 1915 - protein, 250 aa, Zea mays subsp. mays
  peptide (1)..(250): Ceres Seq. ID no. 12373951
  misc_feature (1)..(159): Pfam Name: AIG1 family Pfam Description: AIG1 family
  misc_feature (1)..(220): Homolog of NCBI NO: 15217705 NR Description: putative GTP-binding protein
  misc_feature (1)..(220): Homolog of NCBI NO: 32765535 NR Description: TOC33 [Brassica napus]
  misc_feature (1)..(220): Homolog of NCBI NO: 33391904 NR Description: TOC33 [Brassica napus]
  misc_feature (1)..(235): Homolog of NCBI NO: 1076522 NR Description: chloroplast import-associated protein IAP36,
  misc_feature (1)..(235): Homolog of NCBI NO: 25091388 NR Description: Translocase of chloroplast 34 (34 kDa chloroplast envelope protein) (GTP-binding protein OEP34) (GTP-binding
  misc_feature (1)..(235): Homolog of NCBI NO: 21594231 NR Description: GTP-binding protein [Arabidopsis thaliana]
  misc_feature (1)..(235): Homolog of NCBI NO: 25091410 NR Description: Translocase of chloroplast 34 (34 kDa chloroplast
  misc_feature (1)..(235): Homolog of NCBI NO: 15238381 NR Description: GTP-binding protein (gb|AAD09203.1)
  misc_feature (1)..(250): Homolog of NCBI NO: 6689637 NR Description: Toc34-1 protein [Zea mays]
  misc_feature (1)..(250): Homolog of NCBI NO: 7259224 NR Description: Toc34-2 protein [Zea mays]
MCSRTRAGFTLNIIDTPGLIEGGYINEQAVDIIKRFLLGKTIDVLLYVDRLDAYRMDTLDEQVIRAITNSFGKDIWRRSLVVLTHAQLSPPDGIDYNDFFTRRSEALLRYIHSGAGINKREYGDFPLPIALVENSGRCKTNEHGEKILPDGTLWVPNLMKEITVVISNGSSPTHVDQKLIDGPNPNNRRKLFIPLILAVEYFLVVKGIRRAIHADIANGKVDDWEQRYRDLVGSRDLVEQKGSTSRNRKA

SEQ ID NO: 1916 - protein, 195 aa, Zea mays subsp. mays
  peptide (1)..(195): Ceres Seq. ID no. 12373952
  misc_feature (1)..(104): Pfam Name: AIG1 family Pfam Description: AIG1 family
  misc_feature (1)..(180): Homolog of NCBI NO: 1076522 NR Description: chloroplast import-associated protein IAP36,
  misc_feature (1)..(180): Homolog of NCBI NO: 25091388 NR Description: Translocase of chloroplast 34 (34 kDa chloroplast envelope protein) (GTP-binding protein OEP34) (GTP-binding
  misc_feature (1)..(180): Homolog of NCBI NO: 21594231 NR Description: GTP-binding protein [Arabidopsis thaliana]
  misc_feature (1)..(180): Homolog of NCBI NO: 25091410 NR Description: Translocase of chloroplast 34 (34 kDa chloroplast
  misc_feature (1)..(165): Homolog of NCBI NO: 33391904 NR Description: TOC33 [Brassica napus]
  misc_feature (1)..(165): Homolog of NCBI NO: 15217705 NR Description: putative GTP-binding protein
  misc_feature (1)..(165): Homolog of NCBI NO: 32765535 NR Description: TOC33 [Brassica napus]
  misc_feature (1)..(180): Homolog of NCBI NO: 15238381 NR Description: GTP-binding protein (gb|AAD09203.1)
  misc_feature (1)..(195): Homolog of NCBI NO: 6689637 NR Description: Toc34-1 protein [Zea mays]
  misc_feature (1)..(195): Homolog of NCBI NO: 7259224 NR Description: Toc34-2 protein [Zea mays]
MDTLDEQVIRAITNSFGKDIWRRSLVVLTHAQLSPPDGIDYNDFFTRRSEALLRYIHSGAGINKREYGDFPLPIALVENSGRCKTNEHGEKILPDGTLWVPNLMKEITVVISNGSSPTHVDQKLIDGPNPNNRRKLFIPLILAVEYFLVVKGIRRAIHADIANGKVDDWEQRYRDLVGSRDLVEQKGSTSRNRKA

SEQ ID NO: 1917 - DNA, 909 bp, Zea mays subsp. mays
  misc_feature (1)..(909): Ceres Seq. ID no. 12413503
  misc_feature: MA Experiment ID: 108533 Result: Down-regulated in Transcription
  misc_feature: MA Experiment 108533 PARAMETER Experiment Name: Zm_4deg_Cold_P Parameter: Age (hr) Value: 8
  misc_feature: MA Experiment 108533 PARAMETER Experiment Name: Zm_4deg_Cold_P Parameter: Organism Value: Zea mays
  misc_feature: MA Experiment 108533 PARAMETER Experiment Name: Zm_4deg_Cold_P Parameter: Plant Line Value: 35A19
  misc_feature: MA Experiment 108533 PARAMETER Experiment Name: Zm_4deg_Cold_P Parameter: Temperature (deg C) Value: 4 vs. 22
  misc_feature: MA Experiment 108533 PARAMETER Experiment Name: Zm_4deg_Cold_P Parameter: Timepoint (hr) Value: 1
  misc_feature: MA Experiment 108533 PARAMETER Experiment Name: Zm_4deg_Cold_P Parameter: Tissue Value: Aerial
  misc_feature: MA Experiment ID: 108535 Result: Down-regulated in Transcription
  misc_feature: MA Experiment 108535 PARAMETER Experiment Name: Zm_Meristem_P Parameter: Age (day) Value: 8
  misc_feature: MA Experiment 108535 PARAMETER Experiment Name: Zm_Meristem_P Parameter: Organism Value: Zea mays
  misc_feature: MA Experiment 108535 PARAMETER Experiment Name: Zm_Meristem_P Parameter: Plant Line Value: 35A19
  misc_feature: MA Experiment 108535 PARAMETER Experiment Name: Zm_Meristem_P Parameter: Tissue Value: Root Meristem vs. Above Root Meristem
  misc_feature: MA Experiment ID: 108543 Result: Down-regulated in Transcription
  misc_feature: MA Experiment ID: 108689 Result: Up-regulated in Transcription
  misc_feature: MA Experiment 108689 PARAMETER Experiment Name: Zm_Drought_Roots_P Parameter: Age (day) Value: 9
  misc_feature: MA Experiment 108689 PARAMETER Experiment Name: Zm_Drought_Roots_P Parameter: Organism Value: Zea mays
  misc_feature: MA Experiment 108689 PARAMETER Experiment Name: Zm_Drought_Roots_P Parameter: Plant Line Value: 35A19
  misc_feature: MA Experiment 108689 PARAMETER Experiment Name: Zm_Drought_Roots_P Parameter: Timepoint (hr) Value: 24
  misc_feature: MA Experiment 108689 PARAMETER Experiment Name: Zm_Drought_Roots_P Parameter: Tissue Value: Roots
  misc_feature: MA Experiment 108689 PARAMETER Experiment Name: Zm_Drought_Roots_P Parameter: Treatment Value: Drought vs. No Drought
acacggcgtgccgcggtgggcgaccttttttgcaccgggagataaatcgacagcaccctgacctcaagtcctcaacccgcaggccgcagctgctcccgcccgccgcgcaagcggccaagcgccgccggttcttctcgagcaattctcataaatcattgtcctcataacttgtaatgggtggaagccagtatgatgatgactgggtgttgcccagtgccgatatcactcttgttctggttgggaaacttggctatggcaagagtgcaactggaaatagcatccttggacgggaagcatttgtatcagaatattcacatgccagtgttactaatacttgtcagttgggaagcactaccctgaaggacggccgcaccatcaatgttattgatacaccagggttatttgatatgagcattacatcggacgaggctggtaaagagattgttaaatgcatgaacatggctaaagatgggatacatgcagttctgatggttttttctgccacatctcggttttctcgagaggacgcaagtacagttgagaccattaaagtcttctttggtgaaaagattgtcgaccacatgattttagtcttcacttatggagatttagttggtgaatctaagttgaagaaaatgttaaataatgcgccagagtatttgcagaatgttgttgagctatgccaaaacagagtggttgtcttcgataacgtgactgaagaccgaaggctccaagcgcagcaacttgacaaattgctcgatgtagtggattcagtttgtgcaaaaaatggaggaaaaccattttcagatcaaatgttcactagcatcaaggaggtgcatgatagagaaaaagaggtgcatacctcgggatattcagatgagcagatatctgaattgaaaaaggagattc

SEQ ID NO: 1918 - protein, 245 aa, Zea mays subsp. mays
  peptide (1)..(245): Ceres Seq. ID no. 12413504
  misc_feature (18)..(220): Pfam Name: AIG1 family Pfam Description: AIG1 family
  misc_feature (19)..(244): Homolog of NCBI NO: 15217717 NR Description: AIG1-like protein; protein id: At1g33890.1
  misc_feature (19)..(244): Homolog of NCBI NO: 15220922 NR Description: AIG1-like protein; protein id: At1g33950.1
  misc_feature (19)..(244): Homolog of NCBI NO: 15217731 NR Description: AIG1; protein id: At1g33960.1, supported by cDNA:
  misc_feature (19)..(244): Homolog of NCBI NO: 10092442 NR Description: disease resistance protein AIG1; 916-2572
  misc_feature (8)..(244): Homolog of NCBI NO: 15217724 NR Description: AIG1-like protein; protein id: At1g33930.1
  misc_feature (1)..(244): Homolog of NCBI NO: 24417378 NR Description: unknown [Arabidopsis thaliana]
  misc_feature (1)..(244): Homolog of NCBI NO: 25373414 NR Description: hypothetical protein F12G12.21 - Arabidopsis
  misc_feature (1)..(244): Homolog of NCBI NO: 18399081 NR Description: expressed protein
  misc_feature (1)..(244): Homolog of NCBI NO: 4097585 NR Description: NTGP4 [Nicotiana tabacum]
  misc_feature (7)..(237): Homolog of NCBI NO: 38346576 NR Description: OSJNBa0064D20.7 [Oryza sativa (japonica
MGGSQYDDDWVLPSADITLVLVGKLGYGKSATGNSILGREAFVSEYSHASVTNTCQLGSTTLKDGRTINVIDTPGLFDMSITSDEAGKEIVKCMNMAKDGIHAVLMVFSATSRFSREDASTVETIKVFFGEKIVDHMILVFTYGDLVGESKLKKMLNNAPEYLQNVVELCQNRVVVFDNVTEDRRLQAQQLDKLLDVVDSVCAKNGGKPFSDQMFTSIKEVHDREKEVHTSGYSDEQISELKKEI

SEQ ID NO: 1919 - protein, 167 aa, Zea mays subsp. mays
  peptide (1)..(167): Ceres Seq. ID no. 12413505
  misc_feature (1)..(142): Pfam Name: AIG1 family Pfam Description: AIG1 family
  misc_feature (1)..(166): Homolog of NCBI NO: 15217717 NR Description: AIG1-like protein; protein id: At1g33890.1
  misc_feature (1)..(166): Homolog of NCBI NO: 15220922 NR Description: AIG1-like protein; protein id: At1g33950.1
  misc_feature (1)..(166): Homolog of NCBI NO: 15217731 NR Description: AIG1; protein id: At1g33960.1, supported by cDNA:
  misc_feature (1)..(166): Homolog of NCBI NO: 10092442 NR Description: disease resistance protein AIG1; 916-2572
  misc_feature (1)..(166): Homolog of NCBI NO: 15217724 NR Description: AIG1-like protein; protein id: At1g33930.1
  misc_feature (1)..(166): Homolog of NCBI NO: 24417378 NR Description: unknown [Arabidopsis thaliana]
  misc_feature (1)..(166): Homolog of NCBI NO: 25373414 NR Description: hypothetical protein F12G12.21 - Arabidopsis
  misc_feature (1)..(166): Homolog of NCBI NO: 18399081 NR Description: expressed protein
  misc_feature (1)..(166): Homolog of NCBI NO: 4097585 NR Description: NTGP4 [Nicotiana tabacum]
  misc_feature (1)..(159): Homolog of NCBI NO: 38346576 NR Description: OSJNBa0064D20.7 [Oryza sativa (japonica
MSITSDEAGKEIVKCMNMAKDGIHAVLMVFSATSRFSREDASTVETIKVFFGEKIVDHMILVFTYGDLVGESKLKKMLNNAPEYLQNVVELCQNRVVVFDNVTEDRRLQAQQLDKLLDVVDSVCAKNGGKPFSDQMFTSIKEVHDREKEVHTSGYSDEQISELKKEI

SEQ ID NO: 1920 - protein, 152 aa, Zea mays subsp. mays
  peptide (1)..(152): Ceres Seq. ID no. 12413506
  misc_feature (1)..(127): Pfam Name: AIG1 family Pfam Description: AIG1 family
  misc_feature (1)..(151): Homolog of NCBI NO: 15217717 NR Description: AIG1-like protein; protein id: At1g33890.1
  misc_feature (1)..(151): Homolog of NCBI NO: 15220922 NR Description: AIG1-like protein; protein id: At1g33950.1
  misc_feature (1)..(151): Homolog of NCBI NO: 15217731 NR Description: AIG1; protein id: At1g33960.1, supported by cDNA:
  misc_feature (1)..(151): Homolog of NCBI NO: 10092442 NR Description: disease resistance protein AIG1; 916-2572
  misc_feature (1)..(151): Homolog of NCBI NO: 15217724 NR Description: AIG1-like protein; protein id: At1g33930.1
  misc_feature (1)..(151): Homolog of NCBI NO: 24417378 NR Description: unknown [Arabidopsis thaliana]
  misc_feature (1)..(151): Homolog of NCBI NO: 25373414 NR Description: hypothetical protein F12G12.21 - Arabidopsis
  misc_feature (1)..(151): Homolog of NCBI NO: 18399081 NR Description: expressed protein
  misc_feature (1)..(151): Homolog of NCBI NO: 4097585 NR Description: NTGP4 [Nicotiana tabacum]
  misc_feature (1)..(144): Homolog of NCBI NO: 38346576 NR Description: OSJNBa0064D20.7 [Oryza sativa (japonica
MNMAKDGIHAVLMVFSATSRFSREDASTVETIKVFFGEKIVDHMILVFTYGDLVGESKLKKMLNNAPEYLQNVVELCQNRVVVFDNVTEDRRLQAQQLDKLLDVVDSVCAKNGGKPFSDQMFTSIKEVHDREKEVHTSGYSDEQISELKKEI

SEQ ID NO: 1921 - DNA, 1414 bp, Zea mays subsp. mays
  misc_feature (1)..(1414): Ceres Seq. ID no. 12410938
  misc_feature: MA Experiment ID: 108527 Result: Down-regulated in Transcription
  misc_feature: MA Experiment 108527 PARAMETER Experiment Name: Zm_5mM_NO_P Parameter: Age (day) Value: 8
  misc_feature: MA Experiment 108527 PARAMETER Experiment Name: Zm_5mM_NO_P Parameter: Organism Value: Zea mays
  misc_feature: MA Experiment 108527 PARAMETER Experiment Name: Zm_5mM_NO_P Parameter: Plant Line Value: 35A19
  misc_feature: MA Experiment 108527 PARAMETER Experiment Name: Zm_5mM_NO_P Parameter: Timepoint (hr) Value: 6
  misc_feature: MA Experiment 108527 PARAMETER Experiment Name: Zm_5mM_NO_P Parameter: Tissue Value: Aerial
  misc_feature: MA Experiment 108527 PARAMETER Experiment Name: Zm_5mM_NO_P Parameter: Treatment Value: 5mM NO vs. No Treatment
  misc_feature: MA Experiment ID: 108535 Result: Down-regulated in Transcription
  misc_feature: MA Experiment 108535 PARAMETER Experiment Name: Zm_Meristem_P Parameter: Age (day) Value: 8
  misc_feature: MA Experiment 108535 PARAMETER Experiment Name: Zm_Meristem_P Parameter: Organism Value: Zea mays
  misc_feature: MA Experiment 108535 PARAMETER Experiment Name: Zm_Meristem_P Parameter: Plant Line Value: 35A19
  misc_feature: MA Experiment 108535 PARAMETER Experiment Name: Zm_Meristem_P Parameter: Tissue Value: Root Meristem vs. Above Root Meristem
  misc_feature: MA Experiment ID: 108536 Result: Up-regulated in Transcription
  misc_feature: MA Experiment 108536 PARAMETER Experiment Name: Zm_Meristem_P Parameter: Age (day) Value: 8
  misc_feature: MA Experiment 108536 PARAMETER Experiment Name: Zm_Meristem_P Parameter: Organism Value: Zea mays
  misc_feature: MA Experiment 108536 PARAMETER Experiment Name: Zm_Meristem_P Parameter: Plant Line Value: 35A19
  misc_feature: MA Experiment 108536 PARAMETER Experiment Name: Zm_Meristem_P Parameter: Tissue Value: Shoot Meristem vs. Above Shoot Meristem
  misc_feature: MA Experiment ID: 108543 Result: Up-regulated in Transcription
  misc_feature: MA Experiment ID: 108544 Result: Up-regulated in Transcription
  misc_feature: MA Experiment ID: 108559 Result: Down-regulated in Transcription
  misc_feature: MA Experiment 108559 PARAMETER Experiment Name: Zm_5mM_NO_P Parameter: Age (day) Value: 8
  misc_feature: MA Experiment 108559 PARAMETER Experiment Name: Zm_5mM_NO_P Parameter: Organism Value: Zea mays
  misc_feature: MA Experiment 108559 PARAMETER Experiment Name: Zm_5mM_NO_P Parameter: Plant Line Value: 35A19
  misc_feature: MA Experiment 108559 PARAMETER Experiment Name: Zm_5mM_NO_P Parameter: Timepoint (hr) Value: 12
  misc_feature: MA Experiment 108559 PARAMETER Experiment Name: Zm_5mM_NO_P Parameter: Tissue Value: Aerial
  misc_feature: MA Experiment 108559 PARAMETER Experiment Name: Zm_5mM_NO_P Parameter: Treatment Value: 5mM NO vs. No Treatment
  misc_feature: MA Experiment ID: 108687 Result: Down-regulated in Transcription
  misc_feature: MA Experiment 108687 PARAMETER Experiment Name: Zm_Embryos-Flowers__P Parameter: Tissue Value: Embryo vs. Aerial+
  misc_feature: MA Experiment ID: 108688 Result: Down-regulated in Transcription
  misc_feature: MA Experiment 108688 PARAMETER Experiment Name: Zm_Embryos-Flowers__P Parameter: Tissue Value: Immature Flowers vs. Aerial+
  misc_feature: MA Experiment ID: 20000488 Result: Down-regulated in Transcription
  misc_feature: MA Experiment 20000488 PARAMETER Experiment Name: Zm_50mM_NH4NO3_L_to_H_P Parameter: Organism Value: Zea mays
  misc_feature: MA Experiment 20000488 PARAMETER Experiment Name: Zm_50mM_NH4NO3_L_to_H_P Parameter: Timepoint (hr) Value: 8
  misc_feature: MA Experiment 20000488 PARAMETER Experiment Name: Zm_50mM_NH4NO3_L_to_H_P Parameter: Tissue Value: Leaves
  misc_feature: MA Experiment 20000488 PARAMETER Experiment Name: Zm_50mM_NH4NO3_L_to_H_P Parameter: Treatment Value: 50mM NH4NO3 vs. 100mM Mannitol
  misc_feature: MA Experiment ID: 20000492 Result: Down-regulated in Transcription
  misc_feature: MA Experiment 20000492 PARAMETER Experiment Name: Zm_Hybrid_Seed_Dev_P Parameter: DAP Value: 12
  misc_feature: MA Experiment 20000492 PARAMETER Experiment Name: Zm_Hybrid_Seed_Dev_P Parameter: Organism Value: Zea mays
  misc_feature: MA Experiment 20000492 PARAMETER Experiment Name: Zm_Hybrid_Seed_Dev_P Parameter: Plant Line Value: 35A19
  misc_feature: MA Experiment 20000492 PARAMETER Experiment Name: Zm_Hybrid_Seed_Dev_P Parameter: Tissue Value: Fert Kernel vs. Unfert Floret
  misc_feature: MA Experiment ID: 20000532 Result: Up-regulated in Transcription
  misc_feature: MA Experiment 20000532 PARAMETER Experiment Name: Zm_0.001percent_MeJA_P Parameter: Age (day) Value: 10
  misc_feature: MA Experiment 20000532 PARAMETER Experiment Name: Zm_0.001percent_MeJA_P Parameter: Organism Value: Zea mays
  misc_feature: MA Experiment 20000532 PARAMETER Experiment Name: Zm_0.001percent_MeJA_P Parameter: Plant Line Value: 35A19
  misc_feature: MA Experiment 20000532 PARAMETER Experiment Name: Zm_0.001percent_MeJA_P Parameter: Timepoint (hr) Value: 48
  misc_feature: MA Experiment 20000532 PARAMETER Experiment Name: Zm_0.001percent_MeJA_P Parameter: Tissue Value: Aerial
  misc_feature: MA Experiment 20000532 PARAMETER Experiment Name: Zm_0.001percent_MeJA_P Parameter: Treatment Value: 0.001percent MeJA vs. No Treatment
  misc_feature: MA Experiment ID: 20000535 Result: Down-regulated in Transcription
  misc_feature: MA Experiment 20000535 PARAMETER Experiment Name: Zm_Hybrid_Seed_Dev_P Parameter: DAP Value: 30 vs. 12
  misc_feature: MA Experiment 20000535 PARAMETER Experiment Name: Zm_Hybrid_Seed_Dev_P Parameter: Organism Value: Zea mays
  misc_feature: MA Experiment 20000535 PARAMETER Experiment Name: Zm_Hybrid_Seed_Dev_P Parameter: Plant Line Value: 35A19
  misc_feature: MA Experiment 20000535 PARAMETER Experiment Name: Zm_Hybrid_Seed_Dev_P Parameter: Tissue Value: Embryo vs. Unfert Floret
acacaagctagcaattgaaaaaaaaaacaggcaaggaaaatggctccgaccgccgccaaggacagtggctccgccgatcgctggcgcgaggtgcaggcgttcgaggacagcaagctgggtgtgaagggcctggtcgactccggcgtcaagtccatcccggccatgttccaccacccgccggagtccctcaaggatgtcatttctccaccagctctgccctcctccgacgatgcgccggccatcccagtggtggacctgtccgtggcgcggcgcgaggatctggtggcccaggtgaagcacgcggccgggacggtgggcttcttctgggtggtgaaccacggcgtgccggaggagctgatggccagcatgctcagcggggtgcgccagttcaacgagggctctctggaggccaagcaggcgctctactcacgggaccccgctcgcaacgtgcgcttcgcttccaacttcgacctcttcgagtccgcggcggccgactggcgcgacacgctctactgcaagattgcgccggatccggcgccgcgggagctcgtgccggagcctctccggaacgtgatgatggaatacggcgaggaactgacgaagctggcgcggtccatgttcgagctgctgtcggagtccctcggcatgcccagcgaccacctgcacaagatggagtgcatgcagcagctccacatcgtgtgccagtactacccgccatgcccggagccgcacctcaccatcggcgtcaggaagcactcggacaccggtttcttcaccatcctcctgcaggacggcatgggcggcctgcaggtgctagtcgatcgcggaggcggccgccagacgtgggtggacgtcactccccgacctggggcactcatggtcaacatgggcagctttcttcagcttgtgacgaatgaccggtacaagagcgtggatcaccgggtgccggctaacaagagcagtgacacggcgagggtctcggtagctgccttcttcaaccccgacgagaagagaaccgagaggctgtatggccccattccagaccccagcaagcctccgctgtacaggagcgtcacgttcccggacttcatcgccaagttcaacagcatcggactggacggtcgcgtgctcgaccacttccggttggaggacgacggccctactcgtcttgctgctcctgcacaccacgtctagtcttgttttcgttcgatcgaacaaacagttctcgtcgtcgtctcttttatttttcctgcaatctgaatttcgagttctccaaataaataagggtatccattcccttcatccgcagagcgcgcggatgccttcactagcagctctagttttgctatgtatatagctgtgtgtgtggtacctttgtgactcatatattatgcaataaagtatgctttctcct

SEQ ID NO: 1922 - protein, 384 aa, Zea mays subsp. mays
  peptide (1)..(384): Ceres Seq. ID no. 12410939
  misc_feature (215)..(320): Pfam Name: 2OG-Fe(II) oxygenase superfamily Pfam Description: 2OG-Fe(II) oxygenase superfamily
  misc_feature (13)..(369): Homolog of NCBI NO: 5031283 NR Description: unknown [Prunus armeniaca]
  misc_feature (11)..(369): Homolog of NCBI NO: 15218794 NR Description: putative 1-aminocyclopropane-1-carboxylate oxidase
  misc_feature (5)..(361): Homolog of NCBI NO: 15221544 NR Description: oxidoreductase, putative
  misc_feature (9)..(380): Homolog of NCBI NO: 40253431 NR Description: putative 2-oxoglutarate-dependent oxygenase
  misc_feature (13)..(369): Homolog of NCBI NO: 15221545 NR Description: oxidoreductase, putative
  misc_feature (13)..(369): Homolog of NCBI NO: 13878119 NR Description: putative oxidoreductase [Arabidopsis thaliana]
  misc_feature (13)..(361): Homolog of NCBI NO: 30679748 NR Description: 2-oxoglutarate-dependent dioxygenase, putative
  misc_feature (9)..(371): Homolog of NCBI NO: 40253419 NR Description: putative 2-oxoglutarate-dependent oxygenase
  misc_feature (9)..(369): Homolog of NCBI NO: 40253423 NR Description: putative 2-oxoglutarate-dependent oxygenase
  misc_feature (1)..(369): Homolog of NCBI NO: 29123084 NR Description: 2-oxoglutarate-dependent oxygenase [Zea mays]
MAPTAAKDSGSADRWREVQAFEDSKLGVKGLVDSGVKSIPAMFHHPPESLKDVISPPALPSSDDAPAIPVVDLSVARREDLVAQVKHAAGTVGFFWVVNHGVPEELMASMLSGVRQFNEGSLEAKQALYSRDPARNVRFASNFDLFESAAADWRDTLYCKIAPDPAPRELVPEPLRNVMMEYGEELTKLARSMFELLSESLGMPSDHLHKMECMQQLHIVCQYYPPCPEPHLTIGVRKHSDTGFFTILLQDGMGGLQVLVDRGGGRQTWVDVTPRPGALMVNMGSFLQLVTNDRYKSVDHRVPANKSSDTARVSVAAFFNPDEKRTERLYGPIPDPSKPPLYRSVTFPDFIAKFNSIGLDGRVLDHFRLEDDGPTRLAAPAHHV

SEQ ID NO: 1923 - protein, 343 aa, Zea mays subsp. mays
  peptide (1)..(343): Ceres Seq. ID no. 12410940
  misc_feature (174)..(279): Pfam Name: 2OG-Fe(II) oxygenase superfamily Pfam Description: 2OG-Fe(II) oxygenase superfamily
  misc_feature (1)..(328): Homolog of NCBI NO: 5031283 NR Description: unknown [Prunus armeniaca]
  misc_feature (1)..(328): Homolog of NCBI NO: 15218794 NR Description: putative 1-aminocyclopropane-1-carboxylate oxidase
  misc_feature (1)..(320): Homolog of NCBI NO: 15221544 NR Description: oxidoreductase, putative
  misc_feature (1)..(339): Homolog of NCBI NO: 40253431 NR Description: putative 2-oxoglutarate-dependent oxygenase
  misc_feature (1)..(328): Homolog of NCBI NO: 15221545 NR Description: oxidoreductase, putative
  misc_feature (1)..(328): Homolog of NCBI NO: 13878119 NR Description: putative oxidoreductase [Arabidopsis thaliana]
  misc_feature (1)..(320): Homolog of NCBI NO: 30679748 NR Description: 2-oxoglutarate-dependent dioxygenase, putative
  misc_feature (1)..(330): Homolog of NCBI NO: 40253419 NR Description: putative 2-oxoglutarate-dependent oxygenase
  misc_feature (1)..(328): Homolog of NCBI NO: 40253423 NR Description: putative 2-oxoglutarate-dependent oxygenase
  misc_feature (1)..(328): Homolog of NCBI NO: 29123084 NR Description: 2-oxoglutarate-dependent oxygenase [Zea mays]
MFHHPPESLKDVISPPALPSSDDAPAIPVVDLSVARREDLVAQVKHAAGTVGFFWVVNHGVPEELMASMLSGVRQFNEGSLEAKQALYSRDPARNVRFASNFDLFESAAADWRDTLYCKIAPDPAPRELVPEPLRNVMMEYGEELTKLARSMFELLSESLGMPSDHLHKMECMQQLHIVCQYYPPCPEPHLTIGVRKHSDTGFFTILLQDGMGGLQVLVDRGGGRQTWVDVTPRPGALMVNMGSFLQLVTNDRYKSVDHRVPANKSSDTARVSVAAFFNPDEKRTERLYGPIPDPSKPPLYRSVTFPDFIAKFNSIGLDGRVLDHFRLEDDGPTRLAAPAHHV

SEQ ID NO: 1924 - protein, 278 aa, Zea mays subsp. mays
  peptide (1)..(278): Ceres Seq. ID no. 12410941
  misc_feature (109)..(214): Pfam Name: 2OG-Fe(II) oxygenase superfamily Pfam Description: 2OG-Fe(II) oxygenase superfamily
  misc_feature (1)..(263): Homolog of NCBI NO: 5031283 NR Description: unknown [Prunus armeniaca]
  misc_feature (1)..(263): Homolog of NCBI NO: 15218794 NR Description: putative 1-aminocyclopropane-1-carboxylate oxidase
  misc_feature (1)..(255): Homolog of NCBI NO: 15221544 NR Description: oxidoreductase, putative
  misc_feature (1)..(274): Homolog of NCBI NO: 40253431 NR Description: putative 2-oxoglutarate-dependent oxygenase
  misc_feature (1)..(263): Homolog of NCBI NO: 15221545 NR Description: oxidoreductase, putative
  misc_feature (1)..(263): Homolog of NCBI NO: 13878119 NR Description: putative oxidoreductase [Arabidopsis thaliana]
  misc_feature (1)..(255): Homolog of NCBI NO: 30679748 NR Description: 2-oxoglutarate-dependent dioxygenase, putative
  misc_feature (1)..(265): Homolog of NCBI NO: 40253419 NR Description: putative 2-oxoglutarate-dependent oxygenase
  misc_feature (1)..(263): Homolog of NCBI NO: 40253423 NR Description: putative 2-oxoglutarate-dependent oxygenase
  misc_feature (1)..(263): Homolog of NCBI NO: 29123084 NR Description: 2-oxoglutarate-dependent oxygenase [Zea mays]
MASMLSGVRQFNEGSLEAKQALYSRDPARNVRFASNFDLFESAAADWRDTLYCKIAPDPAPRELVPEPLRNVMMEYGEELTKLARSMFELLSESLGMPSDHLHKMECMQQLHIVCQYYPPCPEPHLTIGVRKHSDTGFFTILLQDGMGGLQVLVDRGGGRQTWVDVTPRPGALMVNMGSFLQLVTNDRYKSVDHRVPANKSSDTARVSVAAFFNPDEKRTERLYGPIPDPSKPPLYRSVTFPDFIAKFNSIGLDGRVLDHFRLEDDGPTRLAAPAHHV

SEQ ID NO: 1925 - DNA, 1186 bp, Zea mays subsp. mays
  misc_feature (1)..(1186): Ceres Seq. ID no. 12405834
  misc_feature: MA Experiment ID: 108523 Result: Down-regulated in Transcription
  misc_feature: MA Experiment 108523 PARAMETER Experiment Name: Zm_42deg_Heat_P Parameter: Age (day) Value: 8
  misc_feature: MA Experiment 108523 PARAMETER Experiment Name: Zm_42deg_Heat_P Parameter: Organism Value: Zea mays
  misc_feature: MA Experiment 108523 PARAMETER Experiment Name: Zm_42deg_Heat_P Parameter: Plant Line Value: 35A19
  misc_feature: MA Experiment 108523 PARAMETER Experiment Name: Zm_42deg_Heat_P Parameter: Temperature (deg C) Value: 42 vs. 22
  misc_feature: MA Experiment 108523 PARAMETER Experiment Name: Zm_42deg_Heat_P Parameter: Timepoint (hr) Value: 6
  misc_feature: MA Experiment 108523 PARAMETER Experiment Name: Zm_42deg_Heat_P Parameter: Tissue Value: Aerial
  misc_feature: MA Experiment ID: 108527 Result: Down-regulated in Transcription
  misc_feature: MA Experiment 108527 PARAMETER Experiment Name: Zm_5mM_NO_P Parameter: Age (day) Value: 8
  misc_feature: MA Experiment 108527 PARAMETER Experiment Name: Zm_5mM_NO_P Parameter: Organism Value: Zea mays
  misc_feature: MA Experiment 108527 PARAMETER Experiment Name: Zm_5mM_NO_P Parameter: Plant Line Value: 35A19
  misc_feature: MA Experiment 108527 PARAMETER Experiment Name: Zm_5mM_NO_P Parameter: Timepoint (hr) Value: 6
  misc_feature: MA Experiment 108527 PARAMETER Experiment Name: Zm_5mM_NO_P Parameter: Tissue Value: Aerial
  misc_feature: MA Experiment 108527 PARAMETER Experiment Name: Zm_5mM_NO_P Parameter: Treatment Value: 5mM NO vs. No Treatment
  misc_feature: MA Experiment ID: 108528 Result: Up-regulated in Transcription
  misc_feature: MA Experiment 108528 PARAMETER Experiment Name: Zm_Imbibed_Seeds_P Parameter: Age (day) Value: 5 vs. 2
  misc_feature: MA Experiment 108528 PARAMETER Experiment Name: Zm_Imbibed_Seeds_P Parameter: Organism Value: Zea mays
  misc_feature: MA Experiment 108528 PARAMETER Experiment Name: Zm_Imbibed_Seeds_P Parameter: Plant Line Value: 35A19
  misc_feature: MA Experiment 108528 PARAMETER Experiment Name: Zm_Imbibed_Seeds_P Parameter: Tissue Value: Aerial vs. Embryo
  misc_feature: MA Experiment ID: 108529 Result: Down-regulated in Transcription
  misc_feature: MA Experiment 108529 PARAMETER Experiment Name: Zm_Imbibed_Seeds_P Parameter: Age (day) Value: 5 vs. 2
  misc_feature: MA Experiment 108529 PARAMETER Experiment Name: Zm_Imbibed_Seeds_P Parameter: Organism Value: Zea mays
  misc_feature: MA Experiment 108529 PARAMETER Experiment Name: Zm_Imbibed_Seeds_P Parameter: Plant Line Value: 35A19
  misc_feature: MA Experiment 108529 PARAMETER Experiment Name: Zm_Imbibed_Seeds_P Parameter: Tissue Value: Roots vs. Embryo
  misc_feature: MA Experiment ID: 108530 Result: Up-regulated in Transcription
  misc_feature: MA Experiment 108530 PARAMETER Experiment Name: Zm_Imbibed_Seeds_P Parameter: Age (day) Value: 6 vs. 2
  misc_feature: MA Experiment 108530 PARAMETER Experiment Name: Zm_Imbibed_Seeds_P Parameter: Organism Value: Zea mays
  misc_feature: MA Experiment 108530 PARAMETER Experiment Name: Zm_Imbibed_Seeds_P Parameter: Plant Line Value: 35A19
  misc_feature: MA Experiment 108530 PARAMETER Experiment Name: Zm_Imbibed_Seeds_P Parameter: Tissue Value: Aerial vs. Embryo
  misc_feature: MA Experiment ID: 108545 Result: Up-regulated in Transcription
  misc_feature: MA Experiment 108545 PARAMETER Experiment Name: Zm_Imbibed_Seeds_P Parameter: Age (day) Value: 3 vs. 2
  misc_feature: MA Experiment 108545 PARAMETER Experiment Name: Zm_Imbibed_Seeds_P Parameter: Organism Value: Zea mays
  misc_feature: MA Experiment 108545 PARAMETER Experiment Name: Zm_Imbibed_Seeds_P Parameter: Plant Line Value: 35A19
  misc_feature: MA Experiment 108545 PARAMETER Experiment Name: Zm_Imbibed_Seeds_P Parameter: Tissue Value: Aerial vs. Embryo
  misc_feature: MA Experiment ID: 108546 Result: Down-regulated in Transcription
  misc_feature: MA Experiment 108546 PARAMETER Experiment Name: Zm_Imbibed_Seeds_P Parameter: Age (day) Value: 3 vs. 2
  misc_feature: MA Experiment 108546 PARAMETER Experiment Name: Zm_Imbibed_Seeds_P Parameter: Organism Value: Zea mays
  misc_feature: MA Experiment 108546 PARAMETER Experiment Name: Zm_Imbibed_Seeds_P Parameter: Plant Line Value: 35A19
  misc_feature: MA Experiment 108546 PARAMETER Experiment Name: Zm_Imbibed_Seeds_P Parameter: Tissue Value: Roots vs. Embryo
  misc_feature: MA Experiment ID: 108547 Result: Up-regulated in Transcription
  misc_feature: MA Experiment 108547 PARAMETER Experiment Name: Zm_Imbibed_Seeds_P Parameter: Age (day) Value: 4 vs. 2
  misc_feature: MA Experiment 108547 PARAMETER Experiment Name: Zm_Imbibed_Seeds_P Parameter: Organism Value: Zea mays
  misc_feature: MA Experiment 108547 PARAMETER Experiment Name: Zm_Imbibed_Seeds_P Parameter: Plant Line Value: 35A19
  misc_feature: MA Experiment 108547 PARAMETER Experiment Name: Zm_Imbibed_Seeds_P Parameter: Tissue Value: Aerial vs. Embryo
  misc_feature: MA Experiment ID: 108556 Result: Down-regulated in Transcription
  misc_feature: MA Experiment 108556 PARAMETER Experiment Name: Zm_Drought_P Parameter: Age (day) Value: 9
  misc_feature: MA Experiment 108556 PARAMETER Experiment Name: Zm_Drought_P Parameter: Organism Value: Zea mays
  misc_feature: MA Experiment 108556 PARAMETER Experiment Name: Zm_Drought_P Parameter: Plant Line Value: 35A19
  misc_feature: MA Experiment 108556 PARAMETER Experiment Name: Zm_Drought_P Parameter: Timepoint (hr) Value: 24
  misc_feature: MA Experiment 108556 PARAMETER Experiment Name: Zm_Drought_P Parameter: Tissue Value: Aerial
  misc_feature: MA Experiment 108556 PARAMETER Experiment Name: Zm_Drought_P Parameter: Treatment Value: Drought vs. No Drought
  misc_feature: MA Experiment ID: 108559 Result: Down-regulated in Transcription
  misc_feature: MA Experiment 108559 PARAMETER Experiment Name: Zm_5mM_NO_P Parameter: Age (day) Value: 8
  misc_feature: MA Experiment 108559 PARAMETER Experiment Name: Zm_5mM_NO_P Parameter: Organism Value: Zea mays
  misc_feature: MA Experiment 108559 PARAMETER Experiment Name: Zm_5mM_NO_P Parameter: Plant Line Value: 35A19
  misc_feature: MA Experiment 108559 PARAMETER Experiment Name: Zm_5mM_NO_P Parameter: Timepoint (hr) Value: 12
  misc_feature: MA Experiment 108559 PARAMETER Experiment Name: Zm_5mM_NO_P Parameter: Tissue Value: Aerial
  misc_feature: MA Experiment 108559 PARAMETER Experiment Name: Zm_5mM_NO_P Parameter: Treatment Value: 5mM NO vs. No Treatment
  misc_feature: MA Experiment ID: 20000480 Result: Down-regulated in Transcription
  misc_feature: MA Experiment 20000480 PARAMETER Experiment Name: Zm_Drought_P Parameter: Age (day) Value: 11
  misc_feature: MA Experiment 20000480 PARAMETER Experiment Name: Zm_Drought_P Parameter: Organism Value: Zea mays
  misc_feature: MA Experiment 20000480 PARAMETER Experiment Name: Zm_Drought_P Parameter: Plant Line Value: 35A19
  misc_feature: MA Experiment 20000480 PARAMETER Experiment Name: Zm_Drought_P Parameter: Timepoint (hr) Value: 72
  misc_feature: MA Experiment 20000480 PARAMETER Experiment Name: Zm_Drought_P Parameter: Tissue Value: Aerial
  misc_feature: MA Experiment 20000480 PARAMETER Experiment Name: Zm_Drought_P Parameter: Treatment Value: Drought vs. No Drought
  misc_feature: MA Experiment ID: 20000626 Result: Down-regulated in Transcription
  misc_feature: MA Experiment 20000626 PARAMETER Experiment Name: Zm_Herbicide-Treatments_P Parameter: Timepoint (hr) Value: 12
  misc_feature: MA Experiment 20000626 PARAMETER Experiment Name: Zm_Herbicide-Treatments_P Parameter: Tissue Value: Aerial
  misc_feature: MA Experiment 20000626 PARAMETER Experiment Name: Zm_Herbicide-Treatments_P Parameter: Treatment Value: Roundup vs. No Treatment
aaaagtcccacttagacaatacgagtggagtggtctcatagatagcgctacgagcagtagaaaccgccgccactaggctaggagtggaagcctcgggccccggcagcagccatggcggcgttcctggcgcctccctgcacttccttctatcgctcgtccgcattccttaccccctgttcctcgaatcgccggagtacagcgctaagggcggcggccgttcgtgggtcggcggtgacgcgggcccagcggacggtctccgctaggtgggtcccatccaggttagcggtggcgaggccggcggccaggaaggcgtgcctagaggagcttgatacaaccaacatgctccttcgccagcgcatcgtcttcctgggttccccggtggatgatacaagtgctgatctcattatcagccaactcctactattggatgcagaggaccagactaaagatattaaattgtttatcaactcacctggaggctctataacagcagggatgggagtatatgatgctatgaaattttgcaaagctgatgtgtcaactgtttgctttggattggcggcttcaatgggtgcatttttacttgctgctgggacaaagggtaagaggtactgcatgccaaatgcgaggattatgatccatcagccatcaggtggcgctggcgggaaagtcacagagatgggactacagataagagagatgatgtacgaaaagattaagatcaataaaataatgtcgagaattactggaaaatctgaggagcagattgatgaagacacgaagtttgattatttcatgagtccttcggaagccaaggattatgggatagttgacaatatcatagatgaggggaaaccagggttggtagctcccttggcaggatctgttccgcctcccaaatcgcgtgtgtggtacttgtggaaggcttcggggccgaccaggaagatcatgaaacatctaccttcataggagaaactaattcacaatggtaacggaagtgcaactggagatgatggaaagctcaaggaggcaacggcaacttgaagacattttaggtgataaatagtaggtcgataatagaatggcttagtgcattacctgtattttaaatcattgtttgaatacagattattggaggatgttaatacagtgcagtattttggatgctgcgttttcatggggtgct

SEQ ID NO: 1926 - protein, 285 aa, Zea mays subsp. mays
  peptide (1)..(285): Ceres Seq. ID no. 12405835
  misc_feature (69)..(247): Pfam Name: Clp protease Pfam Description: Clp protease
  misc_feature (73)..(250): Homolog of NCBI NO: 17228733 NR Description: ATP-dependent Clp protease proteolytic subunit
  misc_feature (129)..(285): Homolog of NCBI NO: 21449427 NR Description: ATP-dependent Clp protease [Oryza sativa (indica
  misc_feature (43)..(285): Homolog of NCBI NO: 17028170 NR Description: ClpP [Brassica oleracea]
  misc_feature (43)..(285): Homolog of NCBI NO: 7657879 NR Description: ClpP [Brassica napus var. napus]
  misc_feature (43)..(285): Homolog of NCBI NO: 15864561 NR Description: ClpP putative protein [Brassica napus]
  misc_feature (21)..(285): Homolog of NCBI NO: 13899067 NR Description: ATP-dependent Clp protease; nClpP3 [Arabidopsis
  misc_feature (42)..(285): Homolog of NCBI NO: 6069464 NR Description: S-locus protein 2 [Brassica rapa]
  misc_feature (21)..(285): Homolog of NCBI NO: 25456012 NR Description: probable ATP-dependent clp proteinase (EC
  misc_feature (21)..(285): Homolog of NCBI NO: 18408572 NR Description: ATP-dependent Clp protease proteolytic subunit
  misc_feature (1)..(285): Homolog of NCBI NO: 34914540 NR Description: putative ATP-dependent Clp protease
MAAFLAPPCTSFYRSSAFLTPCSSNRRSTALRAAAVRGSAVTRAQRTVSARWVPSRLAVARPAARKACLEELDTTNMLLRQRIVFLGSPVDDTSADLIISQLLLLDAEDQTKDIKLFINSPGGSITAGMGVYDAMKFCKADVSTVCFGLAASMGAFLLAAGTKGKRYCMPNARIMIHQPSGGAGGKVTEMGLQIREMMYEKIKINKIMSRITGKSEEQIDEDTKFDYFMSPSEAKDYGIVDNIIDEGKPGLVAPLAGSVPPPKSRVWYLWKASGPTRKIMKHLPS

SEQ ID NO: 1927 - protein, 209 aa, Zea mays subsp. mays
  peptide (1)..(209): Ceres Seq. ID no. 12405836
  misc_feature (1)..(171): Pfam Name: Clp protease Pfam Description: Clp protease
  misc_feature (1)..(174): Homolog of NCBI NO: 17228733 NR Description: ATP-dependent Clp protease proteolytic subunit
  misc_feature (53)..(209): Homolog of NCBI NO: 21449427 NR Description: ATP-dependent Clp protease [Oryza sativa (indica
  misc_feature (1)..(209): Homolog of NCBI NO: 17028170 NR Description: ClpP [Brassica oleracea]
  misc_feature (1)..(209): Homolog of NCBI NO: 7657879 NR Description: ClpP [Brassica napus var. napus]
  misc_feature (1)..(209): Homolog of NCBI NO: 15864561 NR Description: ClpP putative protein [Brassica napus]
  misc_feature (1)..(209): Homolog of NCBI NO: 13899067 NR Description: ATP-dependent Clp protease; nClpP3 [Arabidopsis
  misc_feature (1)..(209): Homolog of NCBI NO: 6069464 NR Description: S-locus protein 2 [Brassica rapa]
  misc_feature (1)..(209): Homolog of NCBI NO: 25456012 NR Description: probable ATP-dependent clp proteinase (EC
  misc_feature (1)..(209): Homolog of NCBI NO: 18408572 NR Description: ATP-dependent Clp protease proteolytic subunit
  misc_feature (1)..(209): Homolog of NCBI NO: 34914540 NR Description: putative ATP-dependent Clp protease
MLLRQRIVFLGSPVDDTSADLIISQLLLLDAEDQTKDIKLFINSPGGSITAGMGVYDAMKFCKADVSTVCFGLAASMGAFLLAAGTKGKRYCMPNARIMIHQPSGGAGGKVTEMGLQIREMMYEKIKINKIMSRITGKSEEQIDEDTKFDYFMSPSEAKDYGIVDNIIDEGKPGLVAPLAGSVPPPKSRVWYLWKASGPTRKIMKHLPS

SEQ ID NO: 1928 - protein, 157 aa, Zea mays subsp. mays
  peptide (1)..(157): Ceres Seq. ID no. 12405837
  misc_feature (1)..(119): Pfam Name: Clp protease Pfam Description: Clp protease
  misc_feature (1)..(157): Homolog of NCBI NO: 6069464 NR Description: S-locus protein 2 [Brassica rapa]
  misc_feature (1)..(157): Homolog of NCBI NO: 25456012 NR Description: probable ATP-dependent clp proteinase (EC
  misc_feature (1)..(122): Homolog of NCBI NO: 17228733 NR Description: ATP-dependent Clp protease proteolytic subunit
  misc_feature (1)..(157): Homolog of NCBI NO: 17028170 NR Description: ClpP [Brassica oleracea]
  misc_feature (1)..(157): Homolog of NCBI NO: 15864561 NR Description: ClpP putative protein [Brassica napus]
  misc_feature (1)..(157): Homolog of NCBI NO: 13899067 NR Description: ATP-dependent Clp protease; nClpP3 [Arabidopsis
  misc_feature (1)..(157): Homolog of NCBI NO: 7657879 NR Description: ClpP [Brassica napus var. napus]
  misc_feature (1)..(157): Homolog of NCBI NO: 21449427 NR Description: ATP-dependent Clp protease [Oryza sativa (indica
  misc_feature (1)..(157): Homolog of NCBI NO: 18408572 NR Description: ATP-dependent Clp protease proteolytic subunit
  misc_feature (1)..(157): Homolog of NCBI NO: 34914540 NR Description: putative ATP-dependent Clp protease
MGVYDAMKFCKADVSTVCFGLAASMGAFLLAAGTKGKRYCMPNARIMIHQPSGGAGGKVTEMGLQIREMMYEKIKINKIMSRITGKSEEQIDEDTKFDYFMSPSEAKDYGIVDNIIDEGKPGLVAPLAGSVPPPKSRVWYLWKASGPTRKIMKHLPS

SEQ ID NO: 1929 - DNA, 1823 bp, Zea mays subsp. mays
  misc_feature (1)..(1823): Ceres Seq. ID no. 12405830
  misc_feature: MA Experiment ID: 108556 Result: Down-regulated in Transcription
  misc_feature: MA Experiment 108556 PARAMETER Experiment Name: Zm_Drought_P Parameter: Age (day) Value: 9
  misc_feature: MA Experiment 108556 PARAMETER Experiment Name: Zm_Drought_P Parameter: Organism Value: Zea mays
  misc_feature: MA Experiment 108556 PARAMETER Experiment Name: Zm_Drought_P Parameter: Plant Line Value: 35A19
  misc_feature: MA Experiment 108556 PARAMETER Experiment Name: Zm_Drought_P Parameter: Timepoint (hr) Value: 24
  misc_feature: MA Experiment 108556 PARAMETER Experiment Name: Zm_Drought_P Parameter: Tissue Value: Aerial
  misc_feature: MA Experiment 108556 PARAMETER Experiment Name: Zm_Drought_P Parameter: Treatment Value: Drought vs. No Drought
  misc_feature: MA Experiment ID: 20000480 Result: Down-regulated in Transcription
  misc_feature: MA Experiment 20000480 PARAMETER Experiment Name: Zm_Drought_P Parameter: Age (day) Value: 11
  misc_feature: MA Experiment 20000480 PARAMETER Experiment Name: Zm_Drought_P Parameter: Organism Value: Zea mays
  misc_feature: MA Experiment 20000480 PARAMETER Experiment Name: Zm_Drought_P Parameter: Plant Line Value: 35A19
  misc_feature: MA Experiment 20000480 PARAMETER Experiment Name: Zm_Drought_P Parameter: Timepoint (hr) Value: 72
  misc_feature: MA Experiment 20000480 PARAMETER Experiment Name: Zm_Drought_P Parameter: Tissue Value: Aerial
  misc_feature: MA Experiment 20000480 PARAMETER Experiment Name: Zm_Drought_P Parameter: Treatment Value: Drought vs. No Drought
  misc_feature: MA Experiment ID: 20000535 Result: Down-regulated in Transcription
  misc_feature: MA Experiment 20000535 PARAMETER Experiment Name: Zm_Hybrid_Seed_Dev_P Parameter: DAP Value: 30 vs. 12
  misc_feature: MA Experiment 20000535 PARAMETER Experiment Name: Zm_Hybrid_Seed_Dev_P Parameter: Organism Value: Zea mays
  misc_feature: MA Experiment 20000535 PARAMETER Experiment Name: Zm_Hybrid_Seed_Dev_P Parameter: Plant Line Value: 35A19
  misc_feature: MA Experiment 20000535 PARAMETER Experiment Name: Zm_Hybrid_Seed_Dev_P Parameter: Tissue Value: Embryo vs. Unfert Floret
cccgtccttccctccgcctccgcctccgcccccgcccccgcccacgcccactcctcgctgccaccactcctgtcacctcttcccgcgccgacgcagccgccatggaccccgtcgccacatgggggctaaccccgctcgcgggcgccgacccggagatctacgacctcctggagcgcgagaagcggcgccagcgtcgcggcatcgagctcatcgcctccgagaacttcacctccttcgccgtcatggaggcgctcggctccgcgctcactaacaagtactccgagggcatgcccggcgcccgctactacggcggcaacgacgtcatcgacgagatcgagaacctctgccggtcacgcgcgctcgctgccttccaccttgacgccgcgtcctggggcgtcaacgtgcagccctactcgggctcccccgccaacttcgccgcctacaccgcgctgctcaacccgcacgaccggatcatggggctcgaccttccctccggcggacacctcactcacgggtactacacggccggcggtaagaagatctccgccacctcgatctactttgagagcctgccgtacaaggtgagcgccgcaacggggtacatcgactacgagaagctcgaggagaaggcacttgacttccgccccaagctcatcatctgcggtggcagtgcgtacccgagggactgggattacgccaagctcagggccgtcgccgacaaggtcggggccctgctgctctgcgacatggcgcacatcagcgggctcgtcgccgcgcaggaagctgcaaatccttttgaatattgtgatgtggttaccacaaccacgcacaagtccctcagagggccaagggctggcatgatcttctacaggaaaggccctaagccccccaagaagggccagcctgagggtgctgtttatgattacgaagacaagatcaactttgcagtgttcccatctctccaaggtggccctcacaaccaccagattgctgcacttgctgttgctctacagcaaactatgtcgcctggcttcaaggcctatgcaaagcaagtgaaggccaatgctgttgcaattggaaactatctcatgagcaagggctacaagatggtgactgatggaactgagaaccaccttgttctctgggatctccgcccccttggcttgactggaaacaaggtcgaaaagctatgtgatctttgccacatcacattgaacaagaatgctgtcttcggtgacagcagtgcattgtctccgggtggtgtccgcattggcgcgccagcaatgacctcgaggggtctactggagaaggatttcgagcagattggggagttcctccaccaggcagtgaccatctgcctgaacatccagaaggagtacggcaagctcctcaaggacttcaacaagggcctggtgaacaacaaggacatcgagaacctcaaggtccaggtggagaagtttgccgactccttcgacatgcctgggttcacgcttgagagcatgaaatacaaggagtagatatgcctctttcatgcgcggcaaggtcctcctgtaccgatgtctttccttgtggtggcgcagggtgccatggcactgcattgccgccacacttacgatgatgatgatgggttatggattttgtctacaatgtcagcaggataggctcacaattgccccctgccctccggtttggtcgcctctcaggttttcatttggtagttgttcgcagggaaccatatgagaattgcaatgtcaatcaggtgtttgccaataataattgggtggtttctgctaaaaaaaaaaaaaacaaaaaaaaaaaaaaaa

SEQ ID NO: 1930 - protein, 504 aa, Zea mays subsp. mays
  peptide (1)..(504): Ceres Seq. ID no. 12405831
  misc_feature (45)..(445): Pfam Name: Serine hydroxymethyltransferase Pfam Description: Serine hydroxymethyltransferase
  misc_feature (45)..(494): Homolog of NCBI NO: 18418028 NR Description: glycine hydroxymethyltransferase (EC 2.1.2.1) -
  misc_feature (45)..(503): Homolog of NCBI NO: 17066746 NR Description: serine hydroxymethyltransferase [Chlamydomonas
  misc_feature (37)..(497): Homolog of NCBI NO: 15219182 NR Description: glycine hydroxymethyltransferase, putative
  misc_feature (11)..(493): Homolog of NCBI NO: 21537165 NR Description: putative hydroxymethyltransferase [Arabidopsis
  misc_feature (11)..(493): Homolog of NCBI NO: 25286207 NR Description: probable hydroxymethyltransferase, 49598-47322
  misc_feature (11)..(493): Homolog of NCBI NO: 18400090 NR Description: putative hydroxymethyltransferase
  misc_feature (34)..(501): Homolog of NCBI NO: 15236371 NR Description: glycine hydroxymethyltransferase - like protein
  misc_feature (34)..(504): Homolog of NCBI NO: 11762130 NR Description: AT4g13930 [Arabidopsis thaliana]
  misc_feature (34)..(504): Homolog of NCBI NO: 21592544 NR Description: hydroxymethyltransferase [Arabidopsis thaliana]
  misc_feature (34)..(504): Homolog of NCBI NO: 15236375 NR Description: hydroxymethyltransferase
RPSLRLRLRPRPRPRPLLAATTPVTSSRADAAAMDPVATWGLTPLAGADPEIYDLLEREKRRQRRGIELIASENFTSFAVMEALGSALTNKYSEGMPGARYYGGNDVIDEIENLCRSRALAAFHLDAASWGVNVQPYSGSPANFAAYTALLNPHDRIMGLDLPSGGHLTHGYYTAGGKKISATSIYFESLPYKVSAATGYIDYEKLEEKALDFRPKLIICGGSAYPRDWDYAKLRAVADKVGALLLCDMAHISGLVAAQEAANPFEYCDVVTTTTHKSLRGPRAGMIFYRKGPKPPKKGQPEGAVYDYEDKINFAVFPSLQGGPHNHQIAALAVALQQTMSPGFKAYAKQVKANAVAIGNYLMSKGYKMVTDGTENHLVLWDLRPLGLTGNKVEKLCDLCHITLNKNAVFGDSSALSPGGVRIGAPAMTSRGLLEKDFEQIGEFLHQAVTICLNIQKEYGKLLKDFNKGLVNNKDIENLKVQVEKFADSFDMPGFTLESMKYKE

SEQ ID NO: 1931 - protein, 471 aa, Zea mays subsp. mays
  peptide (1)..(471): Ceres Seq. ID no. 12405832
  misc_feature (12)..(412): Pfam Name: Serine hydroxymethyltransferase Pfam Description: Serine hydroxymethyltransferase
  misc_feature (12)..(461): Homolog of NCBI NO: 18418028 NR Description: glycine hydroxymethyltransferase (EC 2.1.2.1) -
  misc_feature (12)..(470): Homolog of NCBI NO: 17066746 NR Description: serine hydroxymethyltransferase [Chlamydomonas
  misc_feature (4)..(464): Homolog of NCBI NO: 15219182 NR Description: glycine hydroxymethyltransferase, putative
  misc_feature (1)..(460): Homolog of NCBI NO: 21537165 NR Description: putative hydroxymethyltransferase [Arabidopsis
  misc_feature (1)..(460): Homolog of NCBI NO: 25286207 NR Description: probable hydroxymethyltransferase, 49598-47322
  misc_feature (1)..(460): Homolog of NCBI NO: 18400090 NR Description: putative hydroxymethyltransferase
  misc_feature (1)..(468): Homolog of NCBI NO: 15236371 NR Description: glycine hydroxymethyltransferase - like protein
  misc_feature (1)..(471): Homolog of NCBI NO: 11762130 NR Description: AT4g13930 [Arabidopsis thaliana]
  misc_feature (1)..(471): Homolog of NCBI NO: 21592544 NR Description: hydroxymethyltransferase [Arabidopsis thaliana]
  misc_feature (1)..(471): Homolog of NCBI NO: 15236375 NR Description: hydroxymethyltransferase
MDPVATWGLTPLAGADPEIYDLLEREKRRQRRGIELIASENFTSFAVMEALGSALTNKYSEGMPGARYYGGNDVIDEIENLCRSRALAAFHLDAASWGVNVQPYSGSPANFAAYTALLNPHDRIMGLDLPSGGHLTHGYYTAGGKKISATSIYFESLPYKVSAATGYIDYEKLEEKALDFRPKLIICGGSAYPRDWDYAKLRAVADKVGALLLCDMAHISGLVAAQEAANPFEYCDVVTTTTHKSLRGPRAGMIFYRKGPKPPKKGQPEGAVYDYEDKINFAVFPSLQGGPHNHQIAALAVALQQTMSPGFKAYAKQVKANAVAIGNYLMSKGYKMVTDGTENHLVLWDLRPLGLTGNKVEKLCDLCHITLNKNAVFGDSSALSPGGVRIGAPAMTSRGLLEKDFEQIGEFLHQAVTICLNIQKEYGKLLKDFNKGLVNNKDIENLKVQVEKFADSFDMPGFTLESMKYKE

SEQ ID NO: 1932 - protein, 424 aa, Zea mays subsp. mays
  peptide (1)..(424): Ceres Seq. ID no. 12405833
  misc_feature (1)..(365): Pfam Name: Serine hydroxymethyltransferase Pfam Description: Serine hydroxymethyltransferase
  misc_feature (1)..(414): Homolog of NCBI NO: 18418028 NR Description: glycine hydroxymethyltransferase (EC 2.1.2.1) -
  misc_feature (1)..(423): Homolog of NCBI NO: 17066746 NR Description: serine hydroxymethyltransferase [Chlamydomonas
  misc_feature (1)..(417): Homolog of NCBI NO: 15219182 NR Description: glycine hydroxymethyltransferase, putative
  misc_feature (1)..(413): Homolog of NCBI NO: 21537165 NR Description: putative hydroxymethyltransferase [Arabidopsis
  misc_feature (1)..(413): Homolog of NCBI NO: 25286207 NR Description: probable hydroxymethyltransferase, 49598-47322
  misc_feature (1)..(413): Homolog of NCBI NO: 18400090 NR Description: putative hydroxymethyltransferase
  misc_feature (1)..(421): Homolog of NCBI NO: 15236371 NR Description: glycine hydroxymethyltransferase - like protein
  misc_feature (1)..(424): Homolog of NCBI NO: 11762130 NR Description: AT4g13930 [Arabidopsis thaliana]
  misc_feature (1)..(424): Homolog of NCBI NO: 21592544 NR Description: hydroxymethyltransferase [Arabidopsis thaliana]
  misc_feature (1)..(424): Homolog of NCBI NO: 15236375 NR Description: hydroxymethyltransferase
MEALGSALTNKYSEGMPGARYYGGNDVIDEIENLCRSRALAAFHLDAASWGVNVQPYSGSPANFAAYTALLNPHDRIMGLDLPSGGHLTHGYYTAGGKKISATSIYFESLPYKVSAATGYIDYEKLEEKALDFRPKLIICGGSAYPRDWDYAKLRAVADKVGALLLCDMAHISGLVAAQEAANPFEYCDVVTTTTHKSLRGPRAGMIFYRKGPKPPKKGQPEGAVYDYEDKINFAVFPSLQGGPHNHQIAALAVALQQTMSPGFKAYAKQVKANAVAIGNYLMSKGYKMVTDGTENHLVLWDLRPLGLTGNKVEKLCDLCHITLNKNAVFGDSSALSPGGVRIGAPAMTSRGLLEKDFEQIGEFLHQAVTICLNIQKEYGKLLKDFNKGLVNNKDIENLKVQVEKFADSFDMPGFTLESMKYKE

SEQ ID NO: 1933 - DNA, 1492 bp, Zea mays subsp. mays
  misc_feature (1)..(1492): Ceres Seq. ID no. 12349916
  misc_feature: MA Experiment ID: 108530 Result: Down-regulated in Transcription
  misc_feature: MA Experiment 108530 PARAMETER Experiment Name: Zm_Imbibed_Seeds_P Parameter: Age (day) Value: 6 vs. 2
  misc_feature: MA Experiment 108530 PARAMETER Experiment Name: Zm_Imbibed_Seeds_P Parameter: Organism Value: Zea mays
  misc_feature: MA Experiment 108530 PARAMETER Experiment Name: Zm_Imbibed_Seeds_P Parameter: Plant Line Value: 35A19
  misc_feature: MA Experiment 108530 PARAMETER Experiment Name: Zm_Imbibed_Seeds_P Parameter: Tissue Value: Aerial vs. Embryo
  misc_feature: MA Experiment ID: 108535 Result: Up-regulated in Transcription
  misc_feature: MA Experiment 108535 PARAMETER Experiment Name: Zm_Meristem_P Parameter: Age (day) Value: 8
  misc_feature: MA Experiment 108535 PARAMETER Experiment Name: Zm_Meristem_P Parameter: Organism Value: Zea mays
  misc_feature: MA Experiment 108535 PARAMETER Experiment Name: Zm_Meristem_P Parameter: Plant Line Value: 35A19
  misc_feature: MA Experiment 108535 PARAMETER Experiment Name: Zm_Meristem_P Parameter: Tissue Value: Root Meristem vs. Above Root Meristem
  misc_feature: MA Experiment ID: 20000108 Result: Up-regulated in Transcription
  misc_feature: MA Experiment 20000108 PARAMETER Experiment Name: Zm_Root-Tips_P Parameter: Age (day) Value: 12
  misc_feature: MA Experiment 20000108 PARAMETER Experiment Name: Zm_Root-Tips_P Parameter: Organism Value: Zea mays
  misc_feature: MA Experiment 20000108 PARAMETER Experiment Name: Zm_Root-Tips_P Parameter: Tissue Value: Root tips vs. Root mid region    35
  misc_feature: MA Experiment 20000108 PARAMETER Experiment Name: Zm_Root-Tips_P Parameter: Tissue Value: Root tips vs. Root mid region   Sequence Listing-Misc Features (4)
ctccccgatttccttccccactctgtcagtctagtgccccgcgcgcgctctctcgccgcctcgccgccggcgacgagcttgagctcgagctcgagctggtttctcgtatcgaagacgcggccgcggtatggatcccatgaacgtagacaacggcggctgcggcggccttgacgcgcagatcgagcagctgatgcagtgccgcccgctcgccgagcaggaggttaaggccctgtgcgagaaggccaaggagatattgatggaggaaagcaacgttcagcctgtcaagagtccagttacaatatgtggtgatatacatggacaattccatgatcttgtagagcttttccgaattggtgggaagtgtccagacaccaattacttatttatgggggattatgtagatcgtggctactattctgttgagactgtcactctgctagtagccactaaaagtgaggtacccacatcgaattacaatccttcgtggaaaccatgagagtcggcagatcacacaggtgtatggattctatgacgaatgtctacgcaagtatggcaatgcaaatctatggaagacatttacggatctttttgattattttcctctgacagctctggtggaatctgagattttctgccttcatggtggcttatccccatcaattgaaaatcttgatagtgtgcgcagcttagatcgagtccaagaggttcctcatgagggacctatgtgcgatcttttatggtcagatccggacgatcgatgtggttggggcatatccccacctggtgctggctacacttttggccaggacatatcggagcagtttaatcacacaaacaatctcaaacttgtagctcgggctcatcaattagttatggagggatataactgggctcatgaacagaaggttgtcaccatattcagtgctccaaactattgctaccgatgcggcaatatggcatccattttggaagttgacgactgcaatagtcacacattcatacagtttgacccagcccctaggagaggcgagccagatgtgacacgaagaacaccggactatttcctttgagttgtggtgttaccaattcccagcttgtgctgtgataatcgatgtcaacgtctgctggatcaagggccagacagaaataacaggggaataccaaagcactatgcgaaacttgaggtcctcattgccattggtcagtgcaagagatgtctgcaatcctgagagaaagcaattgtgccaagccatgcccgagtttcagccttttcaggtgatatagaggagcggacatccatttgttacagctctcgccgccctcccttttatgcactttttacagaggcttggaattggcaaaaaagaccgaactttcaattgtacttctgtagcgtaagcttgtaccaataggcgtgtactaatttgtatcatcattcatccatggcaagacattgttaaactccttttcatcagtaaattaattttttgtt

SEQ ID NO: 1934 - protein, 122 aa, Zea mays subsp. mays
  peptide (1)..(122): Ceres Seq. ID no. 12349917
  misc_feature (54)..(112): Pfam Name: Calcineurin-like phosphoesterase Pfam Description: Calcineurin-like phosphoesterase
  misc_feature (14)..(112): Homolog of NCBI NO: 7248363 NR Description: type 2A protein phosphatase-3 [Vicia faba]
  misc_feature (14)..(112): Homolog of NCBI NO: 548441 NR Description: SERINE/THREONINE PROTEIN PHOSPHATASE PP2A
  misc_feature (1)..(112): Homolog of NCBI NO: 11133821 NR Description: Serine/threonine protein phosphatase PP2A
  misc_feature (14)..(112): Homolog of NCBI NO: 18405985 NR Description: protein phosphatase 2A (PP2A)
  misc_feature (14)..(112): Homolog of NCBI NO: 18410971 NR Description: protein phosphatase PP2A catalytic subunit
  misc_feature (14)..(112): Homolog of NCBI NO: 418777 NR Description: phosphoprotein phosphatase (EC 3.1.3.16) 2A-alpha
  misc_feature (12)..(112): Homolog of NCBI NO: 11134218 NR Description: Serine/threonine protein phosphatase PP2A-2
  misc_feature (8)..(112): Homolog of NCBI NO: 11134154 NR Description: Serine/threonine protein phosphatase PP2A-4
  misc_feature (1)..(57): Homolog of NCBI NO: 19071628 NR Description: serine/threonine protein phosphatase PP2A-4
  misc_feature (51)..(112): Homolog of NCBI NO: 19071628 NR Description: serine/threonine protein phosphatase PP2A-4
MDPMNVDNGGCGGLDAQIEQLMQCRPLAEQEVKALCEKAKEILMEESNVQPVKSPVTICGDIHGQFHDLVELFRIGGKCPDTNYLFMGDYVDRGYYSVETVTLLVATKSEVPTSNYNPSWKP

SEQ ID NO: 1935 - protein, 119 aa, Zea mays subsp. mays
  peptide (1)..(119): Ceres Seq. ID no. 12349918
  misc_feature (51)..(109): Pfam Name: Calcineurin-like phosphoesterase Pfam Description: Calcineurin-like phosphoesterase
  misc_feature (11)..(109): Homolog of NCBI NO: 7248363 NR Description: type 2A protein phosphatase-3 [Vicia faba]
  misc_feature (11)..(109): Homolog of NCBI NO: 548441 NR Description: SERINE/THREONINE PROTEIN PHOSPHATASE PP2A
  misc_feature (1)..(109): Homolog of NCBI NO: 11133821 NR Description: Serine/threonine protein phosphatase PP2A
  misc_feature (11)..(109): Homolog of NCBI NO: 18410971 NR Description: protein phosphatase PP2A catalytic subunit
  misc_feature (11)..(109): Homolog of NCBI NO: 18405985 NR Description: protein phosphatase 2A (PP2A)
  misc_feature (11)..(109): Homolog of NCBI NO: 418777 NR Description: phosphoprotein phosphatase (EC 3.1.3.16) 2A-alpha
  misc_feature (9)..(109): Homolog of NCBI NO: 11134218 NR Description: Serine/threonine protein phosphatase PP2A-2
  misc_feature (5)..(109): Homolog of NCBI NO: 11134154 NR Description: Serine/threonine protein phosphatase PP2A-4
  misc_feature (1)..(54): Homolog of NCBI NO: 19071628 NR Description: serine/threonine protein phosphatase PP2A-4
  misc_feature (48)..(109): Homolog of NCBI NO: 19071628 NR Description: serine/threonine protein phosphatase PP2A-4
MNVDNGGCGGLDAQIEQLMQCRPLAEQEVKALCEKAKEILMEESNVQPVKSPVTICGDIHGQFHDLVELFRIGGKCPDTNYLFMGDYVDRGYYSVETVTLLVATKSEVPTSNYNPSWKP

SEQ ID NO: 1936 - protein, 115 aa, Zea mays subsp. mays
  peptide (1)..(115): Ceres Seq. ID no. 12349919
  misc_feature (1)..(51): Pfam Name: Calcineurin-like phosphoesterase Pfam Description: Calcineurin-like phosphoesterase
  misc_feature (1)..(115): Homolog of NCBI NO: 11133837 NR Description: Serine/threonine protein phosphatase PP2A-5
  misc_feature (1)..(115): Homolog of NCBI NO: 7248363 NR Description: type 2A protein phosphatase-3 [Vicia faba]
  misc_feature (1)..(115): Homolog of NCBI NO: 548441 NR Description: SERINE/THREONINE PROTEIN PHOSPHATASE PP2A
  misc_feature (1)..(115): Homolog of NCBI NO: 11133821 NR Description: Serine/threonine protein phosphatase PP2A
  misc_feature (1)..(115): Homolog of NCBI NO: 18410971 NR Description: protein phosphatase PP2A catalytic subunit
  misc_feature (1)..(115): Homolog of NCBI NO: 18405985 NR Description: protein phosphatase 2A (PP2A)
  misc_feature (1)..(115): Homolog of NCBI NO: 418777 NR Description: phosphoprotein phosphatase (EC 3.1.3.16) 2A-alpha
  misc_feature (1)..(115): Homolog of NCBI NO: 11134218 NR Description: Serine/threonine protein phosphatase PP2A-2
  misc_feature (1)..(115): Homolog of NCBI NO: 11134154 NR Description: Serine/threonine protein phosphatase PP2A-4
  misc_feature (1)..(115): Homolog of NCBI NO: 19071628 NR Description: serine/threonine protein phosphatase PP2A-4
MCDLLWSDPDDRCGWGISPPGAGYTFGQDISEQFNHTNNLKLVARAHQLVMEGYNWAHEQKVVTIFSAPNYCYRCGNMASILEVDDCNSHTFIQFDPAPRRGEPDVTRRTPDYFL

SEQ ID NO: 1937 - DNA, 1240 bp, Zea mays subsp. mays
  misc_feature (1)..(1240): Ceres Seq. ID no. 12355975
  misc_feature: MA Experiment ID: 108528 Result: Up-regulated in Transcription
  misc_feature: MA Experiment 108528 PARAMETER Experiment Name: Zm_Imbibed_Seeds_P Parameter: Age (day) Value: 5 vs. 2
  misc_feature: MA Experiment 108528 PARAMETER Experiment Name: Zm_Imbibed_Seeds_P Parameter: Organism Value: Zea mays
  misc_feature: MA Experiment 108528 PARAMETER Experiment Name: Zm_Imbibed_Seeds_P Parameter: Plant Line Value: 35A19
  misc_feature: MA Experiment 108528 PARAMETER Experiment Name: Zm_Imbibed_Seeds_P Parameter: Tissue Value: Aerial vs. Embryo
  misc_feature: MA Experiment ID: 108529 Result: Down-regulated in Transcription
  misc_feature: MA Experiment 108529 PARAMETER Experiment Name: Zm_Imbibed_Seeds_P Parameter: Age (day) Value: 5 vs. 2
  misc_feature: MA Experiment 108529 PARAMETER Experiment Name: Zm_Imbibed_Seeds_P Parameter: Organism Value: Zea mays
  misc_feature: MA Experiment 108529 PARAMETER Experiment Name: Zm_Imbibed_Seeds_P Parameter: Plant Line Value: 35A19
  misc_feature: MA Experiment 108529 PARAMETER Experiment Name: Zm_Imbibed_Seeds_P Parameter: Tissue Value: Roots vs. Embryo
  misc_feature: MA Experiment ID: 108530 Result: Up-regulated in Transcription
  misc_feature: MA Experiment 108530 PARAMETER Experiment Name: Zm_Imbibed_Seeds_P Parameter: Age (day) Value: 6 vs. 2
  misc_feature: MA Experiment 108530 PARAMETER Experiment Name: Zm_Imbibed_Seeds_P Parameter: Organism Value: Zea mays
  misc_feature: MA Experiment 108530 PARAMETER Experiment Name: Zm_Imbibed_Seeds_P Parameter: Plant Line Value: 35A19
  misc_feature: MA Experiment 108530 PARAMETER Experiment Name: Zm_Imbibed_Seeds_P Parameter: Tissue Value: Aerial vs. Embryo
  misc_feature: MA Experiment ID: 108535 Result: Up-regulated in Transcription
  misc_feature: MA Experiment 108535 PARAMETER Experiment Name: Zm_Meristem_P Parameter: Age (day) Value: 8
  misc_feature: MA Experiment 108535 PARAMETER Experiment Name: Zm_Meristem_P Parameter: Organism Value: Zea mays
  misc_feature: MA Experiment 108535 PARAMETER Experiment Name: Zm_Meristem_P Parameter: Plant Line Value: 35A19
  misc_feature: MA Experiment 108535 PARAMETER Experiment Name: Zm_Meristem_P Parameter: Tissue Value: Root Meristem vs. Above Root Meristem
  misc_feature: MA Experiment ID: 108536 Result: Down-regulated in Transcription
  misc_feature: MA Experiment 108536 PARAMETER Experiment Name: Zm_Meristem_P Parameter: Age (day) Value: 8
  misc_feature: MA Experiment 108536 PARAMETER Experiment Name: Zm_Meristem_P Parameter: Organism Value: Zea mays
  misc_feature: MA Experiment 108536 PARAMETER Experiment Name: Zm_Meristem_P Parameter: Plant Line Value: 35A19
  misc_feature: MA Experiment 108536 PARAMETER Experiment Name: Zm_Meristem_P Parameter: Tissue Value: Shoot Meristem vs. Above Shoot Meristem
  misc_feature: MA Experiment ID: 108545 Result: Up-regulated in Transcription
  misc_feature: MA Experiment 108545 PARAMETER Experiment Name: Zm_Imbibed_Seeds_P Parameter: Age (day) Value: 3 vs. 2
  misc_feature: MA Experiment 108545 PARAMETER Experiment Name: Zm_Imbibed_Seeds_P Parameter: Organism Value: Zea mays
  misc_feature: MA Experiment 108545 PARAMETER Experiment Name: Zm_Imbibed_Seeds_P Parameter: Plant Line Value: 35A19
  misc_feature: MA Experiment 108545 PARAMETER Experiment Name: Zm_Imbibed_Seeds_P Parameter: Tissue Value: Aerial vs. Embryo
  misc_feature: MA Experiment ID: 108546 Result: Down-regulated in Transcription
  misc_feature: MA Experiment 108546 PARAMETER Experiment Name: Zm_Imbibed_Seeds_P Parameter: Age (day) Value: 3 vs. 2
  misc_feature: MA Experiment 108546 PARAMETER Experiment Name: Zm_Imbibed_Seeds_P Parameter: Organism Value: Zea mays
  misc_feature: MA Experiment 108546 PARAMETER Experiment Name: Zm_Imbibed_Seeds_P Parameter: Plant Line Value: 35A19
  misc_feature: MA Experiment 108546 PARAMETER Experiment Name: Zm_Imbibed_Seeds_P Parameter: Tissue Value: Roots vs. Embryo
  misc_feature: MA Experiment ID: 108547 Result: Up-regulated in Transcription
  misc_feature: MA Experiment 108547 PARAMETER Experiment Name: Zm_Imbibed_Seeds_P Parameter: Age (day) Value: 4 vs. 2
  misc_feature: MA Experiment 108547 PARAMETER Experiment Name: Zm_Imbibed_Seeds_P Parameter: Organism Value: Zea mays
  misc_feature: MA Experiment 108547 PARAMETER Experiment Name: Zm_Imbibed_Seeds_P Parameter: Plant Line Value: 35A19
  misc_feature: MA Experiment 108547 PARAMETER Experiment Name: Zm_Imbibed_Seeds_P Parameter: Tissue Value: Aerial vs. Embryo
  misc_feature: MA Experiment ID: 20000108 Result: Up-regulated in Transcription
  misc_feature: MA Experiment 20000108 PARAMETER Experiment Name: Zm_Root-Tips_P Parameter: Age (day) Value: 12
  misc_feature: MA Experiment 20000108 PARAMETER Experiment Name: Zm_Root-Tips_P Parameter: Organism Value: Zea mays
  misc_feature: MA Experiment 20000108 PARAMETER Experiment Name: Zm_Root-Tips_P Parameter: Tissue Value: Root tips vs. Root mid region    35
  misc_feature: MA Experiment 20000108 PARAMETER Experiment Name: Zm_Root-Tips_P Parameter: Tissue Value: Root tips vs. Root mid region   Sequence Listing-Misc Features (4)
gctagctatcccctcatcgtcttctcttatcctcactcgcgtagtcgcctccctcctcttctcttccgcggcctggtgcaagaccaagagggaggaggaggccacgatggccggcagcgtcagcaacggcagcgggaagagcctggcgcgctggctgcgggagaacgggttcgacgacgacgccgtggcgcgcatgtccaggcggtgcaggaacctgcacagcctcgacgccggcgaggccccgggcgtgtgggactacctcctgaccggcgtcaagatggagcggcggaagctgcggcacgtggtggccaagtgccccaagctgctcaccctgtccgtggacggcaagctcgcgcccacggtgcagtgcctcgccacgctgcaggccaggcccggggaggtggcgcaggccatcgccaagttcccccagatactgttccacagcgtcgaggagaagctctgcccgctcctcgccttcttccagacgctcggcgtctccgagaggcagctcgccaagctgctcatggtcaacccgcgcctcatcagctacagcatcgaggccaagttctcgcagaccgtcggcttcctcgccggcctcggcgtcgacagggaaggcatgatcggcaagatcctcaccaaggagccgtatatcatggggtacagcgtcgacaagcggttgcgccccactgccgagttcctcaagtcggaagtcgggttacaggggccagatctccagagggtggtcatgaccttccccgatatactgtcgcgagacgtggataagatcctgcggcccaatctggcgttcctacagagccgcggattcagcagggatcaggtcacggcactggtagctggttaccctcctgttctcatcaagagcatcaaacattgcctggagccaaggatcaagttcctggtcgaagagatggggcgggacatgggcgaggtggtaggttacccccagttctttcgccatggcctcaagaggagcctggagtaccgccacaaggtgcttaagcagatgaactcgagctgcagcctcagcgagatgctagactgtaaccacaagaagtttgccatgaaattcggtttggtcgcagcagtttaggtactcaacttttctctagtccaatccaaggtagtttgttttattctcaggtgaatctttccgtttgtaccgtcaggttgtgttgttcttttgaacatttgggcaatgataactaataattcaaggtcc

SEQ ID NO: 1938 - protein, 369 aa, Zea mays subsp. mays
  peptide (1)..(369): Ceres Seq. ID no. 12355976
  misc_feature (51)..(359): Pfam Name: mTERF Pfam Description: mTERF
  misc_feature (51)..(362): Homolog of NCBI NO: 34394417 NR Description: hypothetical protein [Oryza sativa (japonica
  misc_feature (58)..(324): Homolog of NCBI NO: 7485117 NR Description: hypothetical protein - Arabidopsis thaliana
  misc_feature (58)..(324): Homolog of NCBI NO: 18414260 NR Description: hypothetical protein; protein id: At4g14605.1
  misc_feature (133)..(365): Homolog of NCBI NO: 7487916 NR Description: hypothetical protein YUP8H12R.46 - Arabidopsis
  misc_feature (72)..(362): Homolog of NCBI NO: 15236230 NR Description: hypothetical protein; protein id: At4g02990.1
  misc_feature (88)..(359): Homolog of NCBI NO: 18406426 NR Description: expressed protein
  misc_feature (133)..(365): Homolog of NCBI NO: 30699372 NR Description: expressed protein [Arabidopsis thaliana]
  misc_feature (133)..(365): Homolog of NCBI NO: 33589698 NR Description: At1g78930 [Arabidopsis thaliana]
  misc_feature (40)..(364): Homolog of NCBI NO: 15233700 NR Description: putative protein
  misc_feature (36)..(369): Homolog of NCBI NO: 34905080 NR Description: P0686C03.23 [Oryza sativa (japonica
LAIPSSSSLILTRVVASLLFSSAAWCKTKREEEATMAGSVSNGSGKSLARWLRENGFDDDAVARMSRRCRNLHSLDAGEAPGVWDYLLTGVKMERRKLRHVVAKCPKLLTLSVDGKLAPTVQCLATLQARPGEVAQAIAKFPQILFHSVEEKLCPLLAFFQTLGVSERQLAKLLMVNPRLISYSIEAKFSQTVGFLAGLGVDREGMIGKILTKEPYIMGYSVDKRLRPTAEFLKSEVGLQGPDLQRVVMTFPDILSRDVDKILRPNLAFLQSRGFSRDQVTALVAGYPPVLIKSIKHCLEPRIKFLVEEMGRDMGEVVGYPQFFRHGLKRSLEYRHKVLKQMNSSCSLSEMLDCNHKKFAMKFGLVAAV

SEQ ID NO: 1939 - protein, 334 aa, Zea mays subsp. mays
  peptide (1)..(334): Ceres Seq. ID no. 12355977
  misc_feature (16)..(324): Pfam Name: mTERF Pfam Description: mTERF
  misc_feature (16)..(327): Homolog of NCBI NO: 34394417 NR Description: hypothetical protein [Oryza sativa (japonica
  misc_feature (23)..(289): Homolog of NCBI NO: 7485117 NR Description: hypothetical protein - Arabidopsis thaliana
  misc_feature (23)..(289): Homolog of NCBI NO: 18414260 NR Description: hypothetical protein; protein id: At4g14605.1
  misc_feature (98)..(330): Homolog of NCBI NO: 7487916 NR Description: hypothetical protein YUP8H12R.46 - Arabidopsis
  misc_feature (37)..(327): Homolog of NCBI NO: 15236230 NR Description: hypothetical protein; protein id: At4g02990.1
  misc_feature (53)..(324): Homolog of NCBI NO: 18406426 NR Description: expressed protein
  misc_feature (98)..(330): Homolog of NCBI NO: 30699372 NR Description: expressed protein [Arabidopsis thaliana]
  misc_feature (98)..(330): Homolog of NCBI NO: 33589698 NR Description: At1g78930 [Arabidopsis thaliana]
  misc_feature (5)..(329): Homolog of NCBI NO: 15233700 NR Description: putative protein
  misc_feature (1)..(334): Homolog of NCBI NO: 34905080 NR Description: P0686C03.23 [Oryza sativa (japonica
MAGSVSNGSGKSLARWLRENGFDDDAVARMSRRCRNLHSLDAGEAPGVWDYLLTGVKMERRKLRHVVAKCPKLLTLSVDGKLAPTVQCLATLQARPGEVAQAIAKFPQILFHSVEEKLCPLLAFFQTLGVSERQLAKLLMVNPRLISYSIEAKFSQTVGFLAGLGVDREGMIGKILTKEPYIMGYSVDKRLRPTAEFLKSEVGLQGPDLQRVVMTFPDILSRDVDKILRPNLAFLQSRGFSRDQVTALVAGYPPVLIKSIKHCLEPRIKFLVEEMGRDMGEVVGYPQFFRHGLKRSLEYRHKVLKQMNSSCSLSEMLDCNHKKFAMKFGLVAAV

SEQ ID NO: 1940 - protein, 305 aa, Zea mays subsp. mays
  peptide (1)..(305): Ceres Seq. ID no. 12355978
  misc_feature (1)..(295): Pfam Name: mTERF Pfam Description: mTERF
  misc_feature (1)..(298): Homolog of NCBI NO: 34394417 NR Description: hypothetical protein [Oryza sativa (japonica
  misc_feature (1)..(260): Homolog of NCBI NO: 7485117 NR Description: hypothetical protein - Arabidopsis thaliana
  misc_feature (1)..(260): Homolog of NCBI NO: 18414260 NR Description: hypothetical protein; protein id: At4g14605.1
  misc_feature (69)..(301): Homolog of NCBI NO: 7487916 NR Description: hypothetical protein YUP8H12R.46 - Arabidopsis
  misc_feature (8)..(298): Homolog of NCBI NO: 15236230 NR Description: hypothetical protein; protein id: At4g02990.1
  misc_feature (24)..(295): Homolog of NCBI NO: 18406426 NR Description: expressed protein
  misc_feature (69)..(301): Homolog of NCBI NO: 30699372 NR Description: expressed protein [Arabidopsis thaliana]
  misc_feature (69)..(301): Homolog of NCBI NO: 33589698 NR Description: At1g78930 [Arabidopsis thaliana]
  misc_feature (1)..(300): Homolog of NCBI NO: 15233700 NR Description: putative protein
  misc_feature (1)..(305): Homolog of NCBI NO: 34905080 NR Description: P0686C03.23 [Oryza sativa (japonica
MSRRCRNLHSLDAGEAPGVWDYLLTGVKMERRKLRHVVAKCPKLLTLSVDGKLAPTVQCLATLQARPGEVAQAIAKFPQILFHSVEEKLCPLLAFFQTLGVSERQLAKLLMVNPRLISYSIEAKFSQTVGFLAGLGVDREGMIGKILTKEPYIMGYSVDKRLRPTAEFLKSEVGLQGPDLQRVVMTFPDILSRDVDKILRPNLAFLQSRGFSRDQVTALVAGYPPVLIKSIKHCLEPRIKFLVEEMGRDMGEVVGYPQFFRHGLKRSLEYRHKVLKQMNSSCSLSEMLDCNHKKFAMKFGLVAAV

SEQ ID NO: 1941 - DNA, 1411 bp, Zea mays subsp. mays
  misc_feature (1)..(1411): Ceres Seq. ID no. 12357466
  misc_feature: MA Experiment ID: 108527 Result: Up-regulated in Transcription
  misc_feature: MA Experiment 108527 PARAMETER Experiment Name: Zm_5mM_NO_P Parameter: Age (day) Value: 8
  misc_feature: MA Experiment 108527 PARAMETER Experiment Name: Zm_5mM_NO_P Parameter: Organism Value: Zea mays
  misc_feature: MA Experiment 108527 PARAMETER Experiment Name: Zm_5mM_NO_P Parameter: Plant Line Value: 35A19
  misc_feature: MA Experiment 108527 PARAMETER Experiment Name: Zm_5mM_NO_P Parameter: Timepoint (hr) Value: 6
  misc_feature: MA Experiment 108527 PARAMETER Experiment Name: Zm_5mM_NO_P Parameter: Tissue Value: Aerial
  misc_feature: MA Experiment 108527 PARAMETER Experiment Name: Zm_5mM_NO_P Parameter: Treatment Value: 5mM NO vs. No Treatment
  misc_feature: MA Experiment ID: 108535 Result: Up-regulated in Transcription
  misc_feature: MA Experiment 108535 PARAMETER Experiment Name: Zm_Meristem_P Parameter: Age (day) Value: 8
  misc_feature: MA Experiment 108535 PARAMETER Experiment Name: Zm_Meristem_P Parameter: Organism Value: Zea mays
  misc_feature: MA Experiment 108535 PARAMETER Experiment Name: Zm_Meristem_P Parameter: Plant Line Value: 35A19
  misc_feature: MA Experiment 108535 PARAMETER Experiment Name: Zm_Meristem_P Parameter: Tissue Value: Root Meristem vs. Above Root Meristem
  misc_feature: MA Experiment ID: 108543 Result: Up-regulated in Transcription
  misc_feature: MA Experiment ID: 108597 Result: Down-regulated in Transcription
  misc_feature: MA Experiment 108597 PARAMETER Experiment Name: Zm_100uM_ABA_P Parameter: Age (day) Value: 9
  misc_feature: MA Experiment 108597 PARAMETER Experiment Name: Zm_100uM_ABA_P Parameter: Organism Value: Zea mays
  misc_feature: MA Experiment 108597 PARAMETER Experiment Name: Zm_100uM_ABA_P Parameter: Plant Line Value: 35A19
  misc_feature: MA Experiment 108597 PARAMETER Experiment Name: Zm_100uM_ABA_P Parameter: Timepoint (hr) Value: 24
  misc_feature: MA Experiment 108597 PARAMETER Experiment Name: Zm_100uM_ABA_P Parameter: Tissue Value: Aerial
  misc_feature: MA Experiment 108597 PARAMETER Experiment Name: Zm_100uM_ABA_P Parameter: Treatment Value: 100uM ABA vs. No Treatment
  misc_feature: MA Experiment ID: 108689 Result: Down-regulated in Transcription
  misc_feature: MA Experiment 108689 PARAMETER Experiment Name: Zm_Drought_Roots_P Parameter: Age (day) Value: 9
  misc_feature: MA Experiment 108689 PARAMETER Experiment Name: Zm_Drought_Roots_P Parameter: Organism Value: Zea mays
  misc_feature: MA Experiment 108689 PARAMETER Experiment Name: Zm_Drought_Roots_P Parameter: Plant Line Value: 35A19
  misc_feature: MA Experiment 108689 PARAMETER Experiment Name: Zm_Drought_Roots_P Parameter: Timepoint (hr) Value: 24
  misc_feature: MA Experiment 108689 PARAMETER Experiment Name: Zm_Drought_Roots_P Parameter: Tissue Value: Roots
  misc_feature: MA Experiment 108689 PARAMETER Experiment Name: Zm_Drought_Roots_P Parameter: Treatment Value: Drought vs. No Drought
  misc_feature: MA Experiment ID: 20000632 Result: Down-regulated in Transcription
  misc_feature: MA Experiment 20000632 PARAMETER Experiment Name: Zm_Herbicide-Treatments_P Parameter: Timepoint (hr) Value: 4
  misc_feature: MA Experiment 20000632 PARAMETER Experiment Name: Zm_Herbicide-Treatments_P Parameter: Tissue Value: Aerial
  misc_feature: MA Experiment 20000632 PARAMETER Experiment Name: Zm_Herbicide-Treatments_P Parameter: Treatment Value: Glean vs. No Treatment
agagagagagacaagagagagagagagagagagctaacgatggcgtccagagacgcggccagcagccccaaatcagcgccgcgtcgccatgggccggcggcgcccaagaatggcgccgacctgctcagcccacggttccggtcggctgccgcgctggccggctgggacgaggagtccgtcctccttgccgcgatggtcgtcgacgacaccccagtccgcgactcccgtcgcaagaggcgggcctccacctcctccgtcggcggcagcgccggatccagcaccaggaagaggaggccgcgcaggctgtctccggccaagatcccgccggtggttttcgcgctcgacgacgaaaagtcggacactgcggcagatagcaaatcggaagtgaaggccgccaaggaggaagagaagcctgtccttgtgggcgacaaggaggcgtccggttctggcgagaaagcagtggccgcggcaaacatgccgtgcatggatcggctccgggaggagctctcttgcgcgatttgcctggacatctgctttgagccgaccactacgccttgtggacacagcttctgcatgagatgcttaagacacgctgcagccaagtgcgggaaacggtgtcccaaatgcaggcagttcatcagcagctcgaaatcgtgcaccatcaacactgtgctctggaacaccattcagctcttatttcccagtgaggttgaggcaagaaagggttcgagctcatcaccttcaccatgcgacaaggacgatgtgagagctaataggttctcacaaggtggccccggtatgagaactaggagcaggagcagcggcagcggcttcatcagcagcgagggtaggacaagaagcagcttcatcgaacccggcgccagtgcgaacttcatcgtcagcacatatggcagcgcaagaagcagtaacagcaggaggggcttcgtccctgcctcgcagctgctgttgacaagattagagcaatctgaagatgccgcggcgttggcgtacaggttgcaacaggaggagttcgtgaatgcctttgaggagcctgagcaggagaggcagccacgcgacgccgtgtccacagcacgagacaccctgagagccatggcctcccgggccatccgcctccgtgctagaggctggcctgtttagtactactattgctctgctctgcatggaagttgagacctctgaacatataggcatcggtggggttgatagctctcgacattcactagggactctagaagatgtctgccccacgattgttcacgggaaggcccagcgacagctatgggctcccaactagaggagaagacgcgtaggctcaaagctgctgtcgccggtgagttgtaaaaatgctaaaaatctcattctctaagttttcagatgaagtgcacctagt

SEQ ID NO: 1942 - protein, 385 aa, Zea mays subsp. mays
  peptide (1)..(385): Ceres Seq. ID no. 12357467
  misc_feature (171)..(209): Pfam Name: Zinc finger, C3HC4 type (RING finger) Pfam Description: Zinc finger, C3HC4 type (RING finger)
  misc_feature (162)..(240): Homolog of NCBI NO: 13905224 NR Description: Unknown (protein for MGC:6886) [Mus musculus]
  misc_feature (115)..(231): Homolog of NCBI NO: 23487732 NR Description: zinc finger protein-related [Plasmodium yoelii
  misc_feature (89)..(234): Homolog of NCBI NO: 10438137 NR Description: unnamed protein product [Homo sapiens]
  misc_feature (162)..(240): Homolog of NCBI NO: 21706565 NR Description: Similar to tripartite motif protein 25 [Mus
  misc_feature (167)..(246): Homolog of NCBI NO: 18394639 NR Description: expressed protein
  misc_feature (168)..(299): Homolog of NCBI NO: 26343717 NR Description: unnamed protein product [Mus musculus]
  misc_feature (168)..(356): Homolog of NCBI NO: 26379538 NR Description: unnamed protein product [Mus musculus]
  misc_feature (167)..(246): Homolog of NCBI NO: 21554128 NR Description: unknown [Arabidopsis thaliana]
  misc_feature (2)..(288): Homolog of NCBI NO: 15232143 NR Description: hypothetical protein; protein id: At3g27330.1
  misc_feature (33)..(288): Homolog of NCBI NO: 11994635 NR Description: gene_id:K1G2.4~ref|NP_008959.1~similar to unknown
RERDKRERERELTMASRDAASSPKSAPRRHGPAAPKNGADLLSPRFRSAAALAGWDEESVLLAAMVVDDTPVRDSRRKRRASTSSVGGSAGSSTRKRRPRRLSPAKIPPVVFALDDEKSDTAADSKSEVKAAKEEEKPVLVGDKEASGSGEKAVAAANMPCMDRLREELSCAICLDICFEPTTTPCGHSFCMRCLRHAAAKCGKRCPKCRQFISSSKSCTINTVLWNTIQLLFPSEVEARKGSSSSPSPCDKDDVRANRFSQGGPGMRTRSRSSGSGFISSEGRTRSSFIEPGASANFIVSTYGSARSSNSRRGFVPASQLLLTRLEQSEDAAALAYRLQQEEFVNAFEEPEQERQPRDAVSTARDTLRAMASRAIRLRARGWPV

SEQ ID NO: 1943 - protein, 372 aa, Zea mays subsp. mays
  peptide (1)..(372): Ceres Seq. ID no. 12357468
  misc_feature (158)..(196): Pfam Name: Zinc finger, C3HC4 type (RING finger) Pfam Description: Zinc finger, C3HC4 type (RING finger)
  misc_feature (149)..(227): Homolog of NCBI NO: 13905224 NR Description: Unknown (protein for MGC:6886) [Mus musculus]
  misc_feature (102)..(218): Homolog of NCBI NO: 23487732 NR Description: zinc finger protein-related [Plasmodium yoelii
  misc_feature (76)..(221): Homolog of NCBI NO: 10438137 NR Description: unnamed protein product [Homo sapiens]
  misc_feature (149)..(227): Homolog of NCBI NO: 21706565 NR Description: Similar to tripartite motif protein 25 [Mus
  misc_feature (154)..(233): Homolog of NCBI NO: 18394639 NR Description: expressed protein
  misc_feature (155)..(286): Homolog of NCBI NO: 26343717 NR Description: unnamed protein product [Mus musculus]
  misc_feature (155)..(343): Homolog of NCBI NO: 26379538 NR Description: unnamed protein product [Mus musculus]
  misc_feature (154)..(233): Homolog of NCBI NO: 21554128 NR Description: unknown [Arabidopsis thaliana]
  misc_feature (1)..(275): Homolog of NCBI NO: 15232143 NR Description: hypothetical protein; protein id: At3g27330.1
  misc_feature (20)..(275): Homolog of NCBI NO: 11994635 NR Description: gene_id:K1G2.4~ref|NP_008959.1~similar to unknown
MASRDAASSPKSAPRRHGPAAPKNGADLLSPRFRSAAALAGWDEESVLLAAMVVDDTPVRDSRRKRRASTSSVGGSAGSSTRKRRPRRLSPAKIPPVVFALDDEKSDTAADSKSEVKAAKEEEKPVLVGDKEASGSGEKAVAAANMPCMDRLREELSCAICLDICFEPTTTPCGHSFCMRCLRHAAAKCGKRCPKCRQFISSSKSCTINTVLWNTIQLLFPSEVEARKGSSSSPSPCDKDDVRANRFSQGGPGMRTRSRSSGSGFISSEGRTRSSFIEPGASANFIVSTYGSARSSNSRRGFVPASQLLLTRLEQSEDAAALAYRLQQEEFVNAFEEPEQERQPRDAVSTARDTLRAMASRAIRLRARGWPV

SEQ ID NO: 1944 - protein, 321 aa, Zea mays subsp. mays
  peptide (1)..(321): Ceres Seq. ID no. 12357469
  misc_feature (107)..(145): Pfam Name: Zinc finger, C3HC4 type (RING finger) Pfam Description: Zinc finger, C3HC4 type (RING finger)
  misc_feature (98)..(176): Homolog of NCBI NO: 13905224 NR Description: Unknown (protein for MGC:6886) [Mus musculus]
  misc_feature (51)..(167): Homolog of NCBI NO: 23487732 NR Description: zinc finger protein-related [Plasmodium yoelii
  misc_feature (25)..(170): Homolog of NCBI NO: 10438137 NR Description: unnamed protein product [Homo sapiens]
  misc_feature (98)..(176): Homolog of NCBI NO: 21706565 NR Description: Similar to tripartite motif protein 25 [Mus
  misc_feature (103)..(182): Homolog of NCBI NO: 18394639 NR Description: expressed protein
  misc_feature (104)..(235): Homolog of NCBI NO: 26343717 NR Description: unnamed protein product [Mus musculus]
  misc_feature (104)..(292): Homolog of NCBI NO: 26379538 NR Description: unnamed protein product [Mus musculus]
  misc_feature (103)..(182): Homolog of NCBI NO: 21554128 NR Description: unknown [Arabidopsis thaliana]
  misc_feature (1)..(224): Homolog of NCBI NO: 15232143 NR Description: hypothetical protein; protein id: At3g27330.1
  misc_feature (1)..(224): Homolog of NCBI NO: 11994635 NR Description: gene_id:K1G2.4~ref|NP_008959.1~similar to unknown
MVVDDTPVRDSRRKRRASTSSVGGSAGSSTRKRRPRRLSPAKIPPVVFALDDEKSDTAADSKSEVKAAKEEEKPVLVGDKEASGSGEKAVAAANMPCMDRLREELSCAICLDICFEPTTTPCGHSFCMRCLRHAAAKCGKRCPKCRQFISSSKSCTINTVLWNTIQLLFPSEVEARKGSSSSPSPCDKDDVRANRFSQGGPGMRTRSRSSGSGFISSEGRTRSSFIEPGASANFIVSTYGSARSSNSRRGFVPASQLLLTRLEQSEDAAALAYRLQQEEFVNAFEEPEQERQPRDAVSTARDTLRAMASRAIRLRARGWPV

SEQ ID NO: 1945 - DNA, 1691 bp, Zea mays subsp. mays
  misc_feature (1)..(1691): Ceres Seq. ID no. 12365235
  misc_feature: MA Experiment ID: 108504 Result: Down-regulated in Transcription
  misc_feature: MA Experiment 108504 PARAMETER Experiment Name: Zm_Drought_P Parameter: Age (day) Value: 8
  misc_feature: MA Experiment 108504 PARAMETER Experiment Name: Zm_Drought_P Parameter: Organism Value: Zea mays
  misc_feature: MA Experiment 108504 PARAMETER Experiment Name: Zm_Drought_P Parameter: Plant Line Value: 35A19
  misc_feature: MA Experiment 108504 PARAMETER Experiment Name: Zm_Drought_P Parameter: Timepoint (hr) Value: 12
  misc_feature: MA Experiment 108504 PARAMETER Experiment Name: Zm_Drought_P Parameter: Tissue Value: Aerial
  misc_feature: MA Experiment 108504 PARAMETER Experiment Name: Zm_Drought_P Parameter: Treatment Value: Drought vs. No Drought
  misc_feature: MA Experiment ID: 108515 Result: Down-regulated in Transcription
  misc_feature: MA Experiment 108515 PARAMETER Experiment Name: Zm_2mM_SA_P Parameter: Age (day) Value: 8
  misc_feature: MA Experiment 108515 PARAMETER Experiment Name: Zm_2mM_SA_P Parameter: Organism Value: Zea mays
  misc_feature: MA Experiment 108515 PARAMETER Experiment Name: Zm_2mM_SA_P Parameter: Plant Line Value: 35A19
  misc_feature: MA Experiment 108515 PARAMETER Experiment Name: Zm_2mM_SA_P Parameter: Timepoint (hr) Value: 12
  misc_feature: MA Experiment 108515 PARAMETER Experiment Name: Zm_2mM_SA_P Parameter: Tissue Value: Aerial
  misc_feature: MA Experiment 108515 PARAMETER Experiment Name: Zm_2mM_SA_P Parameter: Treatment Value: 2mM SA vs. No Treatment
  misc_feature: MA Experiment ID: 108527 Result: Down-regulated in Transcription
  misc_feature: MA Experiment 108527 PARAMETER Experiment Name: Zm_5mM_NO_P Parameter: Age (day) Value: 8
  misc_feature: MA Experiment 108527 PARAMETER Experiment Name: Zm_5mM_NO_P Parameter: Organism Value: Zea mays
  misc_feature: MA Experiment 108527 PARAMETER Experiment Name: Zm_5mM_NO_P Parameter: Plant Line Value: 35A19
  misc_feature: MA Experiment 108527 PARAMETER Experiment Name: Zm_5mM_NO_P Parameter: Timepoint (hr) Value: 6
  misc_feature: MA Experiment 108527 PARAMETER Experiment Name: Zm_5mM_NO_P Parameter: Tissue Value: Aerial
  misc_feature: MA Experiment 108527 PARAMETER Experiment Name: Zm_5mM_NO_P Parameter: Treatment Value: 5mM NO vs. No Treatment
  misc_feature: MA Experiment ID: 108535 Result: Down-regulated in Transcription
  misc_feature: MA Experiment 108535 PARAMETER Experiment Name: Zm_Meristem_P Parameter: Age (day) Value: 8
  misc_feature: MA Experiment 108535 PARAMETER Experiment Name: Zm_Meristem_P Parameter: Organism Value: Zea mays
  misc_feature: MA Experiment 108535 PARAMETER Experiment Name: Zm_Meristem_P Parameter: Plant Line Value: 35A19
  misc_feature: MA Experiment 108535 PARAMETER Experiment Name: Zm_Meristem_P Parameter: Tissue Value: Root Meristem vs. Above Root Meristem
  misc_feature: MA Experiment ID: 108536 Result: Up-regulated in Transcription
  misc_feature: MA Experiment 108536 PARAMETER Experiment Name: Zm_Meristem_P Parameter: Age (day) Value: 8
  misc_feature: MA Experiment 108536 PARAMETER Experiment Name: Zm_Meristem_P Parameter: Organism Value: Zea mays
  misc_feature: MA Experiment 108536 PARAMETER Experiment Name: Zm_Meristem_P Parameter: Plant Line Value: 35A19
  misc_feature: MA Experiment 108536 PARAMETER Experiment Name: Zm_Meristem_P Parameter: Tissue Value: Shoot Meristem vs. Above Shoot Meristem
  misc_feature: MA Experiment ID: 108543 Result: Up-regulated in Transcription
  misc_feature: MA Experiment ID: 108556 Result: Down-regulated in Transcription
  misc_feature: MA Experiment 108556 PARAMETER Experiment Name: Zm_Drought_P Parameter: Age (day) Value: 9
  misc_feature: MA Experiment 108556 PARAMETER Experiment Name: Zm_Drought_P Parameter: Organism Value: Zea mays
  misc_feature: MA Experiment 108556 PARAMETER Experiment Name: Zm_Drought_P Parameter: Plant Line Value: 35A19
  misc_feature: MA Experiment 108556 PARAMETER Experiment Name: Zm_Drought_P Parameter: Timepoint (hr) Value: 24
  misc_feature: MA Experiment 108556 PARAMETER Experiment Name: Zm_Drought_P Parameter: Tissue Value: Aerial
  misc_feature: MA Experiment 108556 PARAMETER Experiment Name: Zm_Drought_P Parameter: Treatment Value: Drought vs. No Drought
  misc_feature: MA Experiment ID: 108559 Result: Down-regulated in Transcription
  misc_feature: MA Experiment 108559 PARAMETER Experiment Name: Zm_5mM_NO_P Parameter: Age (day) Value: 8
  misc_feature: MA Experiment 108559 PARAMETER Experiment Name: Zm_5mM_NO_P Parameter: Organism Value: Zea mays
  misc_feature: MA Experiment 108559 PARAMETER Experiment Name: Zm_5mM_NO_P Parameter: Plant Line Value: 35A19
  misc_feature: MA Experiment 108559 PARAMETER Experiment Name: Zm_5mM_NO_P Parameter: Timepoint (hr) Value: 12
  misc_feature: MA Experiment 108559 PARAMETER Experiment Name: Zm_5mM_NO_P Parameter: Tissue Value: Aerial
  misc_feature: MA Experiment 108559 PARAMETER Experiment Name: Zm_5mM_NO_P Parameter: Treatment Value: 5mM NO vs. No Treatment
  misc_feature: MA Experiment ID: 108597 Result: Down-regulated in Transcription
  misc_feature: MA Experiment 108597 PARAMETER Experiment Name: Zm_100uM_ABA_P Parameter: Age (day) Value: 9
  misc_feature: MA Experiment 108597 PARAMETER Experiment Name: Zm_100uM_ABA_P Parameter: Organism Value: Zea mays
  misc_feature: MA Experiment 108597 PARAMETER Experiment Name: Zm_100uM_ABA_P Parameter: Plant Line Value: 35A19
  misc_feature: MA Experiment 108597 PARAMETER Experiment Name: Zm_100uM_ABA_P Parameter: Timepoint (hr) Value: 24
  misc_feature: MA Experiment 108597 PARAMETER Experiment Name: Zm_100uM_ABA_P Parameter: Tissue Value: Aerial
  misc_feature: MA Experiment 108597 PARAMETER Experiment Name: Zm_100uM_ABA_P Parameter: Treatment Value: 100uM ABA vs. No Treatment
  misc_feature: MA Experiment ID: 108687 Result: Down-regulated in Transcription
  misc_feature: MA Experiment 108687 PARAMETER Experiment Name: Zm_Embryos-Flowers__P Parameter: Tissue Value: Embryo vs. Aerial+
  misc_feature: MA Experiment ID: 20000480 Result: Down-regulated in Transcription
  misc_feature: MA Experiment 20000480 PARAMETER Experiment Name: Zm_Drought_P Parameter: Age (day) Value: 11
  misc_feature: MA Experiment 20000480 PARAMETER Experiment Name: Zm_Drought_P Parameter: Organism Value: Zea mays
  misc_feature: MA Experiment 20000480 PARAMETER Experiment Name: Zm_Drought_P Parameter: Plant Line Value: 35A19
  misc_feature: MA Experiment 20000480 PARAMETER Experiment Name: Zm_Drought_P Parameter: Timepoint (hr) Value: 72
  misc_feature: MA Experiment 20000480 PARAMETER Experiment Name: Zm_Drought_P Parameter: Tissue Value: Aerial
  misc_feature: MA Experiment 20000480 PARAMETER Experiment Name: Zm_Drought_P Parameter: Treatment Value: Drought vs. No Drought
  misc_feature: MA Experiment ID: 20000487 Result: Up-regulated in Transcription
  misc_feature: MA Experiment 20000487 PARAMETER Experiment Name: Zm_50mM_NH4NO3_L_to_H_P Parameter: Organism Value: Zea mays
  misc_feature: MA Experiment 20000487 PARAMETER Experiment Name: Zm_50mM_NH4NO3_L_to_H_P Parameter: Timepoint (hr) Value: 4
  misc_feature: MA Experiment 20000487 PARAMETER Experiment Name: Zm_50mM_NH4NO3_L_to_H_P Parameter: Tissue Value: Leaves
  misc_feature: MA Experiment 20000487 PARAMETER Experiment Name: Zm_50mM_NH4NO3_L_to_H_P Parameter: Treatment Value: 50mM NH4NO3 vs. 100mM Mannitol
  misc_feature: MA Experiment ID: 20000488 Result: Up-regulated in Transcription
  misc_feature: MA Experiment 20000488 PARAMETER Experiment Name: Zm_50mM_NH4NO3_L_to_H_P Parameter: Organism Value: Zea mays
  misc_feature: MA Experiment 20000488 PARAMETER Experiment Name: Zm_50mM_NH4NO3_L_to_H_P Parameter: Timepoint (hr) Value: 8
  misc_feature: MA Experiment 20000488 PARAMETER Experiment Name: Zm_50mM_NH4NO3_L_to_H_P Parameter: Tissue Value: Leaves
  misc_feature: MA Experiment 20000488 PARAMETER Experiment Name: Zm_50mM_NH4NO3_L_to_H_P Parameter: Treatment Value: 50mM NH4NO3 vs. 100mM Mannitol
  misc_feature: MA Experiment ID: 20001606 Result: Up-regulated in Transcription
  misc_feature: MA Experiment 20001606 PARAMETER Experiment Name: Zm_50ppm_KNO3_L-to-H_P Parameter: Age (day) Value: 19
  misc_feature: MA Experiment 20001606 PARAMETER Experiment Name: Zm_50ppm_KNO3_L-to-H_P Parameter: Organism Value: Zea mays
  misc_feature: MA Experiment 20001606 PARAMETER Experiment Name: Zm_50ppm_KNO3_L-to-H_P Parameter: Plant Line Value: 35A19
  misc_feature: MA Experiment 20001606 PARAMETER Experiment Name: Zm_50ppm_KNO3_L-to-H_P Parameter: Timepoint (hr) Value: 8
  misc_feature: MA Experiment 20001606 PARAMETER Experiment Name: Zm_50ppm_KNO3_L-to-H_P Parameter: Tissue Value: Shoots
  misc_feature: MA Experiment 20001606 PARAMETER Experiment Name: Zm_50ppm_KNO3_L-to-H_P Parameter: Treatment Value: 50ppm KNO3 vs. 50ppm KCl
ctgggccgttactagcttagctcatatacgtacgtacgcaggctgcaagtgatcgagaggagcaatataatggctggttcttccatggacactgaagctgcaggcaaggagctcaagcagggcagcggcggcggcggcggctacaccatgccggctactgctcatgcggtggacacagactcgtggcagcaggtggggctgctcctggtgatcggcttcaactgcgcctacgtgctcagcttctccaacctcatgatggtgcccctgggctgggcgtggggcgtcgcctgcctgctgctcgtcggcgccgccgcgtggtacgccaactggctcctcgccggcctccacttcgtcgacggccagaggttcatccgctacagggacctcatgggcttcatattcgggaggaacatgtactacatcacctggttcctgcagttcgcaactctacttctgtgcaacatgggcttcattttgctaggagcaagagcgctcaaggcaatcaacacggagtttacccacaccccagccaggctgcagtggttcatcacggccacgggaatcgtctacttcgccttcgcctacttcgtgccgacgatttctgccatgaggaactggctcgccacgtcggcggcgctgacgttagcttacgacgtcgctctgctggctatcttgatcagagatgggaaatcgaacaagcagaaggactatgacgtccatgccggatcccaagccgagaaggtgttcaacgcgttgggcgccgtcgctgccatcctcgtctgcaacacgtccgggctgctcccggagatacagtcgacggtgcgggagccggcggtgcgcggcatgaggcgggcgctgctgctgcagtacaccgccggcgccgcggggtactacggcatcagcgtggcggggtactgggcgtacgggtcagcggtgtcggagtacctccccaacgagctcggcggcccgaggtgggccgccgtcctcatcaacgccaccgccttcctgcagagcattgtgtcccaacacctgtttacggtgccgatccacgaggcgatggacacgcggctgcagcggctggacgaaggcatattctcccgctacaacctcacgcgccgcgtgcgcgcgggggctcgtcttcggcttcaacgtcttcgtcaccgcgctgttcccgttcatgggggatttcgtcaacctcgtcggctccttagcgctcgtcccgctcaccttcacgttccccagcatggccgtcctcaagatcaaaggcaagagctgtgggagatgtaacagactttggcattggggcatcatagttctgtcctcggctctctgcgttgctaccaccgccgccgccgttcgtttgatcttcaacaatgctaggatctaccacttcttcgccgacatgtagcgagcgagtagtagtgggattgacatgtgtatcgtcaccatgaggtgatagtatggccacttcgttctcaattttttgtttgcttcaagagtggaagggtacggtggtcacttagctcatgtttgataatggcactacatgattaataagcatgcatcatgtacgtagtcatcctatcaaaatttagaaatgagcttattgtaatcgatggaccacctccctctaaccaaacatctctgttttccgtgaaagcttaaaaggcaactcgtgaatgtgttctttt

SEQ ID NO: 1946 - protein, 405 aa, Zea mays subsp. mays
  peptide (1)..(405): Ceres Seq. ID no. 12365236
  misc_feature (8)..(403): Homolog of NCBI NO: 15225591 NR Description: proline transporter 1
  misc_feature (6)..(392): Homolog of NCBI NO: 21069016 NR Description: betaine/proline transporter [Avicennia marina]
  misc_feature (27)..(392): Homolog of NCBI NO: 21069020 NR Description: betaine/proline transporter [Avicennia marina]
  misc_feature (27)..(392): Homolog of NCBI NO: 11358950 NR Description: proline transport protein 3 [imported] - tomato
  misc_feature (9)..(392): Homolog of NCBI NO: 21069018 NR Description: betaine/proline transporter [Avicennia marina]
  misc_feature (27)..(392): Homolog of NCBI NO: 11358949 NR Description: proline transport protein 2 [imported] - tomato
  misc_feature (20)..(392): Homolog of NCBI NO: 15228000 NR Description: putative proline transporter
  misc_feature (27)..(392): Homolog of NCBI NO: 15228183 NR Description: proline transporter 2
  misc_feature (30)..(392): Homolog of NCBI NO: 11358960 NR Description: proline transport protein [imported] - rice
  misc_feature (1)..(353): Homolog of NCBI NO: 20804893 NR Description: proline transport protein-like
MAGSSMDTEAAGKELKQGSGGGGGYTMPATAHAVDTDSWQQVGLLLVIGFNCAYVLSFSNLMMVPLGWAWGVACLLLVGAAAWYANWLLAGLHFVDGQRFIRYRDLMGFIFGRNMYYITWFLQFATLLLCNMGFILLGARALKAINTEFTHTPARLQWFITATGIVYFAFAYFVPTISAMRNWLATSAALTLAYDVALLAILIRDGKSNKQKDYDVHAGSQAEKVFNALGAVAAILVCNTSGLLPEIQSTVREPAVRGMRRALLLQYTAGAAGYYGISVAGYWAYGSAVSEYLPNELGGPRWAAVLINATAFLQSIVSQHLFTVPIHEAMDTRLQRLDEGIFSRYNLTRRVRAGARLRLQRLRHRAVPVHGGFRQPRRLLSARPAHLHVPQHGRPQDQRQELWEM

SEQ ID NO: 1947 - protein, 400 aa, Zea mays subsp. mays
  peptide (1)..(400): Ceres Seq. ID no. 12365237
  misc_feature (3)..(398): Homolog of NCBI NO: 15225591 NR Description: proline transporter 1
  misc_feature (1)..(387): Homolog of NCBI NO: 21069016 NR Description: betaine/proline transporter [Avicennia marina]
  misc_feature (22)..(387): Homolog of NCBI NO: 21069020 NR Description: betaine/proline transporter [Avicennia marina]
  misc_feature (22)..(387): Homolog of NCBI NO: 11358950 NR Description: proline transport protein 3 [imported] - tomato
  misc_feature (4)..(387): Homolog of NCBI NO: 21069018 NR Description: betaine/proline transporter [Avicennia marina]
  misc_feature (22)..(387): Homolog of NCBI NO: 11358949 NR Description: proline transport protein 2 [imported] - tomato
  misc_feature (15)..(387): Homolog of NCBI NO: 15228000 NR Description: putative proline transporter
  misc_feature (22)..(387): Homolog of NCBI NO: 15228183 NR Description: proline transporter 2
  misc_feature (25)..(387): Homolog of NCBI NO: 11358960 NR Description: proline transport protein [imported] - rice
  misc_feature (1)..(348): Homolog of NCBI NO: 20804893 NR Description: proline transport protein-like
MDTEAAGKELKQGSGGGGGYTMPATAHAVDTDSWQQVGLLLVIGFNCAYVLSFSNLMMVPLGWAWGVACLLLVGAAAWYANWLLAGLHFVDGQRFIRYRDLMGFIFGRNMYYITWFLQFATLLLCNMGFILLGARALKAINTEFTHTPARLQWFITATGIVYFAFAYFVPTISAMRNWLATSAALTLAYDVALLAILIRDGKSNKQKDYDVHAGSQAEKVFNALGAVAAILVCNTSGLLPEIQSTVREPAVRGMRRALLLQYTAGAAGYYGISVAGYWAYGSAVSEYLPNELGGPRWAAVLINATAFLQSIVSQHLFTVPIHEAMDTRLQRLDEGIFSRYNLTRRVRAGARLRLQRLRHRAVPVHGGFRQPRRLLSARPAHLHVPQHGRPQDQRQELWEM

SEQ ID NO: 1948 - protein, 379 aa, Zea mays subsp. mays
  peptide (1)..(379): Ceres Seq. ID no. 12365238
  misc_feature (1)..(377): Homolog of NCBI NO: 15225591 NR Description: proline transporter 1
  misc_feature (1)..(366): Homolog of NCBI NO: 21069016 NR Description: betaine/proline transporter [Avicennia marina]
  misc_feature (1)..(366): Homolog of NCBI NO: 21069020 NR Description: betaine/proline transporter [Avicennia marina]
  misc_feature (1)..(366): Homolog of NCBI NO: 11358950 NR Description: proline transport protein 3 [imported] - tomato
  misc_feature (1)..(366): Homolog of NCBI NO: 21069018 NR Description: betaine/proline transporter [Avicennia marina]
  misc_feature (1)..(366): Homolog of NCBI NO: 11358949 NR Description: proline transport protein 2 [imported] - tomato
  misc_feature (1)..(366): Homolog of NCBI NO: 15228000 NR Description: putative proline transporter
  misc_feature (1)..(366): Homolog of NCBI NO: 15228183 NR Description: proline transporter 2
  misc_feature (4)..(366): Homolog of NCBI NO: 11358960 NR Description: proline transport protein [imported] - rice
  misc_feature (1)..(327): Homolog of NCBI NO: 20804893 NR Description: proline transport protein-like
MPATAHAVDTDSWQQVGLLLVIGFNCAYVLSFSNLMMVPLGWAWGVACLLLVGAAAWYANWLLAGLHFVDGQRFIRYRDLMGFIFGRNMYYITWFLQFATLLLCNMGFILLGARALKAINTEFTHTPARLQWFITATGIVYFAFAYFVPTISAMRNWLATSAALTLAYDVALLAILIRDGKSNKQKDYDVHAGSQAEKVFNALGAVAAILVCNTSGLLPEIQSTVREPAVRGMRRALLLQYTAGAAGYYGISVAGYWAYGSAVSEYLPNELGGPRWAAVLINATAFLQSIVSQHLFTVPIHEAMDTRLQRLDEGIFSRYNLTRRVRAGARLRLQRLRHRAVPVHGGFRQPRRLLSARPAHLHVPQHGRPQDQRQELWEM

SEQ ID NO: 1949 - DNA, 1720 bp, Zea mays subsp. mays
  misc_feature (1)..(1720): Ceres Seq. ID no. 12374340
  misc_feature: MA Experiment ID: 108528 Result: Up-regulated in Transcription
  misc_feature: MA Experiment 108528 PARAMETER Experiment Name: Zm_Imbibed_Seeds_P Parameter: Age (day) Value: 5 vs. 2
  misc_feature: MA Experiment 108528 PARAMETER Experiment Name: Zm_Imbibed_Seeds_P Parameter: Organism Value: Zea mays
  misc_feature: MA Experiment 108528 PARAMETER Experiment Name: Zm_Imbibed_Seeds_P Parameter: Plant Line Value: 35A19
  misc_feature: MA Experiment 108528 PARAMETER Experiment Name: Zm_Imbibed_Seeds_P Parameter: Tissue Value: Aerial vs. Embryo
  misc_feature: MA Experiment ID: 108530 Result: Up-regulated in Transcription
  misc_feature: MA Experiment 108530 PARAMETER Experiment Name: Zm_Imbibed_Seeds_P Parameter: Age (day) Value: 6 vs. 2
  misc_feature: MA Experiment 108530 PARAMETER Experiment Name: Zm_Imbibed_Seeds_P Parameter: Organism Value: Zea mays
  misc_feature: MA Experiment 108530 PARAMETER Experiment Name: Zm_Imbibed_Seeds_P Parameter: Plant Line Value: 35A19
  misc_feature: MA Experiment 108530 PARAMETER Experiment Name: Zm_Imbibed_Seeds_P Parameter: Tissue Value: Aerial vs. Embryo
  misc_feature: MA Experiment ID: 108545 Result: Up-regulated in Transcription
  misc_feature: MA Experiment 108545 PARAMETER Experiment Name: Zm_Imbibed_Seeds_P Parameter: Age (day) Value: 3 vs. 2
  misc_feature: MA Experiment 108545 PARAMETER Experiment Name: Zm_Imbibed_Seeds_P Parameter: Organism Value: Zea mays
  misc_feature: MA Experiment 108545 PARAMETER Experiment Name: Zm_Imbibed_Seeds_P Parameter: Plant Line Value: 35A19
  misc_feature: MA Experiment 108545 PARAMETER Experiment Name: Zm_Imbibed_Seeds_P Parameter: Tissue Value: Aerial vs. Embryo
  misc_feature: MA Experiment ID: 108547 Result: Up-regulated in Transcription
  misc_feature: MA Experiment 108547 PARAMETER Experiment Name: Zm_Imbibed_Seeds_P Parameter: Age (day) Value: 4 vs. 2
  misc_feature: MA Experiment 108547 PARAMETER Experiment Name: Zm_Imbibed_Seeds_P Parameter: Organism Value: Zea mays
  misc_feature: MA Experiment 108547 PARAMETER Experiment Name: Zm_Imbibed_Seeds_P Parameter: Plant Line Value: 35A19
  misc_feature: MA Experiment 108547 PARAMETER Experiment Name: Zm_Imbibed_Seeds_P Parameter: Tissue Value: Aerial vs. Embryo
  misc_feature: MA Experiment ID: 20000535 Result: Up-regulated in Transcription
  misc_feature: MA Experiment 20000535 PARAMETER Experiment Name: Zm_Hybrid_Seed_Dev_P Parameter: DAP Value: 30 vs. 12
  misc_feature: MA Experiment 20000535 PARAMETER Experiment Name: Zm_Hybrid_Seed_Dev_P Parameter: Organism Value: Zea mays
  misc_feature: MA Experiment 20000535 PARAMETER Experiment Name: Zm_Hybrid_Seed_Dev_P Parameter: Plant Line Value: 35A19
  misc_feature: MA Experiment 20000535 PARAMETER Experiment Name: Zm_Hybrid_Seed_Dev_P Parameter: Tissue Value: Embryo vs. Unfert Floret
gcacgagaccattacctagaacatcctaatcgaaaaataccttgctgggtcgttgccaaatgccaacgcaggcgccgggcagtgcacgcacatggctgcgcgcgtgggcctgctcccgcacgcgatcctcgtctcctcccgagctctacccacgccccgagctcgcgtcccttatcctcttccacccgtcccttcctacctccgccacgcctcctcctccgcctcccgctcctgccgcgcgtcgccgcgttttgtcgcagtccgcgccatggcttcggggaacccctacgccgccgagctcgccgccgccaagaaggccgttaccctcgccgccaaactctgccagacagttcaacaggatattatgcattctggcgttcaggctaaggcagacaaaagtcctgtcacagttgctgattatggatctcaaatattggtcggtttttccttaaagatggatgtatcatctggaccattttcattggtggctgaagaggactcagatgaattgagaaaagatggcgctgaagaaattttggaagatattactgaccttgtcaatgaaaccatctttgatgatggttcatataacatttcgtttacaaaggaaggtatactctctgcaattgatgatgggaagtctgagggaggtccatctggacgacattgggtgcttgatccgattgacggtactaaaggtttcttgaggggcgaccaatatgccattgcattggctctgcttgatgaaggtaaagttgttttgggtgtattggcttgtccaaatcttccattgtcatcaataaacaacatcaatggtaactcttcgggagataaagttggtgccctgttttctgctacaattggttgtggggctgaagtagagtccttagatggctctccaccacaaaagattagtgtttgctccatcgacaatcctgtcaatgcatcattttttgaatcctatgaaagtgcacactccatgcatgatttgactggctctattgcagagaaacttggtgtccaagctcctccagttagaatcgacagccaagcaaaatatggtgctctggcccgaggtgatggcgccatttacttgcgctttccacacaaaggttatagagagaaaatatgggaccatgcagcaggatcaattgtcgtgacagaagctggaggcatagtaacagatgctgcgggaaacgacttggatttctccaaagggagatttctcgatctcgacacaggcatcatcgcaaccaacaaggagttgatgccgtcgctcctgaaagctgtccaagaggctattaaagagacgaaccaggctgcctccctcttatagctgttgtagtggtcgacaaaaaagtagttgcaaaattttcgtactggcaaacagcattgctagaagtggacaacatgaataatttgagcatcatcaagacaggcgagcgcttggtgccggtgctcctaaaggccatccaagaggttatcaaggagaaagttgagcagtcgtaatgatgaacagaaattttagttgcacgtgacttacatatttcagctgtaccacttttgatcagacacgttcccagtgggtgcttagcagataacagttcttttactgaatactgtaaaagccttttttttcaaaaataaactaggtttcctccgttttcaaaaaaaaaaaaaaaaaaaaaaaaaaaaaaaaaaaagaaaaaaaaaaaaaaaa

SEQ ID NO: 1950 - protein, 414 aa, Zea mays subsp. mays
  peptide (1)..(414): Ceres Seq. ID no. 12374341
  misc_feature (195)..(413): Homolog of NCBI NO: 17017951 NR Description: 3'(2'),5'-bisphosphate nucleotidase [Gossypium
  misc_feature (66)..(413): Homolog of NCBI NO: 8777312 NR Description: 3'(2'),5'-bisphosphate nucleotidase [Arabidopsis
  misc_feature (65)..(406): Homolog of NCBI NO: 15242383 NR Description: 3'(2'),5'-bisphosphate nucleotidase-like protein
  misc_feature (66)..(413): Homolog of NCBI NO: 21618152 NR Description: 3(2),5-bisphosphate nucleotidase [Arabidopsis
  misc_feature (66)..(413): Homolog of NCBI NO: 18424775 NR Description: 3(2),5-bisphosphate nucleotidase
  misc_feature (65)..(406): Homolog of NCBI NO: 34395640 NR Description: Probable SAL4 phosphatase (3'(2'),5'-bisphosphate
  misc_feature (66)..(408): Homolog of NCBI NO: 15237589 NR Description: 3(2),5-bisphosphate nucleotidase (emb|CAB05889.1)
  misc_feature (66)..(413): Homolog of NCBI NO: 15237567 NR Description: 3(2),5-bisphosphate nucleotidase
  misc_feature (59)..(414): Homolog of NCBI NO: 3913517 NR Description: 3'(2'),5'-BISPHOSPHATE NUCLEOTIDASE
  misc_feature (60)..(414): Homolog of NCBI NO: 14268820 NR Description: diphosphonucleotide phosphatase 1 [Zea mays]
MAARVGLLPHAILVSSRALPTPRARVPYPLPPVPSYLRHASSSASRSCRASPRFVAVRAMASGNPYAAELAAAKKAVTLAAKLCQTVQQDIMHSGVQAKADKSPVTVADYGSQILVGFSLKMDVSSGPFSLVAEEDSDELRKDGAEEILEDITDLVNETIFDDGSYNISFTKEGILSAIDDGKSEGGPSGRHWVLDPIDGTKGFLRGDQYAIALALLDEGKVVLGVLACPNLPLSSINNINGNSSGDKVGALFSATIGCGAEVESLDGSPPQKISVCSIDNPVNASFFESYESAHSMHDLTGSIAEKLGVQAPPVRIDSQAKYGALARGDGAIYLRFPHKGYREKIWDHAAGSIVVTEAGGIVTDAAGNDLDFSKGRFLDLDTGIIATNKELMPSLLKAVQEAIKETNQAASLL

SEQ ID NO: 1951 - protein, 355 aa, Zea mays subsp. mays
  peptide (1)..(355): Ceres Seq. ID no. 12374342
  misc_feature (1)..(355): Homolog of NCBI NO: 3913517 NR Description: 3'(2'),5'-BISPHOSPHATE NUCLEOTIDASE
  misc_feature (1)..(355): Homolog of NCBI NO: 14268820 NR Description: diphosphonucleotide phosphatase 1 [Zea mays]
  misc_feature (136)..(354): Homolog of NCBI NO: 17017951 NR Description: 3'(2'),5'-bisphosphate nucleotidase [Gossypium
  misc_feature (7)..(354): Homolog of NCBI NO: 8777312 NR Description: 3'(2'),5'-bisphosphate nucleotidase [Arabidopsis
  misc_feature (6)..(347): Homolog of NCBI NO: 15242383 NR Description: 3'(2'),5'-bisphosphate nucleotidase-like protein
  misc_feature (7)..(354): Homolog of NCBI NO: 21618152 NR Description: 3(2),5-bisphosphate nucleotidase [Arabidopsis
  misc_feature (7)..(354): Homolog of NCBI NO: 18424775 NR Description: 3(2),5-bisphosphate nucleotidase
  misc_feature (6)..(347): Homolog of NCBI NO: 34395640 NR Description: Probable SAL4 phosphatase (3'(2'),5'-bisphosphate
  misc_feature (7)..(349): Homolog of NCBI NO: 15237589 NR Description: 3(2),5-bisphosphate nucleotidase (emb|CAB05889.1)
  misc_feature (7)..(354): Homolog of NCBI NO: 15237567 NR Description: 3(2),5-bisphosphate nucleotidase
MASGNPYAAELAAAKKAVTLAAKLCQTVQQDIMHSGVQAKADKSPVTVADYGSQILVGFSLKMDVSSGPFSLVAEEDSDELRKDGAEEILEDITDLVNETIFDDGSYNISFTKEGILSAIDDGKSEGGPSGRHWVLDPIDGTKGFLRGDQYAIALALLDEGKVVLGVLACPNLPLSSINNINGNSSGDKVGALFSATIGCGAEVESLDGSPPQKISVCSIDNPVNASFFESYESAHSMHDLTGSIAEKLGVQAPPVRIDSQAKYGALARGDGAIYLRFPHKGYREKIWDHAAGSIVVTEAGGIVTDAAGNDLDFSKGRFLDLDTGIIATNKELMPSLLKAVQEAIKETNQAASLL

SEQ ID NO: 1952 - protein, 323 aa, Zea mays subsp. mays
  peptide (1)..(323): Ceres Seq. ID no. 12374343
  misc_feature (104)..(322): Homolog of NCBI NO: 17017951 NR Description: 3'(2'),5'-bisphosphate nucleotidase [Gossypium
  misc_feature (1)..(322): Homolog of NCBI NO: 8777312 NR Description: 3'(2'),5'-bisphosphate nucleotidase [Arabidopsis
  misc_feature (1)..(315): Homolog of NCBI NO: 15242383 NR Description: 3'(2'),5'-bisphosphate nucleotidase-like protein
  misc_feature (1)..(322): Homolog of NCBI NO: 21618152 NR Description: 3(2),5-bisphosphate nucleotidase [Arabidopsis
  misc_feature (1)..(322): Homolog of NCBI NO: 18424775 NR Description: 3(2),5-bisphosphate nucleotidase
  misc_feature (1)..(315): Homolog of NCBI NO: 34395640 NR Description: Probable SAL4 phosphatase (3'(2'),5'-bisphosphate
  misc_feature (1)..(317): Homolog of NCBI NO: 15237589 NR Description: 3(2),5-bisphosphate nucleotidase (emb|CAB05889.1)
  misc_feature (1)..(322): Homolog of NCBI NO: 15237567 NR Description: 3(2),5-bisphosphate nucleotidase
  misc_feature (1)..(323): Homolog of NCBI NO: 3913517 NR Description: 3'(2'),5'-BISPHOSPHATE NUCLEOTIDASE
  misc_feature (1)..(323): Homolog of NCBI NO: 14268820 NR Description: diphosphonucleotide phosphatase 1 [Zea mays]
MHSGVQAKADKSPVTVADYGSQILVGFSLKMDVSSGPFSLVAEEDSDELRKDGAEEILEDITDLVNETIFDDGSYNISFTKEGILSAIDDGKSEGGPSGRHWVLDPIDGTKGFLRGDQYAIALALLDEGKVVLGVLACPNLPLSSINNINGNSSGDKVGALFSATIGCGAEVESLDGSPPQKISVCSIDNPVNASFFESYESAHSMHDLTGSIAEKLGVQAPPVRIDSQAKYGALARGDGAIYLRFPHKGYREKIWDHAAGSIVVTEAGGIVTDAAGNDLDFSKGRFLDLDTGIIATNKELMPSLLKAVQEAIKETNQAASLL

SEQ ID NO: 1953 - DNA, 1081 bp, Zea mays subsp. mays
  misc_feature (1)..(1081): Ceres Seq. ID no. 12373946
  misc_feature: MA Experiment ID: 108530 Result: Down-regulated in Transcription
  misc_feature: MA Experiment 108530 PARAMETER Experiment Name: Zm_Imbibed_Seeds_P Parameter: Age (day) Value: 6 vs. 2
  misc_feature: MA Experiment 108530 PARAMETER Experiment Name: Zm_Imbibed_Seeds_P Parameter: Organism Value: Zea mays
  misc_feature: MA Experiment 108530 PARAMETER Experiment Name: Zm_Imbibed_Seeds_P Parameter: Plant Line Value: 35A19
  misc_feature: MA Experiment 108530 PARAMETER Experiment Name: Zm_Imbibed_Seeds_P Parameter: Tissue Value: Aerial vs. Embryo
  misc_feature: MA Experiment ID: 20000492 Result: Up-regulated in Transcription
  misc_feature: MA Experiment 20000492 PARAMETER Experiment Name: Zm_Hybrid_Seed_Dev_P Parameter: DAP Value: 12
  misc_feature: MA Experiment 20000492 PARAMETER Experiment Name: Zm_Hybrid_Seed_Dev_P Parameter: Organism Value: Zea mays
  misc_feature: MA Experiment 20000492 PARAMETER Experiment Name: Zm_Hybrid_Seed_Dev_P Parameter: Plant Line Value: 35A19
  misc_feature: MA Experiment 20000492 PARAMETER Experiment Name: Zm_Hybrid_Seed_Dev_P Parameter: Tissue Value: Fert Kernel vs. Unfert Floret
gcactccgcaagacgcaagaccacctcaccagcctcctcgtccccgatctcctcccacccgcatccaagggtttccttctcgaccgtgcggaacgagccagagaacaggtatggcggcggcgcggcacctcagatccggcctccccctcctccgcgcccacctcgcatcctccgaatccgcggccgtcgctcaggtttcgaggggcttcgcgtcgcaggccgccaagcccaccgggaaggagatcaaggttccaaaggctctgtttggcggcacaggcaactatgccagtgcactgttcctcacagcagctaaatctaatgcattggacaaagttgaatctgagattaaagctattgtagaggcttccaagaagagcccgttgttttctcaattcataaaggacttgtcagttccaaaagcgaccagggtgaaggctatagccgaaatatttgctgacgctgggttttcagatgttacaaagaatttcttggctgtcctggcggacaatggcaggctgaaatatattgaacgcattgcggagagatttgttgatttgactatggaacataagggggagatgaaggttgtggtcaggacagttatttcactcaccaaggaggaggagaaagaactcaaggaaaccttgcaggatatccttggggaaaacaaaactattttggttgaacagaagattgactacagcatcatgggaggattagtgattgaattcgggcagaaggtgcttgatatctcaatcaggaacagggcgaagcaaatggaggcgttcttgaggcaaccacttgacttctaacagccttttggataaaagaagcatcatcggaatgcagaggctgtcctgttgaaggttttcctgtgtctgcaattttaatctgtccttttgaataaaatgtttcctctaacaagtgaagggcactgtttttattgtctcgtgggccacagatgcctgctgaacaatttatgttcatttcttcttttcttaaagaagcatgcactaagaacatgaaggatgcatgtcatgaaagtttttgaaagtcattgaaacttatgagctcctcatgc

SEQ ID NO: 1954 - protein, 269 aa, Zea mays subsp. mays
  peptide (1)..(269): Ceres Seq. ID no. 12373947
  misc_feature (91)..(263): Pfam Name: ATP synthase delta (OSCP) subunit Pfam Description: ATP synthase delta (OSCP) subunit
  misc_feature (62)..(258): Homolog of NCBI NO: 39589686 NR Description: Hypothetical protein CBG12309 [Caenorhabditis
  misc_feature (54)..(265): Homolog of NCBI NO: 4502303 NR Description: ATP synthase, H+ transporting, mitochondrial F1
  misc_feature (54)..(267): Homolog of NCBI NO: 27806307 NR Description: ATP synthase, H+ transporting, mitochondrial F1
  misc_feature (40)..(269): Homolog of NCBI NO: 1655482 NR Description: delta subunit of mitochondrial F1-ATPase
  misc_feature (40)..(269): Homolog of NCBI NO: 15240628 NR Description: delta subunit of mitochondrial F1-ATPase
  misc_feature (40)..(269): Homolog of NCBI NO: 14190495 NR Description: AT5g13450/T22N19_100 [Arabidopsis thaliana]
  misc_feature (37)..(268): Homolog of NCBI NO: 23507248 NR Description: oligomycin sensitivity conferring protein [Silene
  misc_feature (30)..(269): Homolog of NCBI NO: 114682 NR Description: ATP synthase delta chain, mitochondrial precursor
  misc_feature (30)..(269): Homolog of NCBI NO: 4774163 NR Description: F1-ATP synthase delta subunit [Ipomoea batatas]
  misc_feature (37)..(268): Homolog of NCBI NO: 23507246 NR Description: oligomycin sensitivity conferring protein [Silene
TPQDARPPHQPPRPRSPPTRIQGFPSRPCGTSQRTGMAAARHLRSGLPLLRAHLASSESAAVAQVSRGFASQAAKPTGKEIKVPKALFGGTGNYASALFLTAAKSNALDKVESEIKAIVEASKKSPLFSQFIKDLSVPKATRVKAIAEIFADAGFSDVTKNFLAVLADNGRLKYIERIAERFVDLTMEHKGEMKVVVRTVISLTKEEEKELKETLQDILGENKTILVEQKIDYSIMGGLVIEFGQKVLDISIRNRAKQMEAFLRQPLDF

SEQ ID NO: 1955 - protein, 233 aa, Zea mays subsp. mays
  peptide (1)..(233): Ceres Seq. ID no. 12373948
  misc_feature (55)..(227): Pfam Name: ATP synthase delta (OSCP) subunit Pfam Description: ATP synthase delta (OSCP) subunit
  misc_feature (26)..(222): Homolog of NCBI NO: 39589686 NR Description: Hypothetical protein CBG12309 [Caenorhabditis
  misc_feature (18)..(229): Homolog of NCBI NO: 4502303 NR Description: ATP synthase, H+ transporting, mitochondrial F1
  misc_feature (18)..(231): Homolog of NCBI NO: 27806307 NR Description: ATP synthase, H+ transporting, mitochondrial F1
  misc_feature (4)..(233): Homolog of NCBI NO: 1655482 NR Description: delta subunit of mitochondrial F1-ATPase
  misc_feature (4)..(233): Homolog of NCBI NO: 15240628 NR Description: delta subunit of mitochondrial F1-ATPase
  misc_feature (4)..(233): Homolog of NCBI NO: 14190495 NR Description: AT5g13450/T22N19_100 [Arabidopsis thaliana]
  misc_feature (1)..(232): Homolog of NCBI NO: 23507248 NR Description: oligomycin sensitivity conferring protein [Silene
  misc_feature (1)..(233): Homolog of NCBI NO: 114682 NR Description: ATP synthase delta chain, mitochondrial precursor
  misc_feature (1)..(233): Homolog of NCBI NO: 4774163 NR Description: F1-ATP synthase delta subunit [Ipomoea batatas]
  misc_feature (1)..(232): Homolog of NCBI NO: 23507246 NR Description: oligomycin sensitivity conferring protein [Silene
MAAARHLRSGLPLLRAHLASSESAAVAQVSRGFASQAAKPTGKEIKVPKALFGGTGNYASALFLTAAKSNALDKVESEIKAIVEASKKSPLFSQFIKDLSVPKATRVKAIAEIFADAGFSDVTKNFLAVLADNGRLKYIERIAERFVDLTMEHKGEMKVVVRTVISLTKEEEKELKETLQDILGENKTILVEQKIDYSIMGGLVIEFGQKVLDISIRNRAKQMEAFLRQPLDF

SEQ ID NO: 1956 - DNA, 1542 bp, Zea mays subsp. mays
  misc_feature (1)..(1542): Ceres Seq. ID no. 12341469
  misc_feature: MA Experiment ID: 108535 Result: Up-regulated in Transcription
  misc_feature: MA Experiment 108535 PARAMETER Experiment Name: Zm_Meristem_P Parameter: Age (day) Value: 8
  misc_feature: MA Experiment 108535 PARAMETER Experiment Name: Zm_Meristem_P Parameter: Organism Value: Zea mays
  misc_feature: MA Experiment 108535 PARAMETER Experiment Name: Zm_Meristem_P Parameter: Plant Line Value: 35A19
  misc_feature: MA Experiment 108535 PARAMETER Experiment Name: Zm_Meristem_P Parameter: Tissue Value: Root Meristem vs. Above Root Meristem
  misc_feature: MA Experiment ID: 20000487 Result: Up-regulated in Transcription
  misc_feature: MA Experiment 20000487 PARAMETER Experiment Name: Zm_50mM_NH4NO3_L_to_H_P Parameter: Organism Value: Zea mays
  misc_feature: MA Experiment 20000487 PARAMETER Experiment Name: Zm_50mM_NH4NO3_L_to_H_P Parameter: Timepoint (hr) Value: 4
  misc_feature: MA Experiment 20000487 PARAMETER Experiment Name: Zm_50mM_NH4NO3_L_to_H_P Parameter: Tissue Value: Leaves
  misc_feature: MA Experiment 20000487 PARAMETER Experiment Name: Zm_50mM_NH4NO3_L_to_H_P Parameter: Treatment Value: 50mM NH4NO3 vs. 100mM Mannitol
  misc_feature: MA Experiment ID: 20000488 Result: Up-regulated in Transcription
  misc_feature: MA Experiment 20000488 PARAMETER Experiment Name: Zm_50mM_NH4NO3_L_to_H_P Parameter: Organism Value: Zea mays
  misc_feature: MA Experiment 20000488 PARAMETER Experiment Name: Zm_50mM_NH4NO3_L_to_H_P Parameter: Timepoint (hr) Value: 8
  misc_feature: MA Experiment 20000488 PARAMETER Experiment Name: Zm_50mM_NH4NO3_L_to_H_P Parameter: Tissue Value: Leaves
  misc_feature: MA Experiment 20000488 PARAMETER Experiment Name: Zm_50mM_NH4NO3_L_to_H_P Parameter: Treatment Value: 50mM NH4NO3 vs. 100mM Mannitol
  misc_feature: MA Experiment ID: 20001606 Result: Up-regulated in Transcription
  misc_feature: MA Experiment 20001606 PARAMETER Experiment Name: Zm_50ppm_KNO3_L-to-H_P Parameter: Age (day) Value: 19
  misc_feature: MA Experiment 20001606 PARAMETER Experiment Name: Zm_50ppm_KNO3_L-to-H_P Parameter: Organism Value: Zea mays
  misc_feature: MA Experiment 20001606 PARAMETER Experiment Name: Zm_50ppm_KNO3_L-to-H_P Parameter: Plant Line Value: 35A19
  misc_feature: MA Experiment 20001606 PARAMETER Experiment Name: Zm_50ppm_KNO3_L-to-H_P Parameter: Timepoint (hr) Value: 8
  misc_feature: MA Experiment 20001606 PARAMETER Experiment Name: Zm_50ppm_KNO3_L-to-H_P Parameter: Tissue Value: Shoots
  misc_feature: MA Experiment 20001606 PARAMETER Experiment Name: Zm_50ppm_KNO3_L-to-H_P Parameter: Treatment Value: 50ppm KNO3 vs. 50ppm KCl
ccggccccaccggccagtgatacgcactcctcccctcaaagccctagccagacgccgccgccgcacccgatctggctgcctcggtcgatttctaattctcctcgcgagcccaaaccctaaacctaaacctttcacccgccgccgccgccaccaccagcactgccactccgccaccaccgtcccgaagccccctcccagcgccatcgacttcatctcggattgaagcaatgtcgtcggacgatgaggtcagggaggagaaggagctcgacctctcctccaacgacgttgtcaccaagtacaaggctgccgccgaaatcctcaacaacgctctgaagattgttgtgtctcagtgcaagccaaaagtcaagattgttgacctttgcgagaagggcgactctttcataagagagcaaactgggaatgtttacaagaacgcaaagaggaagattgaaaggggtattgctttcccaacctgtgtatccgtcaatgacacagtttgccacttctcaccgcttgcaaccgatgatgccgttctggaagaaaatgacatggttaaaattgatatgggctgtcatattgatggctttattgctgtggtggcacatacacatgtaattacaaatgggcctgtcacaggaagggctggtgatgtgcttgctgctgccaacacagcagcagaagtcgcaatgcggcttgtgagacctgggaagaaaaataaggatgttactgaagcaattcagaaagttgctgctgcttatgattgcaaaattgtggaaggtgttcttagccatcaactgaaacaatttgtgattgatggtaacaaagttgtgctcagtgtctccaatgctgatacaaaggttgatgatgctgaatttgaagaaaatgaagtatatgcaatcgatattgtcaccagcactggggaggggaagcccaagttattggatgagaaacagaccaccatctacaaaagggccgtagacaagaattatcacttgaagatgaaagcgtcaaggtttattttcagtgagatcagccagaagttcccaatcatgccttttactgctagggcattagaagagaagcgtgcgcgtttaggcttggtggaatgcatgaaccatgaactattgcagccgtaccctgtacttcatgagaagccaggcgatcttgttgcacacataaagttcactgtgctgctgatgcccaatggatcagataagataacatcacatcctctacaggagttaaagcccaccaaatccattgaagacaatgcagagataaaggcatggcttgctttggggacgaaatcaaagaagaagggtggtgggaagaagaagaaaggcaagaaaggagatgcagcagaagcagatcccatggaggaggcgacaaacggtgctacaagccaagaataattctgatttttggaattactgccaccagcttttttcttgtttcttcgctgcatctgatggtgttatattacattcagttgtggaaaaattgagtactatttctagcttctaagaaatgaagcatcctatt

SEQ ID NO: 1957 - protein, 394 aa, Zea mays subsp. mays
  peptide (1)..(394): Ceres Seq. ID no. 12341470
  misc_feature (1)..(394): Homolog of NCBI NO: 13632817 NR Description: Proliferation-associated protein 2G4 (Cell cycle
  misc_feature (3)..(384): Homolog of NCBI NO: 26788026 NR Description: SI:dZ150I12.2 (novel protein similar to human
  misc_feature (1)..(390): Homolog of NCBI NO: 34862215 NR Description: similar to proliferation-associated protein 1
  misc_feature (1)..(390): Homolog of NCBI NO: 6755100 NR Description: proliferation-associated 2G4
  misc_feature (1)..(390): Homolog of NCBI NO: 34193902 NR Description: Proliferation-associated protein 1 [Danio rerio]
  misc_feature (1)..(388): Homolog of NCBI NO: 30693537 NR Description: nuclear DNA-binding protein G2p -related
  misc_feature (1)..(388): Homolog of NCBI NO: 13430628 NR Description: putative nuclear DNA-binding protein G2p
  misc_feature (1)..(388): Homolog of NCBI NO: 15231039 NR Description: putative nuclear DNA-binding protein G2p
  misc_feature (3)..(390): Homolog of NCBI NO: 9652218 NR Description: putative DNA binding protein [Atriplex hortensis]
  misc_feature (1)..(393): Homolog of NCBI NO: 7447216 NR Description: probable DNA-binding protein GBP16 - rice
MSSDDEVREEKELDLSSNDVVTKYKAAAEILNNALKIVVSQCKPKVKIVDLCEKGDSFIREQTGNVYKNAKRKIERGIAFPTCVSVNDTVCHFSPLATDDAVLEENDMVKIDMGCHIDGFIAVVAHTHVITNGPVTGRAGDVLAAANTAAEVAMRLVRPGKKNKDVTEAIQKVAAAYDCKIVEGVLSHQLKQFVIDGNKVVLSVSNADTKVDDAEFEENEVYAIDIVTSTGEGKPKLLDEKQTTIYKRAVDKNYHLKMKASRFIFSEISQKFPIMPFTARALEEKRARLGLVECMNHELLQPYPVLHEKPGDLVAHIKFTVLLMPNGSDKITSHPLQELKPTKSIEDNAEIKAWLALGTKSKKKGGGKKKKGKKGDAAEADPMEEATNGATSQE

SEQ ID NO: 1958 - protein, 287 aa, Zea mays subsp. mays
  peptide (1)..(287): Ceres Seq. ID no. 12341471
  misc_feature (1)..(287): Homolog of NCBI NO: 13632817 NR Description: Proliferation-associated protein 2G4 (Cell cycle
  misc_feature (1)..(277): Homolog of NCBI NO: 26788026 NR Description: SI:dZ150I12.2 (novel protein similar to human
  misc_feature (1)..(283): Homolog of NCBI NO: 34862215 NR Description: similar to proliferation-associated protein 1
  misc_feature (1)..(283): Homolog of NCBI NO: 6755100 NR Description: proliferation-associated 2G4
  misc_feature (1)..(283): Homolog of NCBI NO: 34193902 NR Description: Proliferation-associated protein 1 [Danio rerio]
  misc_feature (1)..(281): Homolog of NCBI NO: 30693537 NR Description: nuclear DNA-binding protein G2p -related
  misc_feature (1)..(281): Homolog of NCBI NO: 13430628 NR Description: putative nuclear DNA-binding protein G2p
  misc_feature (1)..(281): Homolog of NCBI NO: 15231039 NR Description: putative nuclear DNA-binding protein G2p
  misc_feature (1)..(283): Homolog of NCBI NO: 9652218 NR Description: putative DNA binding protein [Atriplex hortensis]
  misc_feature (1)..(286): Homolog of NCBI NO: 7447216 NR Description: probable DNA-binding protein GBP16 - rice
MVKIDMGCHIDGFIAVVAHTHVITNGPVTGRAGDVLAAANTAAEVAMRLVRPGKKNKDVTEAIQKVAAAYDCKIVEGVLSHQLKQFVIDGNKVVLSVSNADTKVDDAEFEENEVYAIDIVTSTGEGKPKLLDEKQTTIYKRAVDKNYHLKMKASRFIFSEISQKFPIMPFTARALEEKRARLGLVECMNHELLQPYPVLHEKPGDLVAHIKFTVLLMPNGSDKITSHPLQELKPTKSIEDNAEIKAWLALGTKSKKKGGGKKKKGKKGDAAEADPMEEATNGATSQE

SEQ ID NO: 1959 - protein, 282 aa, Zea mays subsp. mays
  peptide (1)..(282): Ceres Seq. ID no. 12341472
  misc_feature (1)..(282): Homolog of NCBI NO: 13632817 NR Description: Proliferation-associated protein 2G4 (Cell cycle
  misc_feature (1)..(272): Homolog of NCBI NO: 26788026 NR Description: SI:dZ150I12.2 (novel protein similar to human
  misc_feature (1)..(278): Homolog of NCBI NO: 34862215 NR Description: similar to proliferation-associated protein 1
  misc_feature (1)..(278): Homolog of NCBI NO: 6755100 NR Description: proliferation-associated 2G4
  misc_feature (1)..(278): Homolog of NCBI NO: 34193902 NR Description: Proliferation-associated protein 1 [Danio rerio]
  misc_feature (1)..(276): Homolog of NCBI NO: 30693537 NR Description: nuclear DNA-binding protein G2p -related
  misc_feature (1)..(276): Homolog of NCBI NO: 13430628 NR Description: putative nuclear DNA-binding protein G2p
  misc_feature (1)..(276): Homolog of NCBI NO: 15231039 NR Description: putative nuclear DNA-binding protein G2p
  misc_feature (1)..(278): Homolog of NCBI NO: 9652218 NR Description: putative DNA binding protein [Atriplex hortensis]
  misc_feature (1)..(281): Homolog of NCBI NO: 7447216 NR Description: probable DNA-binding protein GBP16 - rice
MGCHIDGFIAVVAHTHVITNGPVTGRAGDVLAAANTAAEVAMRLVRPGKKNKDVTEAIQKVAAAYDCKIVEGVLSHQLKQFVIDGNKVVLSVSNADTKVDDAEFEENEVYAIDIVTSTGEGKPKLLDEKQTTIYKRAVDKNYHLKMKASRFIFSEISQKFPIMPFTARALEEKRARLGLVECMNHELLQPYPVLHEKPGDLVAHIKFTVLLMPNGSDKITSHPLQELKPTKSIEDNAEIKAWLALGTKSKKKGGGKKKKGKKGDAAEADPMEEATNGATSQE

SEQ ID NO: 1960 - DNA, 2031 bp, Zea mays subsp. mays
  misc_feature (1)..(2031): Ceres Seq. ID no. 12348893
  misc_feature: MA Experiment ID: 108527 Result: Up-regulated in Transcription
  misc_feature: MA Experiment 108527 PARAMETER Experiment Name: Zm_5mM_NO_P Parameter: Age (day) Value: 8
  misc_feature: MA Experiment 108527 PARAMETER Experiment Name: Zm_5mM_NO_P Parameter: Organism Value: Zea mays
  misc_feature: MA Experiment 108527 PARAMETER Experiment Name: Zm_5mM_NO_P Parameter: Plant Line Value: 35A19
  misc_feature: MA Experiment 108527 PARAMETER Experiment Name: Zm_5mM_NO_P Parameter: Timepoint (hr) Value: 6
  misc_feature: MA Experiment 108527 PARAMETER Experiment Name: Zm_5mM_NO_P Parameter: Tissue Value: Aerial
  misc_feature: MA Experiment 108527 PARAMETER Experiment Name: Zm_5mM_NO_P Parameter: Treatment Value: 5mM NO vs. No Treatment
  misc_feature: MA Experiment ID: 108534 Result: Up-regulated in Transcription
  misc_feature: MA Experiment 108534 PARAMETER Experiment Name: Zm_4deg_Cold_P Parameter: Age (hr) Value: 8
  misc_feature: MA Experiment 108534 PARAMETER Experiment Name: Zm_4deg_Cold_P Parameter: Organism Value: Zea mays
  misc_feature: MA Experiment 108534 PARAMETER Experiment Name: Zm_4deg_Cold_P Parameter: Plant Line Value: 35A19
  misc_feature: MA Experiment 108534 PARAMETER Experiment Name: Zm_4deg_Cold_P Parameter: Temperature (deg C) Value: 4 vs. 22
  misc_feature: MA Experiment 108534 PARAMETER Experiment Name: Zm_4deg_Cold_P Parameter: Timepoint (hr) Value: 6
  misc_feature: MA Experiment 108534 PARAMETER Experiment Name: Zm_4deg_Cold_P Parameter: Tissue Value: Aerial
  misc_feature: MA Experiment ID: 108544 Result: Up-regulated in Transcription
  misc_feature: MA Experiment ID: 108545 Result: Down-regulated in Transcription
  misc_feature: MA Experiment 108545 PARAMETER Experiment Name: Zm_Imbibed_Seeds_P Parameter: Age (day) Value: 3 vs. 2
  misc_feature: MA Experiment 108545 PARAMETER Experiment Name: Zm_Imbibed_Seeds_P Parameter: Organism Value: Zea mays
  misc_feature: MA Experiment 108545 PARAMETER Experiment Name: Zm_Imbibed_Seeds_P Parameter: Plant Line Value: 35A19
  misc_feature: MA Experiment 108545 PARAMETER Experiment Name: Zm_Imbibed_Seeds_P Parameter: Tissue Value: Aerial vs. Embryo
  misc_feature: MA Experiment ID: 108547 Result: Down-regulated in Transcription
  misc_feature: MA Experiment 108547 PARAMETER Experiment Name: Zm_Imbibed_Seeds_P Parameter: Age (day) Value: 4 vs. 2
  misc_feature: MA Experiment 108547 PARAMETER Experiment Name: Zm_Imbibed_Seeds_P Parameter: Organism Value: Zea mays
  misc_feature: MA Experiment 108547 PARAMETER Experiment Name: Zm_Imbibed_Seeds_P Parameter: Plant Line Value: 35A19
  misc_feature: MA Experiment 108547 PARAMETER Experiment Name: Zm_Imbibed_Seeds_P Parameter: Tissue Value: Aerial vs. Embryo
  misc_feature: MA Experiment ID: 108559 Result: Up-regulated in Transcription
  misc_feature: MA Experiment 108559 PARAMETER Experiment Name: Zm_5mM_NO_P Parameter: Age (day) Value: 8
  misc_feature: MA Experiment 108559 PARAMETER Experiment Name: Zm_5mM_NO_P Parameter: Organism Value: Zea mays
  misc_feature: MA Experiment 108559 PARAMETER Experiment Name: Zm_5mM_NO_P Parameter: Plant Line Value: 35A19
  misc_feature: MA Experiment 108559 PARAMETER Experiment Name: Zm_5mM_NO_P Parameter: Timepoint (hr) Value: 12
  misc_feature: MA Experiment 108559 PARAMETER Experiment Name: Zm_5mM_NO_P Parameter: Tissue Value: Aerial
  misc_feature: MA Experiment 108559 PARAMETER Experiment Name: Zm_5mM_NO_P Parameter: Treatment Value: 5mM NO vs. No Treatment
  misc_feature: MA Experiment ID: 108688 Result: Down-regulated in Transcription
  misc_feature: MA Experiment 108688 PARAMETER Experiment Name: Zm_Embryos-Flowers__P Parameter: Tissue Value: Immature Flowers vs. Aerial+
  misc_feature: MA Experiment ID: 20000626 Result: Up-regulated in Transcription
  misc_feature: MA Experiment 20000626 PARAMETER Experiment Name: Zm_Herbicide-Treatments_P Parameter: Timepoint (hr) Value: 12
  misc_feature: MA Experiment 20000626 PARAMETER Experiment Name: Zm_Herbicide-Treatments_P Parameter: Tissue Value: Aerial
  misc_feature: MA Experiment 20000626 PARAMETER Experiment Name: Zm_Herbicide-Treatments_P Parameter: Treatment Value: Roundup vs. No Treatment
atcaggcccacgctttgttaacaaagaattccctcatagccgccgccgccgccgccgccgccgctcatctcgccgagaggtgacgggaccgaggaactcgccgagttctaagatagagaatcgcttttcacagcctggggtctgctgcgtagggtggtgttgaaggggagaagtttaagatctgttccacagatcacgcgtgcgcgctcgcgaatcgggggttccacacatagcttcgtcgttttgaatttgatgtactaatggagtctaagggtggcaagaagtctagcagtagtcgttccatgatgtatgaagctccccttggctacagcattgaggacgttcgacctgccggaggcgcgaagaagttccagtctgctgcttactccaactgcgcaaagaagccatcctgatatcccttttggcttcctcgttctagtagtttaggatttcttttctgacacttcgattcttaccaatccccctggcctgctgctttcctgacaatcgaccagttccccagtcttgctccctgcagtcctccctcctccatctccagcgttgtgttctgactcacctgcaccaatggctgttctttctgctgctggtgctcccccggcctcagctatcgggtttgagggctatgagaagcgccttgagatcacattctctgaggcacctgtctttgtggacccccatggcagcggtttgcgtgccctctccaggtcccagattgactctgttctggatcttgcacggtgcacgatcgtgtccgagctctccaacaaggattttgactcctatgttctctccgagtcaagcttgttcatctatcctctgaagattgtcatcaagacctgtggcactaccaagctcctgctcacaattccaaggatcctagagcttgctgaagagctgtctatgcctcttgctgctgtgaagtactcccgcgggacgttcatctttcctggcgcacagccagccccccaccggagcttctccgaggaagttgctgtacttaaccgatactttgggggcctgaagtctggtggcaatgcttatgtgattggagatgcagcaagaccaggacagaagtggcacatctactacgccactgagtacccagagcaaccaatggtcaaccttgagatgtgcatgactggtctggacacgaagaaagcttcagtcttcttcaagactaatgctgatggcaacacaacatgtgccaaggaaatgacgaagctctctggtatctctgaaattatccctgagatggagatctgtgattttgacttcgaaccctgcggctactccatgaatgcaatccatggctctgcgttctccacgatccatgtgacgcctgaggatgggttcagctacgccagttatgaggttatgggcttggatgccactgccctgtcttacggtgaccttgtcaagagggtccttgggtgcttcggcccctcggaattttctgtcgccgtgaccatcttcggcgggcggggccaagctgggacatggggaaaggaacttggtgcggaggcttatgactgcaacaacatggtcgagcaggagctgcctggaggtgggatcctcatctaccagagcttctgtgctgctgaagacgccgttgctagctcgcccaaatccgttcttcgctgctttgatggcgagaatgcagcaccttttgcgaaggactgcaagctggctaatcttgtctgcttggaggaagttggatgctatcgaggagaaggatggagtgcttgatgagtaagacgggtttctggtgtcgatttgcttctgagtttttttctttttatatcgttgcgatctcgtggttgtcgtttggttagcagccaagccaggctattagtacgaagaatgtcgtctataaacatgtgttcctacgttgccacatgctgagtcaatctgtatacagctagctctaggtggtcagctgcgtctaccacaatgagcatacatgtatggataaatcttctgtgaaagcattcgatgaataagggttgttct

SEQ ID NO: 1961 - protein, 393 aa, Zea mays subsp. mays
  peptide (1)..(393): Ceres Seq. ID no. 12348894
  misc_feature (13)..(346): Pfam Name: Adenosylmethionine decarboxylase Pfam Description: Adenosylmethionine decarboxylase
  misc_feature (1)..(382): Homolog of NCBI NO: 3913427 NR Description: S-adenosylmethionine decarboxylase proenzyme
  misc_feature (1)..(378): Homolog of NCBI NO: 19855056 NR Description: S-adenosylmethionine decarboxylase proenzyme
  misc_feature (1)..(378): Homolog of NCBI NO: 3929545 NR Description: S-adenosylmethionine decarboxylase [Oryza sativa]
  misc_feature (9)..(390): Homolog of NCBI NO: 3913438 NR Description: S-adenosylmethionine decarboxylase proenzyme
  misc_feature (9)..(378): Homolog of NCBI NO: 4325045 NR Description: S-adenosylmethionine decarboxylase precursor
  misc_feature (1)..(378): Homolog of NCBI NO: 7436593 NR Description: adenosylmethionine decarboxylase homolog
  misc_feature (1)..(370): Homolog of NCBI NO: 6646868 NR Description: S-adenosylmethionine decarboxylase 2 [Oryza
  misc_feature (1)..(278): Homolog of NCBI NO: 10241685 NR Description: S-adenosylmethionine decarboxylase [Oryza sativa
  misc_feature (13)..(363): Homolog of NCBI NO: 28566348 NR Description: S-adenosylmethionine decarboxylase [Narcissus
  misc_feature (9)..(359): Homolog of NCBI NO: 31980105 NR Description: S-adenosylmethionine decarboxylase proenzyme
MAVLSAAGAPPASAIGFEGYEKRLEITFSEAPVFVDPHGSGLRALSRSQIDSVLDLARCTIVSELSNKDFDSYVLSESSLFIYPLKIVIKTCGTTKLLLTIPRILELAEELSMPLAAVKYSRGTFIFPGAQPAPHRSFSEEVAVLNRYFGGLKSGGNAYVIGDAARPGQKWHIYYATEYPEQPMVNLEMCMTGLDTKKASVFFKTNADGNTTCAKEMTKLSGISEIIPEMEICDFDFEPCGYSMNAIHGSAFSTIHVTPEDGFSYASYEVMGLDATALSYGDLVKRVLGCFGPSEFSVAVTIFGGRGQAGTWGKELGAEAYDCNNMVEQELPGGGILIYQSFCAAEDAVASSPKSVLRCFDGENAAPFAKDCKLANLVCLEEVGCYRGEGWSA

SEQ ID NO: 1962 - protein, 281 aa, Zea mays subsp. mays
  peptide (1)..(281): Ceres Seq. ID no. 12348895
  misc_feature (1)..(234): Pfam Name: Adenosylmethionine decarboxylase Pfam Description: Adenosylmethionine decarboxylase
  misc_feature (1)..(270): Homolog of NCBI NO: 3913427 NR Description: S-adenosylmethionine decarboxylase proenzyme
  misc_feature (1)..(266): Homolog of NCBI NO: 19855056 NR Description: S-adenosylmethionine decarboxylase proenzyme
  misc_feature (1)..(266): Homolog of NCBI NO: 3929545 NR Description: S-adenosylmethionine decarboxylase [Oryza sativa]
  misc_feature (1)..(278): Homolog of NCBI NO: 3913438 NR Description: S-adenosylmethionine decarboxylase proenzyme
  misc_feature (1)..(266): Homolog of NCBI NO: 4325045 NR Description: S-adenosylmethionine decarboxylase precursor
  misc_feature (1)..(266): Homolog of NCBI NO: 7436593 NR Description: adenosylmethionine decarboxylase homolog
  misc_feature (1)..(258): Homolog of NCBI NO: 6646868 NR Description: S-adenosylmethionine decarboxylase 2 [Oryza
  misc_feature (1)..(166): Homolog of NCBI NO: 10241685 NR Description: S-adenosylmethionine decarboxylase [Oryza sativa
  misc_feature (1)..(251): Homolog of NCBI NO: 28566348 NR Description: S-adenosylmethionine decarboxylase [Narcissus
  misc_feature (1)..(247): Homolog of NCBI NO: 31980105 NR Description: S-adenosylmethionine decarboxylase proenzyme
MPLAAVKYSRGTFIFPGAQPAPHRSFSEEVAVLNRYFGGLKSGGNAYVIGDAARPGQKWHIYYATEYPEQPMVNLEMCMTGLDTKKASVFFKTNADGNTTCAKEMTKLSGISEIIPEMEICDFDFEPCGYSMNAIHGSAFSTIHVTPEDGFSYASYEVMGLDATALSYGDLVKRVLGCFGPSEFSVAVTIFGGRGQAGTWGKELGAEAYDCNNMVEQELPGGGILIYQSFCAAEDAVASSPKSVLRCFDGENAAPFAKDCKLANLVCLEEVGCYRGEGWSA

SEQ ID NO: 1963 - protein, 210 aa, Zea mays subsp. mays
  peptide (1)..(210): Ceres Seq. ID no. 12348896
  misc_feature (1)..(163): Pfam Name: Adenosylmethionine decarboxylase Pfam Description: Adenosylmethionine decarboxylase
  misc_feature (1)..(199): Homolog of NCBI NO: 3913427 NR Description: S-adenosylmethionine decarboxylase proenzyme
  misc_feature (1)..(195): Homolog of NCBI NO: 19855056 NR Description: S-adenosylmethionine decarboxylase proenzyme
  misc_feature (1)..(195): Homolog of NCBI NO: 3929545 NR Description: S-adenosylmethionine decarboxylase [Oryza sativa]
  misc_feature (1)..(207): Homolog of NCBI NO: 3913438 NR Description: S-adenosylmethionine decarboxylase proenzyme
  misc_feature (1)..(195): Homolog of NCBI NO: 4325045 NR Description: S-adenosylmethionine decarboxylase precursor
  misc_feature (1)..(195): Homolog of NCBI NO: 7436593 NR Description: adenosylmethionine decarboxylase homolog
  misc_feature (1)..(187): Homolog of NCBI NO: 6646868 NR Description: S-adenosylmethionine decarboxylase 2 [Oryza
  misc_feature (1)..(95): Homolog of NCBI NO: 10241685 NR Description: S-adenosylmethionine decarboxylase [Oryza sativa
  misc_feature (1)..(180): Homolog of NCBI NO: 28566348 NR Description: S-adenosylmethionine decarboxylase [Narcissus
  misc_feature (1)..(176): Homolog of NCBI NO: 31980105 NR Description: S-adenosylmethionine decarboxylase proenzyme
MVNLEMCMTGLDTKKASVFFKTNADGNTTCAKEMTKLSGISEIIPEMEICDFDFEPCGYSMNAIHGSAFSTIHVTPEDGFSYASYEVMGLDATALSYGDLVKRVLGCFGPSEFSVAVTIFGGRGQAGTWGKELGAEAYDCNNMVEQELPGGGILIYQSFCAAEDAVASSPKSVLRCFDGENAAPFAKDCKLANLVCLEEVGCYRGEGWSA

SEQ ID NO: 1964 - DNA, 1078 bp, Zea mays subsp. mays
  misc_feature (1)..(1078): Ceres Seq. ID no. 12341568
  misc_feature: MA Experiment ID: 108536 Result: Down-regulated in Transcription
  misc_feature: MA Experiment 108536 PARAMETER Experiment Name: Zm_Meristem_P Parameter: Age (day) Value: 8
  misc_feature: MA Experiment 108536 PARAMETER Experiment Name: Zm_Meristem_P Parameter: Organism Value: Zea mays
  misc_feature: MA Experiment 108536 PARAMETER Experiment Name: Zm_Meristem_P Parameter: Plant Line Value: 35A19
  misc_feature: MA Experiment 108536 PARAMETER Experiment Name: Zm_Meristem_P Parameter: Tissue Value: Shoot Meristem vs. Above Shoot Meristem
  misc_feature: MA Experiment ID: 108545 Result: Up-regulated in Transcription
  misc_feature: MA Experiment 108545 PARAMETER Experiment Name: Zm_Imbibed_Seeds_P Parameter: Age (day) Value: 3 vs. 2
  misc_feature: MA Experiment 108545 PARAMETER Experiment Name: Zm_Imbibed_Seeds_P Parameter: Organism Value: Zea mays
  misc_feature: MA Experiment 108545 PARAMETER Experiment Name: Zm_Imbibed_Seeds_P Parameter: Plant Line Value: 35A19
  misc_feature: MA Experiment 108545 PARAMETER Experiment Name: Zm_Imbibed_Seeds_P Parameter: Tissue Value: Aerial vs. Embryo
  misc_feature: MA Experiment ID: 108559 Result: Down-regulated in Transcription
  misc_feature: MA Experiment 108559 PARAMETER Experiment Name: Zm_5mM_NO_P Parameter: Age (day) Value: 8
  misc_feature: MA Experiment 108559 PARAMETER Experiment Name: Zm_5mM_NO_P Parameter: Organism Value: Zea mays
  misc_feature: MA Experiment 108559 PARAMETER Experiment Name: Zm_5mM_NO_P Parameter: Plant Line Value: 35A19
  misc_feature: MA Experiment 108559 PARAMETER Experiment Name: Zm_5mM_NO_P Parameter: Timepoint (hr) Value: 12
  misc_feature: MA Experiment 108559 PARAMETER Experiment Name: Zm_5mM_NO_P Parameter: Tissue Value: Aerial
  misc_feature: MA Experiment 108559 PARAMETER Experiment Name: Zm_5mM_NO_P Parameter: Treatment Value: 5mM NO vs. No Treatment
  misc_feature: MA Experiment ID: 108687 Result: Down-regulated in Transcription
  misc_feature: MA Experiment 108687 PARAMETER Experiment Name: Zm_Embryos-Flowers__P Parameter: Tissue Value: Embryo vs. Aerial+
gtaccaggctataccagcatcagcgaagagccggcgttcttgagacttgagagaggagagcgaccgacgacctcgaagcttggcctgcgcggtggtgacgatggatgtcaaatgccggcgtctggaggggaaggtggccgtcgtgacggcgtccacgcaggggatcggcctagccatcgccgagcgcctcggcctggagggcgccgccgccgtcgtctcctcccgcaagcagaagaacgtggacgaggccgtggaggggctcaaggccaaggggatcaccgtggtgggcgccgtctgccacgtatccgacgcacagcaacgcaagaacatcatcgagacggccgtcaagaactttgggcacattgatattcttgtctccaacgctgctgcaaatcctactgtgaatgtcatacttgaaatgaaagaggttgttctcgataagttgtgggatattaacgtcaaggcttctattcttcttattcaggatgctgctccccacctacgggcagggtcatctgtgatccttatttcttcaattgctggttacaatcctgagcaaggattgacaatgtatggtgttacaaagaccgctctctttggtctcacaaaggctcttgctggtgagatgggacccgatattcgtgttaattgtatagcccctggttttgttccgacacggtttgctagtttcttcatagacaacgagaccattaggaaaaagcttaacgagaggactatgcttaagagattgggttccgtggaagatatggcggcagctgccgcattcctggcatctgacgatgcatcattcatcacagctgaaaccattgttgttgctggaggggtgccgtcgagattgtaaatttggctcaagtttgtaccgattgttactaggttggtgacatagcaactatactgtaataatccactctgaaaatgtgggtcgtgctaagttggccaccgttagatctaataattttttaggtgtcttggtatttgtttgagataataatctactcagattatctgtcacttagttcaaattttattggattatataatataaatagataatccc

SEQ ID NO: 1965 - protein, 253 aa, Zea mays subsp. mays
  peptide (1)..(253): Ceres Seq. ID no. 12341569
  misc_feature (8)..(253): Homolog of NCBI NO: 33337583 NR Description: Hep27-like protein [Homo sapiens]
  misc_feature (8)..(253): Homolog of NCBI NO: 4105190 NR Description: peroxisomal short-chain alcohol dehydrogenase
  misc_feature (8)..(253): Homolog of NCBI NO: 11559416 NR Description: NADPH-dependent retinol dehydrogenase/reductase
  misc_feature (6)..(253): Homolog of NCBI NO: 21355319 NR Description: CG10672-PA [Drosophila melanogaster]
  misc_feature (8)..(253): Homolog of NCBI NO: 7023407 NR Description: unnamed protein product [Homo sapiens]
  misc_feature (8)..(253): Homolog of NCBI NO: 32483357 NR Description: peroxisomal short-chain alcohol dehydrogenase
  misc_feature (8)..(253): Homolog of NCBI NO: 11559412 NR Description: NADPH-dependent retinol dehydrogenase/reductase
  misc_feature (6)..(253): Homolog of NCBI NO: 33991766 NR Description: Unknown (protein for MGC:65987) [Danio rerio]
  misc_feature (3)..(253): Homolog of NCBI NO: 31198899 NR Description: ENSANGP00000019038 [Anopheles gambiae]
  misc_feature (6)..(253): Homolog of NCBI NO: 18412959 NR Description: coded for by A. thaliana cDNA Z18000
MDVKCRRLEGKVAVVTASTQGIGLAIAERLGLEGAAAVVSSRKQKNVDEAVEGLKAKGITVVGAVCHVSDAQQRKNIIETAVKNFGHIDILVSNAAANPTVNVILEMKEVVLDKLWDINVKASILLIQDAAPHLRAGSSVILISSIAGYNPEQGLTMYGVTKTALFGLTKALAGEMGPDIRVNCIAPGFVPTRFASFFIDNETIRKKLNERTMLKRLGSVEDMAAAAAFLASDDASFITAETIVVAGGVPSRL

SEQ ID NO: 1966 - protein, 147 aa, Zea mays subsp. mays
  peptide (1)..(147): Ceres Seq. ID no. 12341570
  misc_feature (1)..(147): Homolog of NCBI NO: 33337583 NR Description: Hep27-like protein [Homo sapiens]
  misc_feature (1)..(147): Homolog of NCBI NO: 4105190 NR Description: peroxisomal short-chain alcohol dehydrogenase
  misc_feature (1)..(147): Homolog of NCBI NO: 11559416 NR Description: NADPH-dependent retinol dehydrogenase/reductase
  misc_feature (1)..(147): Homolog of NCBI NO: 21355319 NR Description: CG10672-PA [Drosophila melanogaster]
  misc_feature (1)..(147): Homolog of NCBI NO: 7023407 NR Description: unnamed protein product [Homo sapiens]
  misc_feature (1)..(147): Homolog of NCBI NO: 32483357 NR Description: peroxisomal short-chain alcohol dehydrogenase
  misc_feature (1)..(147): Homolog of NCBI NO: 11559412 NR Description: NADPH-dependent retinol dehydrogenase/reductase
  misc_feature (1)..(147): Homolog of NCBI NO: 33991766 NR Description: Unknown (protein for MGC:65987) [Danio rerio]
  misc_feature (1)..(147): Homolog of NCBI NO: 31198899 NR Description: ENSANGP00000019038 [Anopheles gambiae]
  misc_feature (1)..(147): Homolog of NCBI NO: 18412959 NR Description: coded for by A. thaliana cDNA Z18000
MKEVVLDKLWDINVKASILLIQDAAPHLRAGSSVILISSIAGYNPEQGLTMYGVTKTALFGLTKALAGEMGPDIRVNCIAPGFVPTRFASFFIDNETIRKKLNERTMLKRLGSVEDMAAAAAFLASDDASFITAETIVVAGGVPSRL

SEQ ID NO: 1967 - DNA, 1270 bp, Zea mays subsp. mays
  misc_feature (1)..(1270): Ceres Seq. ID no. 12410926
  misc_feature: MA Experiment ID: 108529 Result: Up-regulated in Transcription
  misc_feature: MA Experiment 108529 PARAMETER Experiment Name: Zm_Imbibed_Seeds_P Parameter: Age (day) Value: 5 vs. 2
  misc_feature: MA Experiment 108529 PARAMETER Experiment Name: Zm_Imbibed_Seeds_P Parameter: Organism Value: Zea mays
  misc_feature: MA Experiment 108529 PARAMETER Experiment Name: Zm_Imbibed_Seeds_P Parameter: Plant Line Value: 35A19
  misc_feature: MA Experiment 108529 PARAMETER Experiment Name: Zm_Imbibed_Seeds_P Parameter: Tissue Value: Roots vs. Embryo
  misc_feature: MA Experiment ID: 108535 Result: Down-regulated in Transcription
  misc_feature: MA Experiment 108535 PARAMETER Experiment Name: Zm_Meristem_P Parameter: Age (day) Value: 8
  misc_feature: MA Experiment 108535 PARAMETER Experiment Name: Zm_Meristem_P Parameter: Organism Value: Zea mays
  misc_feature: MA Experiment 108535 PARAMETER Experiment Name: Zm_Meristem_P Parameter: Plant Line Value: 35A19
  misc_feature: MA Experiment 108535 PARAMETER Experiment Name: Zm_Meristem_P Parameter: Tissue Value: Root Meristem vs. Above Root Meristem
  misc_feature: MA Experiment ID: 20000108 Result: Down-regulated in Transcription
  misc_feature: MA Experiment 20000108 PARAMETER Experiment Name: Zm_Root-Tips_P Parameter: Age (day) Value: 12
  misc_feature: MA Experiment 20000108 PARAMETER Experiment Name: Zm_Root-Tips_P Parameter: Organism Value: Zea mays
  misc_feature: MA Experiment 20000108 PARAMETER Experiment Name: Zm_Root-Tips_P Parameter: Tissue Value: Root tips vs. Root mid region    35
  misc_feature: MA Experiment 20000108 PARAMETER Experiment Name: Zm_Root-Tips_P Parameter: Tissue Value: Root tips vs. Root mid region   Sequence Listing-Misc Features (4)
agaaacccccttccttcccattcccactgctcggattgctttccccacctccaccgccaccagaccagatagcaagcaaccgacccctcctcgctgtattcgcagggaaggagaagatggagcctggccagagcgggactgagcaggcctctccacgcgggaacgattgggaggtcgtgcagctcaccgcgtccgcatacgccgccgcgcccgctccgaggaagcccgagccctccgacgaagcggaagctaagagatacggcgcaaagggggacgatctagccgccggcctactcatgtccggccacttctccgtgtctcagagcgaggtcgagagcctcctcgtaggcgccgacaccaaagaaccaccgcccaaggacaaggaggagccttgcgagcatactaagctgctggaggacgacgtccccaccatcccgttcgatgacggcaaggcgctgaaaggcatgggtctggtcggggaagagccggccgggttctcgtcgcctgtctacagctccatcacggagagcaggagtgacaagaggagcgaggagcctactactctgcatagtttgaaccccgtgactggctcaacaaaggtcgtctcacctgacgagcagagcgagcctgctgctgggtctgggtccgggtctgggtcaggcccgcgtgaagcgtggtggaagaagcagcttctctccctttacaggaacgccaaggagagcaagcatctctggcctatcgtcgccaccactgctgctttggtgggcctggcgtatctggggcggcgctggcataagggcaggctgcactttcagctgctcaagatatcgccgtctaccaacaacgagaaaatcagcgacgcggttggaccgttaaaccgcatcaacgacattctcgttgctggcaaccacccaagtcacggtgtccatgggcatgcccgtgcaggctgaatgcagtcagttcgcgaacccatcgggcgtcctggacccatatactatcatgtgtcgctttgagaatcggctcaagacaaaccatcgggcaggactggagtagttgtccaaggactgaggatgtttatgcagacacaagtatgtttggtggctcgatgtatgtgaattccaaaactccatctgggtatgtaaatatttgtatgggtttagtttggttgctttttcgtttggtcatctcatgaaacctctgctggtggtttccttgtctatattactgtcttatttggggttcgttcatgcatgcatacatgtgatggggc

SEQ ID NO: 1968 - protein, 315 aa, Zea mays subsp. mays
  peptide (1)..(315): Ceres Seq. ID no. 12410927
  misc_feature (43)..(140): Homolog of NCBI NO: 10241633 NR Description: hypothetical protein [Oryza sativa (indica
  misc_feature (55)..(285): Homolog of NCBI NO: 7485264 NR Description: hypothetical protein A_IG005I10.20 - Arabidopsis
  misc_feature (61)..(302): Homolog of NCBI NO: 21553358 NR Description: unknown [Arabidopsis thaliana]
  misc_feature (61)..(302): Homolog of NCBI NO: 18406940 NR Description: expressed protein
  misc_feature (15)..(274): Homolog of NCBI NO: 1808686 NR Description: hypothetical protein [Sporobolus stapfianus]
  misc_feature (47)..(285): Homolog of NCBI NO: 30678620 NR Description: expressed protein [Arabidopsis thaliana]
  misc_feature (43)..(274): Homolog of NCBI NO: 38346457 NR Description: OSJNBa0019G23.5 [Oryza sativa (japonica
  misc_feature (47)..(313): Homolog of NCBI NO: 18411306 NR Description: Expressed protein
KPPSFPFPLLGLLSPPPPPPDQIASNRPLLAVFAGKEKMEPGQSGTEQASPRGNDWEVVQLTASAYAAAPAPRKPEPSDEAEAKRYGAKGDDLAAGLLMSGHFSVSQSEVESLLVGADTKEPPPKDKEEPCEHTKLLEDDVPTIPFDDGKALKGMGLVGEEPAGFSSPVYSSITESRSDKRSEEPTTLHSLNPVTGSTKVVSPDEQSEPAAGSGSGSGSGPREAWWKKQLLSLYRNAKESKHLWPIVATTAALVGLAYLGRRWHKGRLHFQLLKISPSTNNEKISDAVGPLNRINDILVAGNHPSHGVHGHARAG

SEQ ID NO: 1969 - protein, 277 aa, Zea mays subsp. mays
  peptide (1)..(277): Ceres Seq. ID no. 12410928
  misc_feature (5)..(102): Homolog of NCBI NO: 10241633 NR Description: hypothetical protein [Oryza sativa (indica
  misc_feature (17)..(247): Homolog of NCBI NO: 7485264 NR Description: hypothetical protein A_IG005I10.20 - Arabidopsis
  misc_feature (23)..(264): Homolog of NCBI NO: 21553358 NR Description: unknown [Arabidopsis thaliana]
  misc_feature (23)..(264): Homolog of NCBI NO: 18406940 NR Description: expressed protein
  misc_feature (1)..(236): Homolog of NCBI NO: 1808686 NR Description: hypothetical protein [Sporobolus stapfianus]
  misc_feature (9)..(247): Homolog of NCBI NO: 30678620 NR Description: expressed protein [Arabidopsis thaliana]
  misc_feature (5)..(236): Homolog of NCBI NO: 38346457 NR Description: OSJNBa0019G23.5 [Oryza sativa (japonica
  misc_feature (9)..(275): Homolog of NCBI NO: 18411306 NR Description: Expressed protein
MEPGQSGTEQASPRGNDWEVVQLTASAYAAAPAPRKPEPSDEAEAKRYGAKGDDLAAGLLMSGHFSVSQSEVESLLVGADTKEPPPKDKEEPCEHTKLLEDDVPTIPFDDGKALKGMGLVGEEPAGFSSPVYSSITESRSDKRSEEPTTLHSLNPVTGSTKVVSPDEQSEPAAGSGSGSGSGPREAWWKKQLLSLYRNAKESKHLWPIVATTAALVGLAYLGRRWHKGRLHFQLLKISPSTNNEKISDAVGPLNRINDILVAGNHPSHGVHGHARAG

SEQ ID NO: 1970 - protein, 217 aa, Zea mays subsp. mays
  peptide (1)..(217): Ceres Seq. ID no. 12410929
  misc_feature (1)..(42): Homolog of NCBI NO: 10241633 NR Description: hypothetical protein [Oryza sativa (indica
  misc_feature (1)..(187): Homolog of NCBI NO: 7485264 NR Description: hypothetical protein A_IG005I10.20 - Arabidopsis
  misc_feature (1)..(204): Homolog of NCBI NO: 21553358 NR Description: unknown [Arabidopsis thaliana]
  misc_feature (1)..(204): Homolog of NCBI NO: 18406940 NR Description: expressed protein
  misc_feature (1)..(176): Homolog of NCBI NO: 1808686 NR Description: hypothetical protein [Sporobolus stapfianus]
  misc_feature (1)..(187): Homolog of NCBI NO: 30678620 NR Description: expressed protein [Arabidopsis thaliana]
  misc_feature (1)..(176): Homolog of NCBI NO: 38346457 NR Description: OSJNBa0019G23.5 [Oryza sativa (japonica
  misc_feature (1)..(215): Homolog of NCBI NO: 18411306 NR Description: Expressed protein
MSGHFSVSQSEVESLLVGADTKEPPPKDKEEPCEHTKLLEDDVPTIPFDDGKALKGMGLVGEEPAGFSSPVYSSITESRSDKRSEEPTTLHSLNPVTGSTKVVSPDEQSEPAAGSGSGSGSGPREAWWKKQLLSLYRNAKESKHLWPIVATTAALVGLAYLGRRWHKGRLHFQLLKISPSTNNEKISDAVGPLNRINDILVAGNHPSHGVHGHARAG

SEQ ID NO: 1971 - DNA, 700 bp, Zea mays subsp. mays
  misc_feature (1)..(700): Ceres Seq. ID no. 13494781
  misc_feature: MA Experiment ID: 20000478 Result: Up-regulated in Transcription
  misc_feature: MA Experiment 20000478 PARAMETER Experiment Name: Zm_5mM_SA_P Parameter: Age (day) Value: 11
  misc_feature: MA Experiment 20000478 PARAMETER Experiment Name: Zm_5mM_SA_P Parameter: Organism Value: Zea mays
  misc_feature: MA Experiment 20000478 PARAMETER Experiment Name: Zm_5mM_SA_P Parameter: Plant Line Value: 35A19
  misc_feature: MA Experiment 20000478 PARAMETER Experiment Name: Zm_5mM_SA_P Parameter: Timepoint (hr) Value: 72
  misc_feature: MA Experiment 20000478 PARAMETER Experiment Name: Zm_5mM_SA_P Parameter: Tissue Value: Aerial
  misc_feature: MA Experiment 20000478 PARAMETER Experiment Name: Zm_5mM_SA_P Parameter: Treatment Value: 5mM SA vs. No Treatment
  misc_feature: MA Experiment ID: 20000480 Result: Up-regulated in Transcription
  misc_feature: MA Experiment 20000480 PARAMETER Experiment Name: Zm_Drought_P Parameter: Age (day) Value: 11
  misc_feature: MA Experiment 20000480 PARAMETER Experiment Name: Zm_Drought_P Parameter: Organism Value: Zea mays
  misc_feature: MA Experiment 20000480 PARAMETER Experiment Name: Zm_Drought_P Parameter: Plant Line Value: 35A19
  misc_feature: MA Experiment 20000480 PARAMETER Experiment Name: Zm_Drought_P Parameter: Timepoint (hr) Value: 72
  misc_feature: MA Experiment 20000480 PARAMETER Experiment Name: Zm_Drought_P Parameter: Tissue Value: Aerial
  misc_feature: MA Experiment 20000480 PARAMETER Experiment Name: Zm_Drought_P Parameter: Treatment Value: Drought vs. No Drought
gatcagcgaacggaagaccgtggaagcaaagaggcgcaagcgagcacggaacaaatacaccttcaggtggcctccctccgactgccgactgaatcttccacctcgcttcgcgcctccggctccgcgccgggcccgcataatctgtgctcgggatcgcctcttcccgcggcaaatgggggccgactccgaggacgccgtcaagcagctcagcctcctcatggagcaagtggaggccccgctgaagagatcgtttcagaatatgcaccagggctatcctaaagaaacactggtgcgtttccttaaggctagagagtggaatgtagcaaaggctcataaaatgattgtagaatgtttgaattggaggattcaaaatgaaattgatagtgtgctagagaggcctatagtcccagtagatttatacaggtcaatacgtgattcacaacttattggcctgtcaggatacacaaaggagggtctcccaatttttggcattggtgttggacatagcacatatgacaaagcttcggtccactactatgtgcaatctcatatccagattaacgagtaccgtgatcgtataattttgcctaggctgacacaacagtttgggcggcctgttaccagctgtataaaagtgctggatatgactggtttgaagctatcagcactaagccaaataaagatgttgacttccatatcg

SEQ ID NO: 1972 - protein, 233 aa, Zea mays subsp. mays
  peptide (1)..(233): Ceres Seq. ID no. 13494782
  misc_feature (59)..(126): Pfam Name: CRAL/TRIO, N-terminus Pfam Description: CRAL/TRIO, N-terminus
ISERKTVEAKRRKRARNKYTFRWPPSDCRLNLPPRFAPPAPRRARIICARDRLFPRQMGADSEDAVKQLSLLMEQVEAPLKRSFQNMHQGYPKETLVRFLKAREWNVAKAHKMIVECLNWRIQNEIDSVLERPIVPVDLYRSIRDSQLIGLSGYTKEGLPIFGIGVGHSTYDKASVHYYVQSHIQINEYRDRIILPRLTQQFGRPVTSCIKVLDMTGLKLSALSQIKMLTSIS

SEQ ID NO: 1973 - protein, 176 aa, Zea mays subsp. mays
  peptide (1)..(176): Ceres Seq. ID no. 13494783
  misc_feature (2)..(69): Pfam Name: CRAL/TRIO, N-terminus Pfam Description: CRAL/TRIO, N-terminus
MGADSEDAVKQLSLLMEQVEAPLKRSFQNMHQGYPKETLVRFLKAREWNVAKAHKMIVECLNWRIQNEIDSVLERPIVPVDLYRSIRDSQLIGLSGYTKEGLPIFGIGVGHSTYDKASVHYYVQSHIQINEYRDRIILPRLTQQFGRPVTSCIKVLDMTGLKLSALSQIKMLTSIS

SEQ ID NO: 1974 - protein, 161 aa, Zea mays subsp. mays
  peptide (1)..(161): Ceres Seq. ID no. 13494784
  misc_feature (1)..(54): Pfam Name: CRAL/TRIO, N-terminus Pfam Description: CRAL/TRIO, N-terminus
MEQVEAPLKRSFQNMHQGYPKETLVRFLKAREWNVAKAHKMIVECLNWRIQNEIDSVLERPIVPVDLYRSIRDSQLIGLSGYTKEGLPIFGIGVGHSTYDKASVHYYVQSHIQINEYRDRIILPRLTQQFGRPVTSCIKVLDMTGLKLSALSQIKMLTSIS

SEQ ID NO: 1975 - DNA, 1185 bp, Zea mays subsp. mays
  misc_feature (1)..(1185): Ceres Seq. ID no. 12588534
  misc_feature: MA Experiment ID: 108522 Result: Down-regulated in Transcription
  misc_feature: MA Experiment 108522 PARAMETER Experiment Name: Zm_42deg_Heat_P Parameter: Age (day) Value: 8
  misc_feature: MA Experiment 108522 PARAMETER Experiment Name: Zm_42deg_Heat_P Parameter: Organism Value: Zea mays
  misc_feature: MA Experiment 108522 PARAMETER Experiment Name: Zm_42deg_Heat_P Parameter: Plant Line Value: 35A19
  misc_feature: MA Experiment 108522 PARAMETER Experiment Name: Zm_42deg_Heat_P Parameter: Temperature (deg C) Value: 42 vs. 22
  misc_feature: MA Experiment 108522 PARAMETER Experiment Name: Zm_42deg_Heat_P Parameter: Timepoint (hr) Value: 1
  misc_feature: MA Experiment 108522 PARAMETER Experiment Name: Zm_42deg_Heat_P Parameter: Tissue Value: Aerial
  misc_feature: MA Experiment ID: 108535 Result: Down-regulated in Transcription
  misc_feature: MA Experiment 108535 PARAMETER Experiment Name: Zm_Meristem_P Parameter: Age (day) Value: 8
  misc_feature: MA Experiment 108535 PARAMETER Experiment Name: Zm_Meristem_P Parameter: Organism Value: Zea mays
  misc_feature: MA Experiment 108535 PARAMETER Experiment Name: Zm_Meristem_P Parameter: Plant Line Value: 35A19
  misc_feature: MA Experiment 108535 PARAMETER Experiment Name: Zm_Meristem_P Parameter: Tissue Value: Root Meristem vs. Above Root Meristem
  misc_feature: MA Experiment ID: 108556 Result: Down-regulated in Transcription
  misc_feature: MA Experiment 108556 PARAMETER Experiment Name: Zm_Drought_P Parameter: Age (day) Value: 9
  misc_feature: MA Experiment 108556 PARAMETER Experiment Name: Zm_Drought_P Parameter: Organism Value: Zea mays
  misc_feature: MA Experiment 108556 PARAMETER Experiment Name: Zm_Drought_P Parameter: Plant Line Value: 35A19
  misc_feature: MA Experiment 108556 PARAMETER Experiment Name: Zm_Drought_P Parameter: Timepoint (hr) Value: 24
  misc_feature: MA Experiment 108556 PARAMETER Experiment Name: Zm_Drought_P Parameter: Tissue Value: Aerial
  misc_feature: MA Experiment 108556 PARAMETER Experiment Name: Zm_Drought_P Parameter: Treatment Value: Drought vs. No Drought
  misc_feature: MA Experiment ID: 108687 Result: Down-regulated in Transcription
  misc_feature: MA Experiment 108687 PARAMETER Experiment Name: Zm_Embryos-Flowers__P Parameter: Tissue Value: Embryo vs. Aerial+
  misc_feature: MA Experiment ID: 20000480 Result: Down-regulated in Transcription
  misc_feature: MA Experiment 20000480 PARAMETER Experiment Name: Zm_Drought_P Parameter: Age (day) Value: 11
  misc_feature: MA Experiment 20000480 PARAMETER Experiment Name: Zm_Drought_P Parameter: Organism Value: Zea mays
  misc_feature: MA Experiment 20000480 PARAMETER Experiment Name: Zm_Drought_P Parameter: Plant Line Value: 35A19
  misc_feature: MA Experiment 20000480 PARAMETER Experiment Name: Zm_Drought_P Parameter: Timepoint (hr) Value: 72
  misc_feature: MA Experiment 20000480 PARAMETER Experiment Name: Zm_Drought_P Parameter: Tissue Value: Aerial
  misc_feature: MA Experiment 20000480 PARAMETER Experiment Name: Zm_Drought_P Parameter: Treatment Value: Drought vs. No Drought
  misc_feature: MA Experiment ID: 20000492 Result: Down-regulated in Transcription
  misc_feature: MA Experiment 20000492 PARAMETER Experiment Name: Zm_Hybrid_Seed_Dev_P Parameter: DAP Value: 12
  misc_feature: MA Experiment 20000492 PARAMETER Experiment Name: Zm_Hybrid_Seed_Dev_P Parameter: Organism Value: Zea mays
  misc_feature: MA Experiment 20000492 PARAMETER Experiment Name: Zm_Hybrid_Seed_Dev_P Parameter: Plant Line Value: 35A19
  misc_feature: MA Experiment 20000492 PARAMETER Experiment Name: Zm_Hybrid_Seed_Dev_P Parameter: Tissue Value: Fert Kernel vs. Unfert Floret
  misc_feature: MA Experiment ID: 20000535 Result: Down-regulated in Transcription
  misc_feature: MA Experiment 20000535 PARAMETER Experiment Name: Zm_Hybrid_Seed_Dev_P Parameter: DAP Value: 30 vs. 12
  misc_feature: MA Experiment 20000535 PARAMETER Experiment Name: Zm_Hybrid_Seed_Dev_P Parameter: Organism Value: Zea mays
  misc_feature: MA Experiment 20000535 PARAMETER Experiment Name: Zm_Hybrid_Seed_Dev_P Parameter: Plant Line Value: 35A19
  misc_feature: MA Experiment 20000535 PARAMETER Experiment Name: Zm_Hybrid_Seed_Dev_P Parameter: Tissue Value: Embryo vs. Unfert Floret
catcgcgagcacccacccacctttgcttgcacggcccgcccattcaccggttgaggggagaagggagaggagaggtagctcagtcctcctctgaccgccgacccatccgccatggccgcctcctacgaccgcgagttctggaacttcagcgaccagctgcgcctgcacaacaacttctccaacctctccatcgccgaccctatctggtcctccaccacactggatcctccctcctccttcagcgacgccccgggcctcataggatccgccaagctcgcctttggcaacgccaccacggccaacgccgaccgctacaacgccaacgccgccggtgtcgccagcaagagcatgagcgtgggcatgatcgaccactacctcaacaagaacactaacaacgacgtcgtcaagagctacttcaacaagtccgtcggcagcaggccggccaacaacaacaccaccacaaccgtcaagaagaactccgccgcccaccacgacaagaagcacaagaactccggcaacggcgccggcgtcgacaagaggttcaagagcctgccggcggcggaggcgctgcccaggggcgaggccatcggcggctacatcttcgtctgcaacaacgacaccatggaggagaacctcaagaggcggctcttcgggctgccgtccaggtacagggattctgtgagggccatcaggcccggcctgcccctcttcctctacaactactccacccaccagctccacggcatctttgaggctgcaagcttcggaggatccaacatcgatccagcagcttgggaggacaagaagtgccccggcgagtcccgcttccctgctcaggtgagggttgcaacgcgcaagatctgttcgccgctggaggaggacgctttccgccccatcctccaccactacgacggccccaagttcaggctggagctcagtgtccctgaggcgctctcccttcttgatatatttgcggagaagatttttgacagacagacagcctgatgtctccatacttgcttccagttccagaggagtagtacatgtataatataaatataatatgctgattaccgacatctgattatctattctagtataagttacactcgaacttaggccctctttggaattatagtatttttatagttttaaaacaatactatgttatttggngatactata

SEQ ID NO: 1976 - protein, 297 aa, Zea mays subsp. mays
  peptide (1)..(297): Ceres Seq. ID no. 12588535
  misc_feature (139)..(287): Homolog of NCBI NO: 34896110 NR Description: P0701D05.9 [Oryza sativa (japonica
  misc_feature (171)..(255): Homolog of NCBI NO: 7488804 NR Description: gda-1 protein - garden pea
  misc_feature (92)..(286): Homolog of NCBI NO: 21592623 NR Description: gda-1, putative [Arabidopsis thaliana]
  misc_feature (92)..(286): Homolog of NCBI NO: 15232081 NR Description: gda-1, putative
  misc_feature (59)..(286): Homolog of NCBI NO: 2369766 NR Description: hypothetical protein [Citrus x paradisi]
  misc_feature (89)..(286): Homolog of NCBI NO: 21665866 NR Description: GDA2 protein [Pisum sativum]
  misc_feature (120)..(290): Homolog of NCBI NO: 9757950 NR Description: gene_id:MJC20.15~similar to unknown
  misc_feature (121)..(289): Homolog of NCBI NO: 584825 NR Description: B2 PROTEIN
  misc_feature (10)..(290): Homolog of NCBI NO: 18422167 NR Description: putative protein
  misc_feature (56)..(290): Homolog of NCBI NO: 34913876 NR Description: B1156H12.22 [Oryza sativa (japonica
MAASYDREFWNFSDQLRLHNNFSNLSIADPIWSSTTLDPPSSFSDAPGLIGSAKLAFGNATTANADRYNANAAGVASKSMSVGMIDHYLNKNTNNDVVKSYFNKSVGSRPANNNTTTTVKKNSAAHHDKKHKNSGNGAGVDKRFKSLPAAEALPRGEAIGGYIFVCNNDTMEENLKRRLFGLPSRYRDSVRAIRPGLPLFLYNYSTHQLHGIFEAASFGGSNIDPAAWEDKKCPGESRFPAQVRVATRKICSPLEEDAFRPILHHYDGPKFRLELSVPEALSLLDIFAEKIFDRQTA

SEQ ID NO: 1977 - protein, 218 aa, Zea mays subsp. mays
  peptide (1)..(218): Ceres Seq. ID no. 12588536
  misc_feature (60)..(208): Homolog of NCBI NO: 34896110 NR Description: P0701D05.9 [Oryza sativa (japonica
  misc_feature (92)..(176): Homolog of NCBI NO: 7488804 NR Description: gda-1 protein - garden pea
  misc_feature (13)..(207): Homolog of NCBI NO: 21592623 NR Description: gda-1, putative [Arabidopsis thaliana]
  misc_feature (13)..(207): Homolog of NCBI NO: 15232081 NR Description: gda-1, putative
  misc_feature (1)..(207): Homolog of NCBI NO: 2369766 NR Description: hypothetical protein [Citrus x paradisi]
  misc_feature (10)..(207): Homolog of NCBI NO: 21665866 NR Description: GDA2 protein [Pisum sativum]
  misc_feature (41)..(211): Homolog of NCBI NO: 9757950 NR Description: gene_id:MJC20.15~similar to unknown
  misc_feature (42)..(210): Homolog of NCBI NO: 584825 NR Description: B2 PROTEIN
  misc_feature (1)..(211): Homolog of NCBI NO: 18422167 NR Description: putative protein
  misc_feature (1)..(211): Homolog of NCBI NO: 34913876 NR Description: B1156H12.22 [Oryza sativa (japonica
MSVGMIDHYLNKNTNNDVVKSYFNKSVGSRPANNNTTTTVKKNSAAHHDKKHKNSGNGAGVDKRFKSLPAAEALPRGEAIGGYIFVCNNDTMEENLKRRLFGLPSRYRDSVRAIRPGLPLFLYNYSTHQLHGIFEAASFGGSNIDPAAWEDKKCPGESRFPAQVRVATRKICSPLEEDAFRPILHHYDGPKFRLELSVPEALSLLDIFAEKIFDRQTA

SEQ ID NO: 1978 - protein, 214 aa, Zea mays subsp. mays
  peptide (1)..(214): Ceres Seq. ID no. 12588537
  misc_feature (56)..(204): Homolog of NCBI NO: 34896110 NR Description: P0701D05.9 [Oryza sativa (japonica
  misc_feature (88)..(172): Homolog of NCBI NO: 7488804 NR Description: gda-1 protein - garden pea
  misc_feature (9)..(203): Homolog of NCBI NO: 21592623 NR Description: gda-1, putative [Arabidopsis thaliana]
  misc_feature (9)..(203): Homolog of NCBI NO: 15232081 NR Description: gda-1, putative
  misc_feature (1)..(203): Homolog of NCBI NO: 2369766 NR Description: hypothetical protein [Citrus x paradisi]
  misc_feature (6)..(203): Homolog of NCBI NO: 21665866 NR Description: GDA2 protein [Pisum sativum]
  misc_feature (37)..(207): Homolog of NCBI NO: 9757950 NR Description: gene_id:MJC20.15~similar to unknown
  misc_feature (38)..(206): Homolog of NCBI NO: 584825 NR Description: B2 PROTEIN
  misc_feature (1)..(207): Homolog of NCBI NO: 18422167 NR Description: putative protein
  misc_feature (1)..(207): Homolog of NCBI NO: 34913876 NR Description: B1156H12.22 [Oryza sativa (japonica
MIDHYLNKNTNNDVVKSYFNKSVGSRPANNNTTTTVKKNSAAHHDKKHKNSGNGAGVDKRFKSLPAAEALPRGEAIGGYIFVCNNDTMEENLKRRLFGLPSRYRDSVRAIRPGLPLFLYNYSTHQLHGIFEAASFGGSNIDPAAWEDKKCPGESRFPAQVRVATRKICSPLEEDAFRPILHHYDGPKFRLELSVPEALSLLDIFAEKIFDRQTA

SEQ ID NO: 1979 - DNA, 1728 bp, Zea mays subsp. mays
  misc_feature (1)..(1728): Ceres Seq. ID no. 12367331
  misc_feature: MA Experiment ID: 108535 Result: Up-regulated in Transcription
  misc_feature: MA Experiment 108535 PARAMETER Experiment Name: Zm_Meristem_P Parameter: Age (day) Value: 8
  misc_feature: MA Experiment 108535 PARAMETER Experiment Name: Zm_Meristem_P Parameter: Organism Value: Zea mays
  misc_feature: MA Experiment 108535 PARAMETER Experiment Name: Zm_Meristem_P Parameter: Plant Line Value: 35A19
  misc_feature: MA Experiment 108535 PARAMETER Experiment Name: Zm_Meristem_P Parameter: Tissue Value: Root Meristem vs. Above Root Meristem
  misc_feature: MA Experiment ID: 108556 Result: Down-regulated in Transcription
  misc_feature: MA Experiment 108556 PARAMETER Experiment Name: Zm_Drought_P Parameter: Age (day) Value: 9
  misc_feature: MA Experiment 108556 PARAMETER Experiment Name: Zm_Drought_P Parameter: Organism Value: Zea mays
  misc_feature: MA Experiment 108556 PARAMETER Experiment Name: Zm_Drought_P Parameter: Plant Line Value: 35A19
  misc_feature: MA Experiment 108556 PARAMETER Experiment Name: Zm_Drought_P Parameter: Timepoint (hr) Value: 24
  misc_feature: MA Experiment 108556 PARAMETER Experiment Name: Zm_Drought_P Parameter: Tissue Value: Aerial
  misc_feature: MA Experiment 108556 PARAMETER Experiment Name: Zm_Drought_P Parameter: Treatment Value: Drought vs. No Drought
  misc_feature: MA Experiment ID: 20000108 Result: Up-regulated in Transcription
  misc_feature: MA Experiment 20000108 PARAMETER Experiment Name: Zm_Root-Tips_P Parameter: Age (day) Value: 12
  misc_feature: MA Experiment 20000108 PARAMETER Experiment Name: Zm_Root-Tips_P Parameter: Organism Value: Zea mays
  misc_feature: MA Experiment 20000108 PARAMETER Experiment Name: Zm_Root-Tips_P Parameter: Tissue Value: Root tips vs. Root mid region    35
  misc_feature: MA Experiment 20000108 PARAMETER Experiment Name: Zm_Root-Tips_P Parameter: Tissue Value: Root tips vs. Root mid region   Sequence Listing-Misc Features (4)
ccaatcggacggcctagacggctcccttcctctccttgccacacttgcgctcctcttcgagactccgagttgtcgtctccgtcgctgctggctgctgcgccactcccccagccccgagatctgctcaacaatggcgacgcggcgccacatcctcctcctcgccgctgccttcgtgtcccttctcgcgctcgaggctgtggagggcctcgaagaggggccccgcgggcgccggctgctggtcctgctggacgacctggccgtgcggtcgtcgcactcggccttcttcggctcgctccaggcgcgcgggttcgatctcgaattccgcctcgccgacgaccccaagctctcgctgcaccgctacggccagtacctctacgatggcctcgtgctgttcgccccctccaccccacgttttggtggatcagtggaccagaacgcagtccttgaatttattgatgctgggcatgatatgatcctggcggcagattcctctgcctctgatcttattcgtggcattgcgacagagtgtggggttgattttgatgaggatccagaggcaatggttattgaccacattaactatgccgctatggatgttgaaggcgatcacaccttgattgttggtgatgatcttattcaatcagatgtcatactggggtctaaaaagattgaggctcctgtattatttcgtggaattggacacacggctaatccatcaaacagtttggttctgaaagtcctatctgcctctccatcagcatactcagctaacccaaagactaagttattgttgcctccatcgcttactgggtcagctatatcactggtttcggttatgcaggcaagaaataatgctcgggtgctgctatctggatcacttgatctttttagcaaccggttcctgaagtctggtgttcaaaaggctggtagcaaaacgagatacgagagagctggaaatgagcaatttgtgacagagacaagcaaatgggtcttccatgagagggggcaccttaaggctgttaatgttaagcaccacaaggttggggagaccaatgaaccaggcatgtaccgcattaacgatgacctggaatactctgttgagatctatgaatggtctggaacaagctggaagccatatgttgctgatgatgtgcaactccagtttttcatgatgagtccttatgttctgaaaactatgtcgaatgacaacaagggtttatactcaacatccttcaaagttcctgatgtctacggagttttccagttcaaagttgagtaccagaggctgggatatactggtttgtcttttacaaagcagattccagtgcgcccttacaggcataacgagtatgagaggttcataacatcagcgtacccatactacactgcctcattttcaacgatgtgtgctttcttcatattctcgcttgtgtacctgtaccacaaataaaggactcacgggagcgcacaagtttctggaggctgctgatgcgacctagatctgtggccaagtgttacccggtgcaattttatggaatcatatatttgtagtaggccaacttagctagaattagacgaccgtgaccgcaatcatgggaaatttactcgtgctagtaggatgttcgatctgccccacaattttttgttttcggatccttctgatcagcacttgtgaaaacgtttacagtctgtagcattgaaaggatgatgaagcatgtagtgattttg

SEQ ID NO: 1980 - protein, 482 aa, Zea mays subsp. mays
  peptide (1)..(482): Ceres Seq. ID no. 12367332
  misc_feature (53)..(482): Pfam Name: Dolichyl-diphosphooligosaccharide-protein Pfam Description: Dolichyl-diphosphooligosaccharide-protein
  misc_feature (45)..(482): Homolog of NCBI NO: 38175467 NR Description: putative dolichyl-di-phosphooligosaccharide-
  misc_feature (75)..(482): Homolog of NCBI NO: 2662375 NR Description: oligosaccharyltransferase [Homo sapiens]
  misc_feature (75)..(482): Homolog of NCBI NO: 30584753 NR Description: Homo sapiens
  misc_feature (75)..(482): Homolog of NCBI NO: 21104416 NR Description: dolichyl-diphosphooligosaccharide-protein
  misc_feature (75)..(482): Homolog of NCBI NO: 20070197 NR Description: dolichyl-diphosphooligosaccharide-protein
  misc_feature (75)..(482): Homolog of NCBI NO: 627424 NR Description: dolichyl-diphosphooligosaccharide-protein
  misc_feature (53)..(482): Homolog of NCBI NO: 8843726 NR Description: dolichyl-di-phosphooligosaccharide-protein
  misc_feature (53)..(482): Homolog of NCBI NO: 14334506 NR Description: putative
  misc_feature (53)..(482): Homolog of NCBI NO: 21553942 NR Description: dolichyl-di-phosphooligosaccharide-protein
  misc_feature (53)..(482): Homolog of NCBI NO: 18425101 NR Description: dolichyl-di-phosphooligosaccharide-protein
QSDGLDGSLPLLATLALLFETPSCRLRRCWLLRHSPSPEICSTMATRRHILLLAAAFVSLLALEAVEGLEEGPRGRRLLVLLDDLAVRSSHSAFFGSLQARGFDLEFRLADDPKLSLHRYGQYLYDGLVLFAPSTPRFGGSVDQNAVLEFIDAGHDMILAADSSASDLIRGIATECGVDFDEDPEAMVIDHINYAAMDVEGDHTLIVGDDLIQSDVILGSKKIEAPVLFRGIGHTANPSNSLVLKVLSASPSAYSANPKTKLLLPPSLTGSAISLVSVMQARNNARVLLSGSLDLFSNRFLKSGVQKAGSKTRYERAGNEQFVTETSKWVFHERGHLKAVNVKHHKVGETNEPGMYRINDDLEYSVEIYEWSGTSWKPYVADDVQLQFFMMSPYVLKTMSNDNKGLYSTSFKVPDVYGVFQFKVEYQRLGYTGLSFTKQIPVRPYRHNEYERFITSAYPYYTASFSTMCAFFIFSLVYLYHK

SEQ ID NO: 1981 - protein, 439 aa, Zea mays subsp. mays
  peptide (1)..(439): Ceres Seq. ID no. 12367333
  misc_feature (10)..(439): Pfam Name: Dolichyl-diphosphooligosaccharide-protein Pfam Description: Dolichyl-diphosphooligosaccharide-protein
  misc_feature (32)..(439): Homolog of NCBI NO: 2662375 NR Description: oligosaccharyltransferase [Homo sapiens]
  misc_feature (32)..(439): Homolog of NCBI NO: 30584753 NR Description: Homo sapiens
  misc_feature (32)..(439): Homolog of NCBI NO: 20070197 NR Description: dolichyl-diphosphooligosaccharide-protein
  misc_feature (32)..(439): Homolog of NCBI NO: 21104416 NR Description: dolichyl-diphosphooligosaccharide-protein
  misc_feature (32)..(439): Homolog of NCBI NO: 627424 NR Description: dolichyl-diphosphooligosaccharide-protein
  misc_feature (10)..(439): Homolog of NCBI NO: 8843726 NR Description: dolichyl-di-phosphooligosaccharide-protein
  misc_feature (10)..(439): Homolog of NCBI NO: 14334506 NR Description: putative
  misc_feature (10)..(439): Homolog of NCBI NO: 21553942 NR Description: dolichyl-di-phosphooligosaccharide-protein
  misc_feature (10)..(439): Homolog of NCBI NO: 18425101 NR Description: dolichyl-di-phosphooligosaccharide-protein
  misc_feature (2)..(439): Homolog of NCBI NO: 38175467 NR Description: putative dolichyl-di-phosphooligosaccharide-
MATRRHILLLAAAFVSLLALEAVEGLEEGPRGRRLLVLLDDLAVRSSHSAFFGSLQARGFDLEFRLADDPKLSLHRYGQYLYDGLVLFAPSTPRFGGSVDQNAVLEFIDAGHDMILAADSSASDLIRGIATECGVDFDEDPEAMVIDHINYAAMDVEGDHTLIVGDDLIQSDVILGSKKIEAPVLFRGIGHTANPSNSLVLKVLSASPSAYSANPKTKLLLPPSLTGSAISLVSVMQARNNARVLLSGSLDLFSNRFLKSGVQKAGSKTRYERAGNEQFVTETSKWVFHERGHLKAVNVKHHKVGETNEPGMYRINDDLEYSVEIYEWSGTSWKPYVADDVQLQFFMMSPYVLKTMSNDNKGLYSTSFKVPDVYGVFQFKVEYQRLGYTGLSFTKQIPVRPYRHNEYERFITSAYPYYTASFSTMCAFFIFSLVYLYHK

SEQ ID NO: 1982 - protein, 326 aa, Zea mays subsp. mays
  peptide (1)..(326): Ceres Seq. ID no. 12367334
  misc_feature (1)..(326): Pfam Name: Dolichyl-diphosphooligosaccharide-protein Pfam Description: Dolichyl-diphosphooligosaccharide-protein
  misc_feature (1)..(326): Homolog of NCBI NO: 2662375 NR Description: oligosaccharyltransferase [Homo sapiens]
  misc_feature (1)..(326): Homolog of NCBI NO: 30584753 NR Description: Homo sapiens
  misc_feature (1)..(326): Homolog of NCBI NO: 20070197 NR Description: dolichyl-diphosphooligosaccharide-protein
  misc_feature (1)..(326): Homolog of NCBI NO: 21104416 NR Description: dolichyl-diphosphooligosaccharide-protein
  misc_feature (1)..(326): Homolog of NCBI NO: 627424 NR Description: dolichyl-diphosphooligosaccharide-protein
  misc_feature (1)..(326): Homolog of NCBI NO: 8843726 NR Description: dolichyl-di-phosphooligosaccharide-protein
  misc_feature (1)..(326): Homolog of NCBI NO: 14334506 NR Description: putative
  misc_feature (1)..(326): Homolog of NCBI NO: 21553942 NR Description: dolichyl-di-phosphooligosaccharide-protein
  misc_feature (1)..(326): Homolog of NCBI NO: 18425101 NR Description: dolichyl-di-phosphooligosaccharide-protein
  misc_feature (1)..(326): Homolog of NCBI NO: 38175467 NR Description: putative dolichyl-di-phosphooligosaccharide-
MILAADSSASDLIRGIATECGVDFDEDPEAMVIDHINYAAMDVEGDHTLIVGDDLIQSDVILGSKKIEAPVLFRGIGHTANPSNSLVLKVLSASPSAYSANPKTKLLLPPSLTGSAISLVSVMQARNNARVLLSGSLDLFSNRFLKSGVQKAGSKTRYERAGNEQFVTETSKWVFHERGHLKAVNVKHHKVGETNEPGMYRINDDLEYSVEIYEWSGTSWKPYVADDVQLQFFMMSPYVLKTMSNDNKGLYSTSFKVPDVYGVFQFKVEYQRLGYTGLSFTKQIPVRPYRHNEYERFITSAYPYYTASFSTMCAFFIFSLVYLYHK

SEQ ID NO: 1983 - DNA, 1180 bp, Zea mays subsp. mays
  misc_feature (1)..(1180): Ceres Seq. ID no. 12355979
  misc_feature: MA Experiment ID: 108534 Result: Up-regulated in Transcription
  misc_feature: MA Experiment 108534 PARAMETER Experiment Name: Zm_4deg_Cold_P Parameter: Age (hr) Value: 8
  misc_feature: MA Experiment 108534 PARAMETER Experiment Name: Zm_4deg_Cold_P Parameter: Organism Value: Zea mays
  misc_feature: MA Experiment 108534 PARAMETER Experiment Name: Zm_4deg_Cold_P Parameter: Plant Line Value: 35A19
  misc_feature: MA Experiment 108534 PARAMETER Experiment Name: Zm_4deg_Cold_P Parameter: Temperature (deg C) Value: 4 vs. 22
  misc_feature: MA Experiment 108534 PARAMETER Experiment Name: Zm_4deg_Cold_P Parameter: Timepoint (hr) Value: 6
  misc_feature: MA Experiment 108534 PARAMETER Experiment Name: Zm_4deg_Cold_P Parameter: Tissue Value: Aerial
  misc_feature: MA Experiment ID: 20000492 Result: Down-regulated in Transcription
  misc_feature: MA Experiment 20000492 PARAMETER Experiment Name: Zm_Hybrid_Seed_Dev_P Parameter: DAP Value: 12
  misc_feature: MA Experiment 20000492 PARAMETER Experiment Name: Zm_Hybrid_Seed_Dev_P Parameter: Organism Value: Zea mays
  misc_feature: MA Experiment 20000492 PARAMETER Experiment Name: Zm_Hybrid_Seed_Dev_P Parameter: Plant Line Value: 35A19
  misc_feature: MA Experiment 20000492 PARAMETER Experiment Name: Zm_Hybrid_Seed_Dev_P Parameter: Tissue Value: Fert Kernel vs. Unfert Floret
  misc_feature: MA Experiment ID: 20000535 Result: Down-regulated in Transcription
  misc_feature: MA Experiment 20000535 PARAMETER Experiment Name: Zm_Hybrid_Seed_Dev_P Parameter: DAP Value: 30 vs. 12
  misc_feature: MA Experiment 20000535 PARAMETER Experiment Name: Zm_Hybrid_Seed_Dev_P Parameter: Organism Value: Zea mays
  misc_feature: MA Experiment 20000535 PARAMETER Experiment Name: Zm_Hybrid_Seed_Dev_P Parameter: Plant Line Value: 35A19
  misc_feature: MA Experiment 20000535 PARAMETER Experiment Name: Zm_Hybrid_Seed_Dev_P Parameter: Tissue Value: Embryo vs. Unfert Floret
  misc_feature: MA Experiment ID: 20000626 Result: Down-regulated in Transcription
  misc_feature: MA Experiment 20000626 PARAMETER Experiment Name: Zm_Herbicide-Treatments_P Parameter: Timepoint (hr) Value: 12
  misc_feature: MA Experiment 20000626 PARAMETER Experiment Name: Zm_Herbicide-Treatments_P Parameter: Tissue Value: Aerial
  misc_feature: MA Experiment 20000626 PARAMETER Experiment Name: Zm_Herbicide-Treatments_P Parameter: Treatment Value: Roundup vs. No Treatment
attcgcgccgggttccgcgagatctctggtgccccccggtttcgctcccgcgccccaatgctccctgtcgcgagtcgtggtctccgccgctcgttgcatcttcgttaccgatcagttgatcccgctcatccggcgggggatcatccgaccattggcagtctaccttttcaacactaaagcttctaagttgatgagtgatgaggccaggcaagcaaagattgtcaaattctcggagtccatttggaaacttacatactatgcttctgttcaagcatgggtcctcatgataataaagcaagaaccatggtcgttggatatggtgcagtactttgatggctggccaaatcaacccatcgtgtcctcgttgatgcttttctatatgtgccagtgtggattttatatctacagcattggtgctcttgttgcttgggaaacccgcagaaaagattttgctgtaatgatgtctcatcatgtaataacatctactcttattggagtttcatatctgacaggattttttcgaattgggaccatcgttcttgctcttcatgatacaagtgatgtgtttcttgagactgccaaattgtgcaagtacacagaaaaggagttgggggctagcttgtttttcggtctcttcgctatctcctggcttctattgcgtttgatttacttcccgttttggataatcaaagcctctagctatcattccatcacattctggaggaagctggatgaattccctacagctttgtactatatcttcaatacaatgcttctcacattgcttgtattccatatgtactggtggaaactcatatgtttgatgataatgagacaattgaataataaaggacaggttacagatgatgttcgatctgattctgaggatgacgagtaatgggggagattcattctttgacatctgcaatgtgtcatttcttcgccaatacttatctacgcctgcttccagaattgattgttttgatcgtggcaagtctcgggcatggataggaaagtttatcctctgtatattgccttgtgatatcaaacatggctagaacgagaatggagcaggtcctatacattacgggtatagctagcaagcttacttgaaggttccttcaaaaaattttggttcaccttttctgatatatggggaaagatatgagagggggtacag

SEQ ID NO: 1984 - protein, 298 aa, Zea mays subsp. mays
  peptide (1)..(298): Ceres Seq. ID no. 12355980
  misc_feature (94)..(298): Pfam Name: Longevity-assurance protein (LAG1) Pfam Description: Longevity-assurance protein (LAG1)
  misc_feature (73)..(297): Homolog of NCBI NO: 31241781 NR Description: ENSANGP00000012836 [Anopheles gambiae]
  misc_feature (66)..(298): Homolog of NCBI NO: 27769146 NR Description: Similar to RIKEN cDNA 0610013I17 gene [Xenopus
  misc_feature (42)..(234): Homolog of NCBI NO: 30683361 NR Description: longevity assurance protein -related [Arabidopsis
  misc_feature (42)..(298): Homolog of NCBI NO: 7688742 NR Description: ASC1 [Lycopersicon esculentum]
  misc_feature (42)..(297): Homolog of NCBI NO: 16974114 NR Description: putative resistance protein [Lycopersicon
  misc_feature (51)..(298): Homolog of NCBI NO: 18404559 NR Description: expressed protein
  misc_feature (42)..(298): Homolog of NCBI NO: 25518747 NR Description: hypothetical protein F13B4.7 - Arabidopsis
  misc_feature (42)..(298): Homolog of NCBI NO: 7658241 NR Description: LAG1 homolog 2 [Arabidopsis thaliana]
  misc_feature (42)..(298): Homolog of NCBI NO: 15230323 NR Description: longevity factor-like protein
  misc_feature (45)..(298): Homolog of NCBI NO: 34901974 NR Description: unknown protein [Oryza sativa (japonica
FAPGSARSLVPPGFAPAPQCSLSRVVVSAARCIFVTDQLIPLIRRGIIRPLAVYLFNTKASKLMSDEARQAKIVKFSESIWKLTYYASVQAWVLMIIKQEPWSLDMVQYFDGWPNQPIVSSLMLFYMCQCGFYIYSIGALVAWETRRKDFAVMMSHHVITSTLIGVSYLTGFFRIGTIVLALHDTSDVFLETAKLCKYTEKELGASLFFGLFAISWLLLRLIYFPFWIIKASSYHSITFWRKLDEFPTALYYIFNTMLLTLLVFHMYWWKLICLMIMRQLNNKGQVTDDVRSDSEDDE

SEQ ID NO: 1985 - protein, 235 aa, Zea mays subsp. mays
  peptide (1)..(235): Ceres Seq. ID no. 12355981
  misc_feature (31)..(235): Pfam Name: Longevity-assurance protein (LAG1) Pfam Description: Longevity-assurance protein (LAG1)
  misc_feature (10)..(234): Homolog of NCBI NO: 31241781 NR Description: ENSANGP00000012836 [Anopheles gambiae]
  misc_feature (3)..(235): Homolog of NCBI NO: 27769146 NR Description: Similar to RIKEN cDNA 0610013I17 gene [Xenopus
  misc_feature (1)..(171): Homolog of NCBI NO: 30683361 NR Description: longevity assurance protein -related [Arabidopsis
  misc_feature (1)..(235): Homolog of NCBI NO: 7688742 NR Description: ASC1 [Lycopersicon esculentum]
  misc_feature (1)..(234): Homolog of NCBI NO: 16974114 NR Description: putative resistance protein [Lycopersicon
  misc_feature (1)..(235): Homolog of NCBI NO: 18404559 NR Description: expressed protein
  misc_feature (1)..(235): Homolog of NCBI NO: 25518747 NR Description: hypothetical protein F13B4.7 - Arabidopsis
  misc_feature (1)..(235): Homolog of NCBI NO: 7658241 NR Description: LAG1 homolog 2 [Arabidopsis thaliana]
  misc_feature (1)..(235): Homolog of NCBI NO: 15230323 NR Description: longevity factor-like protein
  misc_feature (1)..(235): Homolog of NCBI NO: 34901974 NR Description: unknown protein [Oryza sativa (japonica
MSDEARQAKIVKFSESIWKLTYYASVQAWVLMIIKQEPWSLDMVQYFDGWPNQPIVSSLMLFYMCQCGFYIYSIGALVAWETRRKDFAVMMSHHVITSTLIGVSYLTGFFRIGTIVLALHDTSDVFLETAKLCKYTEKELGASLFFGLFAISWLLLRLIYFPFWIIKASSYHSITFWRKLDEFPTALYYIFNTMLLTLLVFHMYWWKLICLMIMRQLNNKGQVTDDVRSDSEDDE

SEQ ID NO: 1986 - protein, 204 aa, Zea mays subsp. mays
  peptide (1)..(204): Ceres Seq. ID no. 12355982
  misc_feature (1)..(204): Pfam Name: Longevity-assurance protein (LAG1) Pfam Description: Longevity-assurance protein (LAG1)
  misc_feature (1)..(203): Homolog of NCBI NO: 31241781 NR Description: ENSANGP00000012836 [Anopheles gambiae]
  misc_feature (1)..(204): Homolog of NCBI NO: 27769146 NR Description: Similar to RIKEN cDNA 0610013I17 gene [Xenopus
  misc_feature (1)..(140): Homolog of NCBI NO: 30683361 NR Description: longevity assurance protein -related [Arabidopsis
  misc_feature (1)..(204): Homolog of NCBI NO: 7688742 NR Description: ASC1 [Lycopersicon esculentum]
  misc_feature (1)..(203): Homolog of NCBI NO: 16974114 NR Description: putative resistance protein [Lycopersicon
  misc_feature (1)..(204): Homolog of NCBI NO: 18404559 NR Description: expressed protein
  misc_feature (1)..(204): Homolog of NCBI NO: 25518747 NR Description: hypothetical protein F13B4.7 - Arabidopsis
  misc_feature (1)..(204): Homolog of NCBI NO: 7658241 NR Description: LAG1 homolog 2 [Arabidopsis thaliana]
  misc_feature (1)..(204): Homolog of NCBI NO: 15230323 NR Description: longevity factor-like protein
  misc_feature (1)..(204): Homolog of NCBI NO: 34901974 NR Description: unknown protein [Oryza sativa (japonica
MIIKQEPWSLDMVQYFDGWPNQPIVSSLMLFYMCQCGFYIYSIGALVAWETRRKDFAVMMSHHVITSTLIGVSYLTGFFRIGTIVLALHDTSDVFLETAKLCKYTEKELGASLFFGLFAISWLLLRLIYFPFWIIKASSYHSITFWRKLDEFPTALYYIFNTMLLTLLVFHMYWWKLICLMIMRQLNNKGQVTDDVRSDSEDDE

SEQ ID NO: 1987 - DNA, 1435 bp, Zea mays subsp. mays
  misc_feature (1)..(1435): Ceres Seq. ID no. 12355983
  misc_feature: MA Experiment ID: 108529 Result: Down-regulated in Transcription
  misc_feature: MA Experiment 108529 PARAMETER Experiment Name: Zm_Imbibed_Seeds_P Parameter: Age (day) Value: 5 vs. 2
  misc_feature: MA Experiment 108529 PARAMETER Experiment Name: Zm_Imbibed_Seeds_P Parameter: Organism Value: Zea mays
  misc_feature: MA Experiment 108529 PARAMETER Experiment Name: Zm_Imbibed_Seeds_P Parameter: Plant Line Value: 35A19
  misc_feature: MA Experiment 108529 PARAMETER Experiment Name: Zm_Imbibed_Seeds_P Parameter: Tissue Value: Roots vs. Embryo
  misc_feature: MA Experiment ID: 108536 Result: Up-regulated in Transcription
  misc_feature: MA Experiment 108536 PARAMETER Experiment Name: Zm_Meristem_P Parameter: Age (day) Value: 8
  misc_feature: MA Experiment 108536 PARAMETER Experiment Name: Zm_Meristem_P Parameter: Organism Value: Zea mays
  misc_feature: MA Experiment 108536 PARAMETER Experiment Name: Zm_Meristem_P Parameter: Plant Line Value: 35A19
  misc_feature: MA Experiment 108536 PARAMETER Experiment Name: Zm_Meristem_P Parameter: Tissue Value: Shoot Meristem vs. Above Shoot Meristem
  misc_feature: MA Experiment ID: 108546 Result: Down-regulated in Transcription
  misc_feature: MA Experiment 108546 PARAMETER Experiment Name: Zm_Imbibed_Seeds_P Parameter: Age (day) Value: 3 vs. 2
  misc_feature: MA Experiment 108546 PARAMETER Experiment Name: Zm_Imbibed_Seeds_P Parameter: Organism Value: Zea mays
  misc_feature: MA Experiment 108546 PARAMETER Experiment Name: Zm_Imbibed_Seeds_P Parameter: Plant Line Value: 35A19
  misc_feature: MA Experiment 108546 PARAMETER Experiment Name: Zm_Imbibed_Seeds_P Parameter: Tissue Value: Roots vs. Embryo
  misc_feature: MA Experiment ID: 20000492 Result: Down-regulated in Transcription
  misc_feature: MA Experiment 20000492 PARAMETER Experiment Name: Zm_Hybrid_Seed_Dev_P Parameter: DAP Value: 12
  misc_feature: MA Experiment 20000492 PARAMETER Experiment Name: Zm_Hybrid_Seed_Dev_P Parameter: Organism Value: Zea mays
  misc_feature: MA Experiment 20000492 PARAMETER Experiment Name: Zm_Hybrid_Seed_Dev_P Parameter: Plant Line Value: 35A19
  misc_feature: MA Experiment 20000492 PARAMETER Experiment Name: Zm_Hybrid_Seed_Dev_P Parameter: Tissue Value: Fert Kernel vs. Unfert Floret
  misc_feature: MA Experiment ID: 20000535 Result: Down-regulated in Transcription
  misc_feature: MA Experiment 20000535 PARAMETER Experiment Name: Zm_Hybrid_Seed_Dev_P Parameter: DAP Value: 30 vs. 12
  misc_feature: MA Experiment 20000535 PARAMETER Experiment Name: Zm_Hybrid_Seed_Dev_P Parameter: Organism Value: Zea mays
  misc_feature: MA Experiment 20000535 PARAMETER Experiment Name: Zm_Hybrid_Seed_Dev_P Parameter: Plant Line Value: 35A19
  misc_feature: MA Experiment 20000535 PARAMETER Experiment Name: Zm_Hybrid_Seed_Dev_P Parameter: Tissue Value: Embryo vs. Unfert Floret
atcaaatcacacacccatcagatcacaaaggcaaagaggagagagagagagagagggatgatgaggacgacgatgagagagatatactactaaactatctatccatcaatcaatcaggtagcccggcagcaatcgcgtgccgcctttcctctcacgtacaccaccacacctcccaggctcagctcgattcgttcgttgccgcgtcaaatcgggacaagaagccagccggccctgttgcagtgttgcttcgcctgccctgctgctgttgcttgcgccacgcacgtacctgaagaaagcagcgacggattgatcgaccggtggttcgctgtcgccacggccggcatgtcgtcctcgtcctcgtcctcgtcgtcctccgccgcctccgccgccacggtgttcccgcggtccccgcagctgccgcctccggtcctggtggagaacggcctcacgccgctgcatcagcttacgccggtagccgcggccgcgccggccgccgagcagctctgctacgtgcactgctacttctgcgacaccgtcctcgtcgtgagcgtgcctacgagcagcttgttcaagacggtgacggtacgatgcggccactgcagcagcttgctcaccgtcgacatgaggggcctcctcttcccgggcacgccgacggacacggtcgcgggggccgcaccaccaccagctgctgacactagtacgactaccaccaccatcaccacggcgccgccgccggccaactcggtcaacaacgggcagttccacctcccccactcgctcaaccaccctcaccaccaatccctcctggtggtacgcgcgtggttcaaagctgccggtggagctagctagctcgctctgatctgatgtcatatatcgcatgcctaatctcttgtttccgcgcgcgcgcgtgcatgcaggacgagatatccagcgccgcgaacccgagcctgcagttgcagatggagcagcacggcggcctcggcggcctgatactcggcggcagcaggaacacggccgcgccgcctccgccgcagccgcctgcagcgggtaaaggggccaaagagccgtcgccgcgcactaatcccgccgtcaacagacctccggagaagaggcagcgcgtgccgtcggcctacaaccgcttcatcaaggacgaaatccaacgcatcaaggctggcaatcccaacatctcgcacagggaggccttcagcgcggcggccaagaactgggcgcactttccacatatccactttggactcatgccggatcaccaggggctcaagacgacaagcctgctacctcagggtcaccagagaaaggacgggcttcttaaggaagggctctacgcggcagcggcggcggccgcagctcatgcggcagccaacatggggattgctccatactaatttacaattactcctactcaagcttgctactg

SEQ ID NO: 1988 - protein, 179 aa, Zea mays subsp. mays
  peptide (1)..(179): Ceres Seq. ID no. 12355984
  misc_feature (19)..(131): Pfam Name: YABBY protein Pfam Description: YABBY protein
  misc_feature (74)..(179): Homolog of NCBI NO: 18406725 NR Description: expressed protein
  misc_feature (68)..(179): Homolog of NCBI NO: 27804377 NR Description: MADS-box transcription factor CDM51
  misc_feature (70)..(169): Homolog of NCBI NO: 18411242 NR Description: putative YABBY3 axial regulator
  misc_feature (1)..(179): Homolog of NCBI NO: 32330675 NR Description: yabby14 protein [Zea mays]
  misc_feature (19)..(179): Homolog of NCBI NO: 38605890 NR Description: OSJNBb0020O11.2 [Oryza sativa (japonica
  misc_feature (1)..(179): Homolog of NCBI NO: 32330681 NR Description: yabby10 protein [Zea mays]
  misc_feature (19)..(179): Homolog of NCBI NO: 32330677 NR Description: yabby15 protein [Zea mays]
  misc_feature (19)..(179): Homolog of NCBI NO: 37535908 NR Description: hypothetical protein [Oryza sativa (japonica
  misc_feature (14)..(179): Homolog of NCBI NO: 37551421 NR Description: FIL-like protein [Triticum aestivum]
  misc_feature (14)..(179): Homolog of NCBI NO: 32330679 NR Description: yabby9 protein [Zea mays]
MSYIACLISCFRARACMQDEISSAANPSLQLQMEQHGGLGGLILGGSRNTAAPPPPQPPAAGKGAKEPSPRTNPAVNRPPEKRQRVPSAYNRFIKDEIQRIKAGNPNISHREAFSAAAKNWAHFPHIHFGLMPDHQGLKTTSLLPQGHQRKDGLLKEGLYAAAAAAAAHAAANMGIAPY

SEQ ID NO: 1989 - protein, 168 aa, Zea mays subsp. mays
  peptide (1)..(168): Ceres Seq. ID no. 12355985
  misc_feature (45)..(155): Pfam Name: YABBY protein Pfam Description: YABBY protein
  misc_feature (51)..(102): Homolog of NCBI NO: 18406725 NR Description: expressed protein
  misc_feature (48)..(108): Homolog of NCBI NO: 27804377 NR Description: MADS-box transcription factor CDM51
  misc_feature (50)..(158): Homolog of NCBI NO: 18411242 NR Description: putative YABBY3 axial regulator
  misc_feature (7)..(156): Homolog of NCBI NO: 32330681 NR Description: yabby10 protein [Zea mays]
  misc_feature (49)..(113): Homolog of NCBI NO: 32330675 NR Description: yabby14 protein [Zea mays]
  misc_feature (52)..(100): Homolog of NCBI NO: 38605890 NR Description: OSJNBb0020O11.2 [Oryza sativa (japonica
  misc_feature (43)..(113): Homolog of NCBI NO: 32330677 NR Description: yabby15 protein [Zea mays]
  misc_feature (1)..(155): Homolog of NCBI NO: 37535908 NR Description: hypothetical protein [Oryza sativa (japonica
  misc_feature (6)..(155): Homolog of NCBI NO: 37551421 NR Description: FIL-like protein [Triticum aestivum]
  misc_feature (5)..(156): Homolog of NCBI NO: 32330679 NR Description: yabby9 protein [Zea mays]
MSSSSSSSSSSAASAATVFPRSPQLPPPVLVENGLTPLHQLTPVAAAAPAAEQLCYVHCYFCDTVLVVSVPTSSLFKTVTVRCGHCSSLLTVDMRGLLFPGTPTDTVAGAAPPPAADTSTTTTTITTAPPPANSVNNGQFHLPHSLNHPHHQSLLVVRAWFKAAGGAS

SEQ ID NO: 1990 - protein, 163 aa, Zea mays subsp. mays
  peptide (1)..(163): Ceres Seq. ID no. 12355986
  misc_feature (3)..(115): Pfam Name: YABBY protein Pfam Description: YABBY protein
  misc_feature (58)..(163): Homolog of NCBI NO: 18406725 NR Description: expressed protein
  misc_feature (52)..(163): Homolog of NCBI NO: 27804377 NR Description: MADS-box transcription factor CDM51
  misc_feature (54)..(153): Homolog of NCBI NO: 18411242 NR Description: putative YABBY3 axial regulator
  misc_feature (1)..(163): Homolog of NCBI NO: 32330675 NR Description: yabby14 protein [Zea mays]
  misc_feature (3)..(163): Homolog of NCBI NO: 38605890 NR Description: OSJNBb0020O11.2 [Oryza sativa (japonica
  misc_feature (1)..(163): Homolog of NCBI NO: 32330681 NR Description: yabby10 protein [Zea mays]
  misc_feature (3)..(163): Homolog of NCBI NO: 32330677 NR Description: yabby15 protein [Zea mays]
  misc_feature (3)..(163): Homolog of NCBI NO: 37535908 NR Description: hypothetical protein [Oryza sativa (japonica
  misc_feature (1)..(163): Homolog of NCBI NO: 37551421 NR Description: FIL-like protein [Triticum aestivum]
  misc_feature (1)..(163): Homolog of NCBI NO: 32330679 NR Description: yabby9 protein [Zea mays]
MQDEISSAANPSLQLQMEQHGGLGGLILGGSRNTAAPPPPQPPAAGKGAKEPSPRTNPAVNRPPEKRQRVPSAYNRFIKDEIQRIKAGNPNISHREAFSAAAKNWAHFPHIHFGLMPDHQGLKTTSLLPQGHQRKDGLLKEGLYAAAAAAAAHAAANMGIAPY

SEQ ID NO: 1991 - DNA, 941 bp, Zea mays subsp. mays
  misc_feature (1)..(941): Ceres Seq. ID no. 12374363
  misc_feature: MA Experiment ID: 108543 Result: Up-regulated in Transcription
aaggataaatctggtgataaaagtagcatctctccagcaagcatgacaaagaagtgtacgccgttggcacctaggaagactttgcagcctgagcaagcatttcaccctctggaagaggactcttgttctgtgacttcctcgactacaacatcatcaagagctggcagaactaagacaactgttcctgttgccccatcatttgtgtgtgctaaccgtgctgacaagaggaaggagttctacacaaaattagaggagaaacataaagctttggaagcagagaaggacgaggctgaggccaggaaaaaggaagagcaagacgttgctataaagcaactaaggaagtcattggtgattagagcgaaacccatgccaagcttctatcaagaaggccccccaccaaaggctgaacttaagaaggtgcctcctactcgtgccaaatcaccaaagtttacaagctcaaggagaaagagctgcaatgacacaccacagacacccgagggaaaaaacaccaacgcaacatctaccacccggccacatcgtcacagcatcggggcttctaaagatgccagcagagtacagtgctcgccgaagagcggcgtggcgaccaaaactagatctgtcaagcctgagctgaaggccctctgaagcgcatgcgaagcagccaagtgctgcgattgtctctgtacaaacagaatcgcctgactcttagccgtttccatttccatgcattttttgttttgttttgttttgttctatacccagcatctccaccaaaaagaaggctgtagggccaatgacgttgttcgcgatgctggaccttgtccccattttcgtcttgtactcgttaagaactttgttgctgctgggaccatgtgacattcattccatgtaaattacctggggatccctgtagggatctcgactggtgttttggtcttgtg

SEQ ID NO: 1992 - protein, 214 aa, Zea mays subsp. mays
  peptide (1)..(214): Ceres Seq. ID no. 12374364
  misc_feature (22)..(188): Homolog of NCBI NO: 6175167 NR Description: unknown protein [Arabidopsis thaliana]
  misc_feature (13)..(188): Homolog of NCBI NO: 30679219 NR Description: expressed protein [Arabidopsis thaliana]
  misc_feature (19)..(212): Homolog of NCBI NO: 34393229 NR Description: putative seed specific protein
  misc_feature (2)..(209): Homolog of NCBI NO: 34897180 NR Description: unknown protein [Oryza sativa (japonica
  misc_feature (24)..(192): Homolog of NCBI NO: 15228950 NR Description: unknown protein; protein id: At3g23090.1
  misc_feature (24)..(192): Homolog of NCBI NO: 9294199 NR Description: gb|AAF04893.1~gene_id:MXC7.13~similar to unknown
  misc_feature (8)..(198): Homolog of NCBI NO: 21553401 NR Description: unknown [Arabidopsis thaliana]
  misc_feature (8)..(198): Homolog of NCBI NO: 18404945 NR Description: expressed protein
  misc_feature (22)..(188): Homolog of NCBI NO: 21618286 NR Description: unknown [Arabidopsis thaliana]
  misc_feature (22)..(188): Homolog of NCBI NO: 18396961 NR Description: expressed protein
KDKSGDKSSISPASMTKKCTPLAPRKTLQPEQAFHPLEEDSCSVTSSTTTSSRAGRTKTTVPVAPSFVCANRADKRKEFYTKLEEKHKALEAEKDEAEARKKEEQDVAIKQLRKSLVIRAKPMPSFYQEGPPPKAELKKVPPTRAKSPKFTSSRRKSCNDTPQTPEGKNTNATSTTRPHRHSIGASKDASRVQCSPKSGVATKTRSVKPELKAL

SEQ ID NO: 1993 - protein, 200 aa, Zea mays subsp. mays
  peptide (1)..(200): Ceres Seq. ID no. 12374365
  misc_feature (10)..(178): Homolog of NCBI NO: 15228950 NR Description: unknown protein; protein id: At3g23090.1
  misc_feature (10)..(178): Homolog of NCBI NO: 9294199 NR Description: gb|AAF04893.1~gene_id:MXC7.13~similar to unknown
  misc_feature (1)..(184): Homolog of NCBI NO: 21553401 NR Description: unknown [Arabidopsis thaliana]
  misc_feature (1)..(184): Homolog of NCBI NO: 18404945 NR Description: expressed protein
  misc_feature (8)..(174): Homolog of NCBI NO: 18396961 NR Description: expressed protein
  misc_feature (8)..(174): Homolog of NCBI NO: 21618286 NR Description: unknown [Arabidopsis thaliana]
  misc_feature (8)..(174): Homolog of NCBI NO: 6175167 NR Description: unknown protein [Arabidopsis thaliana]
  misc_feature (1)..(174): Homolog of NCBI NO: 30679219 NR Description: expressed protein [Arabidopsis thaliana]
  misc_feature (5)..(198): Homolog of NCBI NO: 34393229 NR Description: putative seed specific protein
  misc_feature (1)..(195): Homolog of NCBI NO: 34897180 NR Description: unknown protein [Oryza sativa (japonica
MTKKCTPLAPRKTLQPEQAFHPLEEDSCSVTSSTTTSSRAGRTKTTVPVAPSFVCANRADKRKEFYTKLEEKHKALEAEKDEAEARKKEEQDVAIKQLRKSLVIRAKPMPSFYQEGPPPKAELKKVPPTRAKSPKFTSSRRKSCNDTPQTPEGKNTNATSTTRPHRHSIGASKDASRVQCSPKSGVATKTRSVKPELKAL

SEQ ID NO: 1994 - DNA, 1365 bp, Zea mays subsp. mays
  misc_feature (1)..(1365): Ceres Seq. ID no. 12410913
  misc_feature: MA Experiment ID: 108687 Result: Down-regulated in Transcription
  misc_feature: MA Experiment 108687 PARAMETER Experiment Name: Zm_Embryos-Flowers__P Parameter: Tissue Value: Embryo vs. Aerial+
  misc_feature: MA Experiment ID: 20000535 Result: Down-regulated in Transcription
  misc_feature: MA Experiment 20000535 PARAMETER Experiment Name: Zm_Hybrid_Seed_Dev_P Parameter: DAP Value: 30 vs. 12
  misc_feature: MA Experiment 20000535 PARAMETER Experiment Name: Zm_Hybrid_Seed_Dev_P Parameter: Organism Value: Zea mays
  misc_feature: MA Experiment 20000535 PARAMETER Experiment Name: Zm_Hybrid_Seed_Dev_P Parameter: Plant Line Value: 35A19
  misc_feature: MA Experiment 20000535 PARAMETER Experiment Name: Zm_Hybrid_Seed_Dev_P Parameter: Tissue Value: Embryo vs. Unfert Floret
atataccctttcgtctccgcccagcagcaacggcacccaccgaatccgcccctccctctttccgttccgcctcgtcgcgctcgctctcgctgcgccgcccgccccacctcacggagctcacggcaacaccggcagggacggaaaaggaaagccgaggaggcgaggagagagagatacaaggcaggcagccaggcacaggcagcccgcggctggctacggggccaaaacccttacgcgcgacgcggccccctcctcttcttctctctcccaccaccgccctccccttgccatttttgccgcaggagccgccgccatccgatccggaagagggaggaggggggagggaggaggatctgtgtcccgattcgattggagctctcgtccccggcggtccaggatggtgcggggcaagacgcagatgaagcggatagagaacccggccagtcgccaggtcaccttctccaagcgccgcaacggcctgctcaagaaggcgttcgagctctccgtcctctgcgacgccgaggtcgcgctcgtcgtcttctccccgcgcggcaagctctacgaattcgccagcggaagtgcccagaaaacaattgaacgttatagaacgtacacaaaggataatgtcagcaacaagacagcacatcaggacattgagcaagtaaaagctgatgctgagggcctggcaaagaaactggaagcacttgaagcttacaaaagaaaacttttgggtgagaggttggaagaatgctcctttgaagaactgcacagtttggaagtgaaactcgaaaagagccttcattgcatcaggggaagaaagactcagctgctggaggagcaactccataagctgaaggagaaggagatgaatctgcgcaagagcaacgaagatttacgtgaaaagtgcaagaagcagccgccgccgccgccgccctatgctgatggctcctccgccgcctccagccgccggcagccatcgatcacacggggccgaaggatgtcgggatggacgtggagacggagctgtacataggattgcccggcagagattaccgctcaaacaacaaagacatgactgcacagtagctgtcaggtcaggtcaggtcaggctagccagcagtgcagagaataatcttagatctgtggtgcggagaactggagatgcaagccaagcccaagccaatcaacatgataaggatcatgagtgtcgcgtcgtgttttacaaacctgtccaccgtccgtcaaaggcacatgcgccagaacgtccgtcagagaacacttaccccctcatctccctctattagctagctgctccggcctgctcatgtcgaaaccttctgttcaagtatgttctcctcctgatgt

SEQ ID NO: 1995 - protein, 343 aa, Zea mays subsp. mays
  peptide (1)..(343): Ceres Seq. ID no. 12410914
  misc_feature (206)..(304): Pfam Name: K-box region Pfam Description: K-box region
  misc_feature (133)..(301): Homolog of NCBI NO: 30171311 NR Description: MADS-box protein [Draba nemorosa var. hebecarpa]
  misc_feature (133)..(301): Homolog of NCBI NO: 30171309 NR Description: MADS-box protein [Cardamine flexuosa]
  misc_feature (133)..(301): Homolog of NCBI NO: 7446552 NR Description: MADS box protein A - white mustard
  misc_feature (133)..(301): Homolog of NCBI NO: 15225534 NR Description: MADS-box protein (AGL20)
  misc_feature (133)..(322): Homolog of NCBI NO: 6635740 NR Description: agamous-like MADS box protein OPMADS1 [Elaeis
  misc_feature (133)..(301): Homolog of NCBI NO: 37536442 NR Description: putative transcription factor
  misc_feature (133)..(301): Homolog of NCBI NO: 33621123 NR Description: transcription factor MADS56
  misc_feature (133)..(301): Homolog of NCBI NO: 5051933 NR Description: MADS-box protein FDRMADS8 [Oryza sativa]
  misc_feature (133)..(311): Homolog of NCBI NO: 5295990 NR Description: MADS box-like protein [Oryza sativa (japonica
  misc_feature (133)..(325): Homolog of NCBI NO: 12002139 NR Description: MADS box protein 1 [Zea mays]
YTLSSPPSSNGTHRIRPSLFPFRLVALALAAPPAPPHGAHGNTGRDGKGKPRRRGERDTRQAARHRQPAAGYGAKTLTRDAAPSSSSLSHHRPPLAIFAAGAAAIRSGRGRRGEGGGSVSRFDWSSRPRRSRMVRGKTQMKRIENPASRQVTFSKRRNGLLKKAFELSVLCDAEVALVVFSPRGKLYEFASGSAQKTIERYRTYTKDNVSNKTAHQDIEQVKADAEGLAKKLEALEAYKRKLLGERLEECSFEELHSLEVKLEKSLHCIRGRKTQLLEEQLHKLKEKEMNLRKSNEDLREKCKKQPPPPPPYADGSSAASSRRQPSITRGRRMSGWTWRRSCT

SEQ ID NO: 1996 - protein, 211 aa, Zea mays subsp. mays
  peptide (1)..(211): Ceres Seq. ID no. 12410915
  misc_feature (74)..(172): Pfam Name: K-box region Pfam Description: K-box region
  misc_feature (1)..(169): Homolog of NCBI NO: 30171311 NR Description: MADS-box protein [Draba nemorosa var. hebecarpa]
  misc_feature (1)..(169): Homolog of NCBI NO: 30171309 NR Description: MADS-box protein [Cardamine flexuosa]
  misc_feature (1)..(169): Homolog of NCBI NO: 7446552 NR Description: MADS box protein A - white mustard
  misc_feature (1)..(169): Homolog of NCBI NO: 15225534 NR Description: MADS-box protein (AGL20)
  misc_feature (1)..(190): Homolog of NCBI NO: 6635740 NR Description: agamous-like MADS box protein OPMADS1 [Elaeis
  misc_feature (1)..(169): Homolog of NCBI NO: 37536442 NR Description: putative transcription factor
  misc_feature (1)..(169): Homolog of NCBI NO: 33621123 NR Description: transcription factor MADS56
  misc_feature (1)..(169): Homolog of NCBI NO: 5051933 NR Description: MADS-box protein FDRMADS8 [Oryza sativa]
  misc_feature (1)..(179): Homolog of NCBI NO: 5295990 NR Description: MADS box-like protein [Oryza sativa (japonica
  misc_feature (1)..(193): Homolog of NCBI NO: 12002139 NR Description: MADS box protein 1 [Zea mays]
MVRGKTQMKRIENPASRQVTFSKRRNGLLKKAFELSVLCDAEVALVVFSPRGKLYEFASGSAQKTIERYRTYTKDNVSNKTAHQDIEQVKADAEGLAKKLEALEAYKRKLLGERLEECSFEELHSLEVKLEKSLHCIRGRKTQLLEEQLHKLKEKEMNLRKSNEDLREKCKKQPPPPPPYADGSSAASSRRQPSITRGRRMSGWTWRRSCT

SEQ ID NO: 1997 - protein, 204 aa, Zea mays subsp. mays
  peptide (1)..(204): Ceres Seq. ID no. 12410916
  misc_feature (67)..(165): Pfam Name: K-box region Pfam Description: K-box region
  misc_feature (1)..(162): Homolog of NCBI NO: 30171311 NR Description: MADS-box protein [Draba nemorosa var. hebecarpa]
  misc_feature (1)..(162): Homolog of NCBI NO: 30171309 NR Description: MADS-box protein [Cardamine flexuosa]
  misc_feature (1)..(162): Homolog of NCBI NO: 7446552 NR Description: MADS box protein A - white mustard
  misc_feature (1)..(162): Homolog of NCBI NO: 15225534 NR Description: MADS-box protein (AGL20)
  misc_feature (1)..(183): Homolog of NCBI NO: 6635740 NR Description: agamous-like MADS box protein OPMADS1 [Elaeis
  misc_feature (1)..(162): Homolog of NCBI NO: 37536442 NR Description: putative transcription factor
  misc_feature (1)..(162): Homolog of NCBI NO: 33621123 NR Description: transcription factor MADS56
  misc_feature (1)..(162): Homolog of NCBI NO: 5051933 NR Description: MADS-box protein FDRMADS8 [Oryza sativa]
  misc_feature (1)..(172): Homolog of NCBI NO: 5295990 NR Description: MADS box-like protein [Oryza sativa (japonica
  misc_feature (1)..(186): Homolog of NCBI NO: 12002139 NR Description: MADS box protein 1 [Zea mays]
MKRIENPASRQVTFSKRRNGLLKKAFELSVLCDAEVALVVFSPRGKLYEFASGSAQKTIERYRTYTKDNVSNKTAHQDIEQVKADAEGLAKKLEALEAYKRKLLGERLEECSFEELHSLEVKLEKSLHCIRGRKTQLLEEQLHKLKEKEMNLRKSNEDLREKCKKQPPPPPPYADGSSAASSRRQPSITRGRRMSGWTWRRSCT

SEQ ID NO: 1998 - DNA, 1461 bp, Zea mays subsp. mays
  misc_feature (1)..(1461): Ceres Seq. ID no. 12348941
  misc_feature: MA Experiment ID: 108527 Result: Up-regulated in Transcription
  misc_feature: MA Experiment 108527 PARAMETER Experiment Name: Zm_5mM_NO_P Parameter: Age (day) Value: 8
  misc_feature: MA Experiment 108527 PARAMETER Experiment Name: Zm_5mM_NO_P Parameter: Organism Value: Zea mays
  misc_feature: MA Experiment 108527 PARAMETER Experiment Name: Zm_5mM_NO_P Parameter: Plant Line Value: 35A19
  misc_feature: MA Experiment 108527 PARAMETER Experiment Name: Zm_5mM_NO_P Parameter: Timepoint (hr) Value: 6
  misc_feature: MA Experiment 108527 PARAMETER Experiment Name: Zm_5mM_NO_P Parameter: Tissue Value: Aerial
  misc_feature: MA Experiment 108527 PARAMETER Experiment Name: Zm_5mM_NO_P Parameter: Treatment Value: 5mM NO vs. No Treatment
  misc_feature: MA Experiment ID: 108528 Result: Down-regulated in Transcription
  misc_feature: MA Experiment 108528 PARAMETER Experiment Name: Zm_Imbibed_Seeds_P Parameter: Age (day) Value: 5 vs. 2
  misc_feature: MA Experiment 108528 PARAMETER Experiment Name: Zm_Imbibed_Seeds_P Parameter: Organism Value: Zea mays
  misc_feature: MA Experiment 108528 PARAMETER Experiment Name: Zm_Imbibed_Seeds_P Parameter: Plant Line Value: 35A19
  misc_feature: MA Experiment 108528 PARAMETER Experiment Name: Zm_Imbibed_Seeds_P Parameter: Tissue Value: Aerial vs. Embryo
  misc_feature: MA Experiment ID: 108530 Result: Down-regulated in Transcription
  misc_feature: MA Experiment 108530 PARAMETER Experiment Name: Zm_Imbibed_Seeds_P Parameter: Age (day) Value: 6 vs. 2
  misc_feature: MA Experiment 108530 PARAMETER Experiment Name: Zm_Imbibed_Seeds_P Parameter: Organism Value: Zea mays
  misc_feature: MA Experiment 108530 PARAMETER Experiment Name: Zm_Imbibed_Seeds_P Parameter: Plant Line Value: 35A19
  misc_feature: MA Experiment 108530 PARAMETER Experiment Name: Zm_Imbibed_Seeds_P Parameter: Tissue Value: Aerial vs. Embryo
  misc_feature: MA Experiment ID: 108534 Result: Up-regulated in Transcription
  misc_feature: MA Experiment 108534 PARAMETER Experiment Name: Zm_4deg_Cold_P Parameter: Age (hr) Value: 8
  misc_feature: MA Experiment 108534 PARAMETER Experiment Name: Zm_4deg_Cold_P Parameter: Organism Value: Zea mays
  misc_feature: MA Experiment 108534 PARAMETER Experiment Name: Zm_4deg_Cold_P Parameter: Plant Line Value: 35A19
  misc_feature: MA Experiment 108534 PARAMETER Experiment Name: Zm_4deg_Cold_P Parameter: Temperature (deg C) Value: 4 vs. 22
  misc_feature: MA Experiment 108534 PARAMETER Experiment Name: Zm_4deg_Cold_P Parameter: Timepoint (hr) Value: 6
  misc_feature: MA Experiment 108534 PARAMETER Experiment Name: Zm_4deg_Cold_P Parameter: Tissue Value: Aerial
  misc_feature: MA Experiment ID: 108544 Result: Down-regulated in Transcription
  misc_feature: MA Experiment ID: 108545 Result: Down-regulated in Transcription
  misc_feature: MA Experiment 108545 PARAMETER Experiment Name: Zm_Imbibed_Seeds_P Parameter: Age (day) Value: 3 vs. 2
  misc_feature: MA Experiment 108545 PARAMETER Experiment Name: Zm_Imbibed_Seeds_P Parameter: Organism Value: Zea mays
  misc_feature: MA Experiment 108545 PARAMETER Experiment Name: Zm_Imbibed_Seeds_P Parameter: Plant Line Value: 35A19
  misc_feature: MA Experiment 108545 PARAMETER Experiment Name: Zm_Imbibed_Seeds_P Parameter: Tissue Value: Aerial vs. Embryo
  misc_feature: MA Experiment ID: 20000488 Result: Down-regulated in Transcription
  misc_feature: MA Experiment 20000488 PARAMETER Experiment Name: Zm_50mM_NH4NO3_L_to_H_P Parameter: Organism Value: Zea mays
  misc_feature: MA Experiment 20000488 PARAMETER Experiment Name: Zm_50mM_NH4NO3_L_to_H_P Parameter: Timepoint (hr) Value: 8
  misc_feature: MA Experiment 20000488 PARAMETER Experiment Name: Zm_50mM_NH4NO3_L_to_H_P Parameter: Tissue Value: Leaves
  misc_feature: MA Experiment 20000488 PARAMETER Experiment Name: Zm_50mM_NH4NO3_L_to_H_P Parameter: Treatment Value: 50mM NH4NO3 vs. 100mM Mannitol
  misc_feature: MA Experiment ID: 20001608 Result: Down-regulated in Transcription
  misc_feature: MA Experiment 20001608 PARAMETER Experiment Name: Zm_50ppm_KNO3_L-to-H_P Parameter: Age (day) Value: 21
  misc_feature: MA Experiment 20001608 PARAMETER Experiment Name: Zm_50ppm_KNO3_L-to-H_P Parameter: Organism Value: Zea mays
  misc_feature: MA Experiment 20001608 PARAMETER Experiment Name: Zm_50ppm_KNO3_L-to-H_P Parameter: Plant Line Value: 35A19
  misc_feature: MA Experiment 20001608 PARAMETER Experiment Name: Zm_50ppm_KNO3_L-to-H_P Parameter: Timepoint (hr) Value: 48
  misc_feature: MA Experiment 20001608 PARAMETER Experiment Name: Zm_50ppm_KNO3_L-to-H_P Parameter: Tissue Value: Shoots
  misc_feature: MA Experiment 20001608 PARAMETER Experiment Name: Zm_50ppm_KNO3_L-to-H_P Parameter: Treatment Value: 50ppm KNO3 vs. 50ppm KCl
tccaccgaagcatctccatcgcctccccgtccgcctcctcctcctcctccacctctacctccaccggcgccgccgcctcgtcctactccaacaacaacaatccgctcgcccgcttccccgtcgagcccgcccaccaccgcgacgtggccacgcggcacttcgtcggcggcaaggtgccgctgggcctcaaacggaaggcgctccgcgtcctcgtcaccggcggcgccggcttcgtcggcagccacctggtggaccgcctcctcgagcgcggcgacagcgttatcgtcgtcgataacttcttcaccggccgcaaggacaacgttctgcaccacctcaacgacccaaacttcgagatgatccgccacgatgtcgtcgagcccatcctgctcgaggtcgaccagatctaccacctcgcctgcccggcgtcccccgtccactacaaatacaaccccatcaagacaatcaagaccaatgtggttgggactctgaacatgctcggattagcaaagaggatcaacgccaggttcctcctcaccagtaccagtgaggtctatggtgatcctctccagcacccgcaggtggagacttactggggcaatgtcaatcccatcggtgtcaggagctgttacgatgagggcaagcgtacagctgaaacgttgaccatggattaccaccgtggtgccaaccttgaggttaggatcgcacgtatcttcaatacatatggccctcgcatgtgcattgacgatggccgtgttgtcagtaactttgttgctcaggcactgaggaaggagcccttgacggtttatggtgatggaaagcaaaccaggagtttccaatatgtttctgatctggttgagggtctgatgaagctgatggaaggcgagcatgtggggccattcaacctgggtaaccctggcgagttcaccatgcttgagcttgccaaggttgtccaggacaccatcgaccccaacgcacggatcgagttccgcaagaacacccaggacgacccgcacaagcgcaagcccgacatcagccgcgccaaggagttccttgggtgggagccgaagatccccctgcgtgagggccttcccctcatggtctccgacttccgcaagcgcatcttcggcgaccaagacgctgctgccaccaccaccggaaaccagcaaggttaggatgaaggagcgcacatgacatggaaatttttggtggccctgcttctagctgcttggttgctctctccttactgacaaaagctatgggccacgtagttcgttgggaatgtgttactggaatacctcggctgatgctgtaatgccattctttttttcccctgtattttttctttctcagttctctcagtccttagctatacaaaaaaaaagttcagttgaacagttggagataaacccggatgatctaattctttgttgagagcatagcatcatatatatggtataaacc

SEQ ID NO: 1999 - protein, 389 aa, Zea mays subsp. mays
  peptide (1)..(389): Ceres Seq. ID no. 12348942
  misc_feature (69)..(373): Pfam Name: NAD dependent epimerase/dehydratase family Pfam Description: NAD dependent epimerase/dehydratase family
  misc_feature (67)..(373): Homolog of NCBI NO: 13591616 NR Description: UDP-D-glucuronate carboxy-lyase [Pisum sativum]
  misc_feature (58)..(115): Homolog of NCBI NO: 34908082 NR Description: P0506B12.30 [Oryza sativa (japonica
  misc_feature (156)..(376): Homolog of NCBI NO: 34908082 NR Description: P0506B12.30 [Oryza sativa (japonica
  misc_feature (6)..(378): Homolog of NCBI NO: 30693847 NR Description: NAD-dependent epimerase/dehydratase family
  misc_feature (6)..(378): Homolog of NCBI NO: 11270116 NR Description: dTDP-glucose 4-6-dehydratase-like protein -
  misc_feature (58)..(376): Homolog of NCBI NO: 25396402 NR Description: UDP-glucuronic acid decarboxylase
  misc_feature (6)..(378): Homolog of NCBI NO: 17473549 NR Description: dTDP-glucose 4-6-dehydratase-like protein
  misc_feature (55)..(384): Homolog of NCBI NO: 2129578 NR Description: dTDP-glucose 4-6-dehydratase homolog D18 -
  misc_feature (55)..(384): Homolog of NCBI NO: 15229334 NR Description: dTDP-glucose 4-6-dehydratase homolog D18; protein
  misc_feature (55)..(386): Homolog of NCBI NO: 15227109 NR Description: putative dTDP-glucose 4-6-dehydratase; protein
HRSISIASPSASSSSSTSTSTGAAASSYSNNNNPLARFPVEPAHHRDVATRHFVGGKVPLGLKRKALRVLVTGGAGFVGSHLVDRLLERGDSVIVVDNFFTGRKDNVLHHLNDPNFEMIRHDVVEPILLEVDQIYHLACPASPVHYKYNPIKTIKTNVVGTLNMLGLAKRINARFLLTSTSEVYGDPLQHPQVETYWGNVNPIGVRSCYDEGKRTAETLTMDYHRGANLEVRIARIFNTYGPRMCIDDGRVVSNFVAQALRKEPLTVYGDGKQTRSFQYVSDLVEGLMKLMEGEHVGPFNLGNPGEFTMLELAKVVQDTIDPNARIEFRKNTQDDPHKRKPDISRAKEFLGWEPKIPLREGLPLMVSDFRKRIFGDQDAAATTTGNQQG

SEQ ID NO: 2000 - protein, 272 aa, Zea mays subsp. mays
  peptide (1)..(272): Ceres Seq. ID no. 12348943
  misc_feature (1)..(256): Pfam Name: NAD dependent epimerase/dehydratase family Pfam Description: NAD dependent epimerase/dehydratase family
  misc_feature (1)..(256): Homolog of NCBI NO: 15226950 NR Description: putative nucleotide-sugar dehydratase
  misc_feature (1)..(256): Homolog of NCBI NO: 13591616 NR Description: UDP-D-glucuronate carboxy-lyase [Pisum sativum]
  misc_feature (39)..(259): Homolog of NCBI NO: 34908082 NR Description: P0506B12.30 [Oryza sativa (japonica
  misc_feature (1)..(261): Homolog of NCBI NO: 30693847 NR Description: NAD-dependent epimerase/dehydratase family
  misc_feature (1)..(261): Homolog of NCBI NO: 11270116 NR Description: dTDP-glucose 4-6-dehydratase-like protein -
  misc_feature (1)..(259): Homolog of NCBI NO: 25396402 NR Description: UDP-glucuronic acid decarboxylase
  misc_feature (1)..(261): Homolog of NCBI NO: 17473549 NR Description: dTDP-glucose 4-6-dehydratase-like protein
  misc_feature (1)..(267): Homolog of NCBI NO: 2129578 NR Description: dTDP-glucose 4-6-dehydratase homolog D18 -
  misc_feature (1)..(267): Homolog of NCBI NO: 15229334 NR Description: dTDP-glucose 4-6-dehydratase homolog D18; protein
  misc_feature (1)..(269): Homolog of NCBI NO: 15227109 NR Description: putative dTDP-glucose 4-6-dehydratase; protein
MIRHDVVEPILLEVDQIYHLACPASPVHYKYNPIKTIKTNVVGTLNMLGLAKRINARFLLTSTSEVYGDPLQHPQVETYWGNVNPIGVRSCYDEGKRTAETLTMDYHRGANLEVRIARIFNTYGPRMCIDDGRVVSNFVAQALRKEPLTVYGDGKQTRSFQYVSDLVEGLMKLMEGEHVGPFNLGNPGEFTMLELAKVVQDTIDPNARIEFRKNTQDDPHKRKPDISRAKEFLGWEPKIPLREGLPLMVSDFRKRIFGDQDAAATTTGNQQG

SEQ ID NO: 2001 - protein, 226 aa, Zea mays subsp. mays
  peptide (1)..(226): Ceres Seq. ID no. 12348944
  misc_feature (1)..(210): Pfam Name: NAD dependent epimerase/dehydratase family Pfam Description: NAD dependent epimerase/dehydratase family
  misc_feature (1)..(210): Homolog of NCBI NO: 15226950 NR Description: putative nucleotide-sugar dehydratase
  misc_feature (1)..(210): Homolog of NCBI NO: 13591616 NR Description: UDP-D-glucuronate carboxy-lyase [Pisum sativum]
  misc_feature (1)..(213): Homolog of NCBI NO: 34908082 NR Description: P0506B12.30 [Oryza sativa (japonica
  misc_feature (1)..(215): Homolog of NCBI NO: 30693847 NR Description: NAD-dependent epimerase/dehydratase family
  misc_feature (1)..(215): Homolog of NCBI NO: 11270116 NR Description: dTDP-glucose 4-6-dehydratase-like protein -
  misc_feature (1)..(213): Homolog of NCBI NO: 25396402 NR Description: UDP-glucuronic acid decarboxylase
  misc_feature (1)..(215): Homolog of NCBI NO: 17473549 NR Description: dTDP-glucose 4-6-dehydratase-like protein
  misc_feature (1)..(221): Homolog of NCBI NO: 2129578 NR Description: dTDP-glucose 4-6-dehydratase homolog D18 -
  misc_feature (1)..(221): Homolog of NCBI NO: 15229334 NR Description: dTDP-glucose 4-6-dehydratase homolog D18; protein
  misc_feature (1)..(223): Homolog of NCBI NO: 15227109 NR Description: putative dTDP-glucose 4-6-dehydratase; protein
MLGLAKRINARFLLTSTSEVYGDPLQHPQVETYWGNVNPIGVRSCYDEGKRTAETLTMDYHRGANLEVRIARIFNTYGPRMCIDDGRVVSNFVAQALRKEPLTVYGDGKQTRSFQYVSDLVEGLMKLMEGEHVGPFNLGNPGEFTMLELAKVVQDTIDPNARIEFRKNTQDDPHKRKPDISRAKEFLGWEPKIPLREGLPLMVSDFRKRIFGDQDAAATTTGNQQG

SEQ ID NO: 2002 - DNA, 1473 bp, Zea mays subsp. mays
  misc_feature (1)..(1473): Ceres Seq. ID no. 12407354
  misc_feature: MA Experiment ID: 108504 Result: Down-regulated in Transcription
  misc_feature: MA Experiment 108504 PARAMETER Experiment Name: Zm_Drought_P Parameter: Age (day) Value: 8
  misc_feature: MA Experiment 108504 PARAMETER Experiment Name: Zm_Drought_P Parameter: Organism Value: Zea mays
  misc_feature: MA Experiment 108504 PARAMETER Experiment Name: Zm_Drought_P Parameter: Plant Line Value: 35A19
  misc_feature: MA Experiment 108504 PARAMETER Experiment Name: Zm_Drought_P Parameter: Timepoint (hr) Value: 12
  misc_feature: MA Experiment 108504 PARAMETER Experiment Name: Zm_Drought_P Parameter: Tissue Value: Aerial
  misc_feature: MA Experiment 108504 PARAMETER Experiment Name: Zm_Drought_P Parameter: Treatment Value: Drought vs. No Drought
  misc_feature: MA Experiment ID: 108522 Result: Down-regulated in Transcription
  misc_feature: MA Experiment 108522 PARAMETER Experiment Name: Zm_42deg_Heat_P Parameter: Age (day) Value: 8
  misc_feature: MA Experiment 108522 PARAMETER Experiment Name: Zm_42deg_Heat_P Parameter: Organism Value: Zea mays
  misc_feature: MA Experiment 108522 PARAMETER Experiment Name: Zm_42deg_Heat_P Parameter: Plant Line Value: 35A19
  misc_feature: MA Experiment 108522 PARAMETER Experiment Name: Zm_42deg_Heat_P Parameter: Temperature (deg C) Value: 42 vs. 22
  misc_feature: MA Experiment 108522 PARAMETER Experiment Name: Zm_42deg_Heat_P Parameter: Timepoint (hr) Value: 1
  misc_feature: MA Experiment 108522 PARAMETER Experiment Name: Zm_42deg_Heat_P Parameter: Tissue Value: Aerial
  misc_feature: MA Experiment ID: 108527 Result: Up-regulated in Transcription
  misc_feature: MA Experiment 108527 PARAMETER Experiment Name: Zm_5mM_NO_P Parameter: Age (day) Value: 8
  misc_feature: MA Experiment 108527 PARAMETER Experiment Name: Zm_5mM_NO_P Parameter: Organism Value: Zea mays
  misc_feature: MA Experiment 108527 PARAMETER Experiment Name: Zm_5mM_NO_P Parameter: Plant Line Value: 35A19
  misc_feature: MA Experiment 108527 PARAMETER Experiment Name: Zm_5mM_NO_P Parameter: Timepoint (hr) Value: 6
  misc_feature: MA Experiment 108527 PARAMETER Experiment Name: Zm_5mM_NO_P Parameter: Tissue Value: Aerial
  misc_feature: MA Experiment 108527 PARAMETER Experiment Name: Zm_5mM_NO_P Parameter: Treatment Value: 5mM NO vs. No Treatment
  misc_feature: MA Experiment ID: 108528 Result: Up-regulated in Transcription
  misc_feature: MA Experiment 108528 PARAMETER Experiment Name: Zm_Imbibed_Seeds_P Parameter: Age (day) Value: 5 vs. 2
  misc_feature: MA Experiment 108528 PARAMETER Experiment Name: Zm_Imbibed_Seeds_P Parameter: Organism Value: Zea mays
  misc_feature: MA Experiment 108528 PARAMETER Experiment Name: Zm_Imbibed_Seeds_P Parameter: Plant Line Value: 35A19
  misc_feature: MA Experiment 108528 PARAMETER Experiment Name: Zm_Imbibed_Seeds_P Parameter: Tissue Value: Aerial vs. Embryo
  misc_feature: MA Experiment ID: 108539 Result: Up-regulated in Transcription
  misc_feature: MA Experiment 108539 PARAMETER Experiment Name: Zm_20percent_PEG_P Parameter: Age (day) Value: 8
  misc_feature: MA Experiment 108539 PARAMETER Experiment Name: Zm_20percent_PEG_P Parameter: Organism Value: Zea mays
  misc_feature: MA Experiment 108539 PARAMETER Experiment Name: Zm_20percent_PEG_P Parameter: Plant Line Value: 35A19
  misc_feature: MA Experiment 108539 PARAMETER Experiment Name: Zm_20percent_PEG_P Parameter: Timepoint (hr) Value: 1
  misc_feature: MA Experiment 108539 PARAMETER Experiment Name: Zm_20percent_PEG_P Parameter: Tissue Value: Aerial
  misc_feature: MA Experiment 108539 PARAMETER Experiment Name: Zm_20percent_PEG_P Parameter: Treatment Value: 20percent PEG vs. No Treatment
  misc_feature: MA Experiment ID: 108540 Result: Down-regulated in Transcription
  misc_feature: MA Experiment 108540 PARAMETER Experiment Name: Zm_20percent_PEG_P Parameter: Age (day) Value: 8
  misc_feature: MA Experiment 108540 PARAMETER Experiment Name: Zm_20percent_PEG_P Parameter: Organism Value: Zea mays
  misc_feature: MA Experiment 108540 PARAMETER Experiment Name: Zm_20percent_PEG_P Parameter: Plant Line Value: 35A19
  misc_feature: MA Experiment 108540 PARAMETER Experiment Name: Zm_20percent_PEG_P Parameter: Timepoint (hr) Value: 6
  misc_feature: MA Experiment 108540 PARAMETER Experiment Name: Zm_20percent_PEG_P Parameter: Tissue Value: Aerial
  misc_feature: MA Experiment 108540 PARAMETER Experiment Name: Zm_20percent_PEG_P Parameter: Treatment Value: 20percent PEG vs. No Treatment
  misc_feature: MA Experiment ID: 108543 Result: Down-regulated in Transcription
  misc_feature: MA Experiment ID: 108556 Result: Down-regulated in Transcription
  misc_feature: MA Experiment 108556 PARAMETER Experiment Name: Zm_Drought_P Parameter: Age (day) Value: 9
  misc_feature: MA Experiment 108556 PARAMETER Experiment Name: Zm_Drought_P Parameter: Organism Value: Zea mays
  misc_feature: MA Experiment 108556 PARAMETER Experiment Name: Zm_Drought_P Parameter: Plant Line Value: 35A19
  misc_feature: MA Experiment 108556 PARAMETER Experiment Name: Zm_Drought_P Parameter: Timepoint (hr) Value: 24
  misc_feature: MA Experiment 108556 PARAMETER Experiment Name: Zm_Drought_P Parameter: Tissue Value: Aerial
  misc_feature: MA Experiment 108556 PARAMETER Experiment Name: Zm_Drought_P Parameter: Treatment Value: Drought vs. No Drought
  misc_feature: MA Experiment ID: 108559 Result: Up-regulated in Transcription
  misc_feature: MA Experiment 108559 PARAMETER Experiment Name: Zm_5mM_NO_P Parameter: Age (day) Value: 8
  misc_feature: MA Experiment 108559 PARAMETER Experiment Name: Zm_5mM_NO_P Parameter: Organism Value: Zea mays
  misc_feature: MA Experiment 108559 PARAMETER Experiment Name: Zm_5mM_NO_P Parameter: Plant Line Value: 35A19
  misc_feature: MA Experiment 108559 PARAMETER Experiment Name: Zm_5mM_NO_P Parameter: Timepoint (hr) Value: 12
  misc_feature: MA Experiment 108559 PARAMETER Experiment Name: Zm_5mM_NO_P Parameter: Tissue Value: Aerial
  misc_feature: MA Experiment 108559 PARAMETER Experiment Name: Zm_5mM_NO_P Parameter: Treatment Value: 5mM NO vs. No Treatment
  misc_feature: MA Experiment ID: 108689 Result: Down-regulated in Transcription
  misc_feature: MA Experiment 108689 PARAMETER Experiment Name: Zm_Drought_Roots_P Parameter: Age (day) Value: 9
  misc_feature: MA Experiment 108689 PARAMETER Experiment Name: Zm_Drought_Roots_P Parameter: Organism Value: Zea mays
  misc_feature: MA Experiment 108689 PARAMETER Experiment Name: Zm_Drought_Roots_P Parameter: Plant Line Value: 35A19
  misc_feature: MA Experiment 108689 PARAMETER Experiment Name: Zm_Drought_Roots_P Parameter: Timepoint (hr) Value: 24
  misc_feature: MA Experiment 108689 PARAMETER Experiment Name: Zm_Drought_Roots_P Parameter: Tissue Value: Roots
  misc_feature: MA Experiment 108689 PARAMETER Experiment Name: Zm_Drought_Roots_P Parameter: Treatment Value: Drought vs. No Drought
  misc_feature: MA Experiment ID: 20000477 Result: Up-regulated in Transcription
  misc_feature: MA Experiment 20000477 PARAMETER Experiment Name: Zm_5mM_SA_P Parameter: Age (day) Value: 10
  misc_feature: MA Experiment 20000477 PARAMETER Experiment Name: Zm_5mM_SA_P Parameter: Organism Value: Zea mays
  misc_feature: MA Experiment 20000477 PARAMETER Experiment Name: Zm_5mM_SA_P Parameter: Plant Line Value: 35A19
  misc_feature: MA Experiment 20000477 PARAMETER Experiment Name: Zm_5mM_SA_P Parameter: Timepoint (hr) Value: 48
  misc_feature: MA Experiment 20000477 PARAMETER Experiment Name: Zm_5mM_SA_P Parameter: Tissue Value: Aerial
  misc_feature: MA Experiment 20000477 PARAMETER Experiment Name: Zm_5mM_SA_P Parameter: Treatment Value: 5mM SA vs. No Treatment
  misc_feature: MA Experiment ID: 20000478 Result: Up-regulated in Transcription
  misc_feature: MA Experiment 20000478 PARAMETER Experiment Name: Zm_5mM_SA_P Parameter: Age (day) Value: 11
  misc_feature: MA Experiment 20000478 PARAMETER Experiment Name: Zm_5mM_SA_P Parameter: Organism Value: Zea mays
  misc_feature: MA Experiment 20000478 PARAMETER Experiment Name: Zm_5mM_SA_P Parameter: Plant Line Value: 35A19
  misc_feature: MA Experiment 20000478 PARAMETER Experiment Name: Zm_5mM_SA_P Parameter: Timepoint (hr) Value: 72
  misc_feature: MA Experiment 20000478 PARAMETER Experiment Name: Zm_5mM_SA_P Parameter: Tissue Value: Aerial
  misc_feature: MA Experiment 20000478 PARAMETER Experiment Name: Zm_5mM_SA_P Parameter: Treatment Value: 5mM SA vs. No Treatment
  misc_feature: MA Experiment ID: 20000480 Result: Down-regulated in Transcription
  misc_feature: MA Experiment 20000480 PARAMETER Experiment Name: Zm_Drought_P Parameter: Age (day) Value: 11
  misc_feature: MA Experiment 20000480 PARAMETER Experiment Name: Zm_Drought_P Parameter: Organism Value: Zea mays
  misc_feature: MA Experiment 20000480 PARAMETER Experiment Name: Zm_Drought_P Parameter: Plant Line Value: 35A19
  misc_feature: MA Experiment 20000480 PARAMETER Experiment Name: Zm_Drought_P Parameter: Timepoint (hr) Value: 72
  misc_feature: MA Experiment 20000480 PARAMETER Experiment Name: Zm_Drought_P Parameter: Tissue Value: Aerial
  misc_feature: MA Experiment 20000480 PARAMETER Experiment Name: Zm_Drought_P Parameter: Treatment Value: Drought vs. No Drought
  misc_feature: MA Experiment ID: 20000488 Result: Up-regulated in Transcription
  misc_feature: MA Experiment 20000488 PARAMETER Experiment Name: Zm_50mM_NH4NO3_L_to_H_P Parameter: Organism Value: Zea mays
  misc_feature: MA Experiment 20000488 PARAMETER Experiment Name: Zm_50mM_NH4NO3_L_to_H_P Parameter: Timepoint (hr) Value: 8
  misc_feature: MA Experiment 20000488 PARAMETER Experiment Name: Zm_50mM_NH4NO3_L_to_H_P Parameter: Tissue Value: Leaves
  misc_feature: MA Experiment 20000488 PARAMETER Experiment Name: Zm_50mM_NH4NO3_L_to_H_P Parameter: Treatment Value: 50mM NH4NO3 vs. 100mM Mannitol
  misc_feature: MA Experiment ID: 20000533 Result: Up-regulated in Transcription
  misc_feature: MA Experiment 20000533 PARAMETER Experiment Name: Zm_0.001percent_MeJA_P Parameter: Age (day) Value: 11
  misc_feature: MA Experiment 20000533 PARAMETER Experiment Name: Zm_0.001percent_MeJA_P Parameter: Organism Value: Zea mays
  misc_feature: MA Experiment 20000533 PARAMETER Experiment Name: Zm_0.001percent_MeJA_P Parameter: Plant Line Value: 35A19
  misc_feature: MA Experiment 20000533 PARAMETER Experiment Name: Zm_0.001percent_MeJA_P Parameter: Timepoint (hr) Value: 72
  misc_feature: MA Experiment 20000533 PARAMETER Experiment Name: Zm_0.001percent_MeJA_P Parameter: Tissue Value: Aerial
  misc_feature: MA Experiment 20000533 PARAMETER Experiment Name: Zm_0.001percent_MeJA_P Parameter: Treatment Value: 0.001percent MeJA vs. No Treatment
  misc_feature: MA Experiment ID: 20000626 Result: Up-regulated in Transcription
  misc_feature: MA Experiment 20000626 PARAMETER Experiment Name: Zm_Herbicide-Treatments_P Parameter: Timepoint (hr) Value: 12
  misc_feature: MA Experiment 20000626 PARAMETER Experiment Name: Zm_Herbicide-Treatments_P Parameter: Tissue Value: Aerial
  misc_feature: MA Experiment 20000626 PARAMETER Experiment Name: Zm_Herbicide-Treatments_P Parameter: Treatment Value: Roundup vs. No Treatment
  misc_feature: MA Experiment ID: 20001610 Result: Down-regulated in Transcription
  misc_feature: MA Experiment 20001610 PARAMETER Experiment Name: Zm_50ppm_KNO3_L-to-H_P Parameter: Age (day) Value: 19
  misc_feature: MA Experiment 20001610 PARAMETER Experiment Name: Zm_50ppm_KNO3_L-to-H_P Parameter: Organism Value: Zea mays
  misc_feature: MA Experiment 20001610 PARAMETER Experiment Name: Zm_50ppm_KNO3_L-to-H_P Parameter: Plant Line Value: 35A19
  misc_feature: MA Experiment 20001610 PARAMETER Experiment Name: Zm_50ppm_KNO3_L-to-H_P Parameter: Timepoint (hr) Value: 2
  misc_feature: MA Experiment 20001610 PARAMETER Experiment Name: Zm_50ppm_KNO3_L-to-H_P Parameter: Tissue Value: Roots
  misc_feature: MA Experiment 20001610 PARAMETER Experiment Name: Zm_50ppm_KNO3_L-to-H_P Parameter: Treatment Value: 50ppm KNO3 vs. 50ppm KCl
aatgtccactcagatctgaaatgtcaatggaatccgttgccgttgccgtcgtggcggtgccgttcccggcgcagggccacctcaacggcatgctgcacttgtctctgctactcgcgtcccgagggctttccgtgcactacgcggcgccggggccgcacgtccgccaggcgcgcgcgcgcgtgcacggctggggcgacgacgcccaccgccgcatcgagttccacgagctcgaggtccccgcgtacgccaccccgccgccggacccggtcgcgccctcgccgttcccgacccacctcatccccatgagcgaggccttcctcgcgggcgcgcgcgccccagtcgccagcctcatcgggagggtctccgcgcgccaccgccgcgtggtggtcctgtacgatcgcctcagctccttcgccgcccccgaggcggcgcggatccccaacggcgaagcgttctgcctgcagtgcgtggccgcgtgcttcgacgccgcgtggacggacgccgggcagcggctcctgcgcaagcacggcctcgacgccccgcaccccggcgcctgcatgccgagggagttcgtggagtacattgtcaggacgcaggaggacagccggagtccggcgttcgctggggtagtggcgaacacgtgccgcgcgatcgagagcgagttcatcgacgtggtggccggggaccctgagaaccgaggaaagagagtcttcgcagtcgggccgatgaatccgctgcttaacgtgaccgcgccgacagcgggacagagtgcacggcacgagtgcttggactggctcgacaagcaaccgccggcgtcggtgctgtacgtgtcgttcggcacgacgtcgtcgctgcgggcggagcagatcgcggaactcgccgcggcgctgcgcgacagcaaacagcggttcgtctgggttctgcgcgacgctgatcgcggtgtggtacacgaggaggaagccgtggagagtaggcacgccaggttcctatccgagttcaccgaggaaactcaaggcatcgggttggtgatcaccgggtgggcgccgcagctggagatcctggcccacggcgccacggcagctttcatgagtcactgcggctggaactcgaccatggagagcctgagccacgggaagccgatgctcgcctggcccatgcactccgaccagccgctggtggcggagctcgtgtgcaagtgcctcaaggccgggctcctcgtaaggccatgggagcaacacagtgctgtgacacctgcggaaaccatccgcgaggtgatcgagaaggtgatggcacgcgatgaaggtttggcggtccgggagagggccaaggagctcatggagtttattcgccgctctgtggccgagggcgggtcttcgcgcaaggaccttgacgacttcgttgcttacatagcaagatgaaatgcgtcctgtatttgactatttctactagtttcaattttgagttctcgtgatg

SEQ ID NO: 2003 - protein, 471 aa, Zea mays subsp. mays
  peptide (1)..(471): Ceres Seq. ID no. 12407355
  misc_feature (14)..(471): Homolog of NCBI NO: 20067056 NR Description: putative glucosyltransferase [Phaseolus lunatus]
  misc_feature (14)..(377): Homolog of NCBI NO: 38345592 NR Description: OSJNBb0012E24.10 [Oryza sativa (japonica
  misc_feature (6)..(471): Homolog of NCBI NO: 34899110 NR Description: putative cis-zeatin O-glucosyltransferase
  misc_feature (14)..(471): Homolog of NCBI NO: 38345407 NR Description: OSJNBa0017B10.13 [Oryza sativa (japonica
  misc_feature (13)..(471): Homolog of NCBI NO: 38345403 NR Description: OSJNBa0017B10.9 [Oryza sativa (japonica
  misc_feature (8)..(471): Homolog of NCBI NO: 19743738 NR Description: cis-zeatin O-glucosyltransferase 2 [Zea mays]
  misc_feature (7)..(471): Homolog of NCBI NO: 38345593 NR Description: OSJNBb0012E24.11 [Oryza sativa (japonica
  misc_feature (9)..(471): Homolog of NCBI NO: 18568243 NR Description: putative cis-zeatin O-glucosyltransferase [Zea
  misc_feature (8)..(471): Homolog of NCBI NO: 14091010 NR Description: cis-zeatin O-glucosyltransferase [Zea mays]
  misc_feature (7)..(471): Homolog of NCBI NO: 38345594 NR Description: OSJNBb0012E24.12 [Oryza sativa (japonica
CPLRSEMSMESVAVAVVAVPFPAQGHLNGMLHLSLLLASRGLSVHYAAPGPHVRQARARVHGWGDDAHRRIEFHELEVPAYATPPPDPVAPSPFPTHLIPMSEAFLAGARAPVASLIGRVSARHRRVVVLYDRLSSFAAPEAARIPNGEAFCLQCVAACFDAAWTDAGQRLLRKHGLDAPHPGACMPREFVEYIVRTQEDSRSPAFAGVVANTCRAIESEFIDVVAGDPENRGKRVFAVGPMNPLLNVTAPTAGQSARHECLDWLDKQPPASVLYVSFGTTSSLRAEQIAELAAALRDSKQRFVWVLRDADRGVVHEEEAVESRHARFLSEFTEETQGIGLVITGWAPQLEILAHGATAAFMSHCGWNSTMESLSHGKPMLAWPMHSDQPLVAELVCKCLKAGLLVRPWEQHSAVTPAETIREVIEKVMARDEGLAVRERAKELMEFIRRSVAEGGSSRKDLDDFVAYIAR

SEQ ID NO: 2004 - protein, 465 aa, Zea mays subsp. mays
  peptide (1)..(465): Ceres Seq. ID no. 12407356
  misc_feature (8)..(465): Homolog of NCBI NO: 20067056 NR Description: putative glucosyltransferase [Phaseolus lunatus]
  misc_feature (8)..(371): Homolog of NCBI NO: 38345592 NR Description: OSJNBb0012E24.10 [Oryza sativa (japonica
  misc_feature (1)..(465): Homolog of NCBI NO: 34899110 NR Description: putative cis-zeatin O-glucosyltransferase
  misc_feature (8)..(465): Homolog of NCBI NO: 38345407 NR Description: OSJNBa0017B10.13 [Oryza sativa (japonica
  misc_feature (7)..(465): Homolog of NCBI NO: 38345403 NR Description: OSJNBa0017B10.9 [Oryza sativa (japonica
  misc_feature (2)..(465): Homolog of NCBI NO: 19743738 NR Description: cis-zeatin O-glucosyltransferase 2 [Zea mays]
  misc_feature (1)..(465): Homolog of NCBI NO: 38345593 NR Description: OSJNBb0012E24.11 [Oryza sativa (japonica
  misc_feature (3)..(465): Homolog of NCBI NO: 18568243 NR Description: putative cis-zeatin O-glucosyltransferase [Zea
  misc_feature (2)..(465): Homolog of NCBI NO: 14091010 NR Description: cis-zeatin O-glucosyltransferase [Zea mays]
  misc_feature (1)..(465): Homolog of NCBI NO: 38345594 NR Description: OSJNBb0012E24.12 [Oryza sativa (japonica
MSMESVAVAVVAVPFPAQGHLNGMLHLSLLLASRGLSVHYAAPGPHVRQARARVHGWGDDAHRRIEFHELEVPAYATPPPDPVAPSPFPTHLIPMSEAFLAGARAPVASLIGRVSARHRRVVVLYDRLSSFAAPEAARIPNGEAFCLQCVAACFDAAWTDAGQRLLRKHGLDAPHPGACMPREFVEYIVRTQEDSRSPAFAGVVANTCRAIESEFIDVVAGDPENRGKRVFAVGPMNPLLNVTAPTAGQSARHECLDWLDKQPPASVLYVSFGTTSSLRAEQIAELAAALRDSKQRFVWVLRDADRGVVHEEEAVESRHARFLSEFTEETQGIGLVITGWAPQLEILAHGATAAFMSHCGWNSTMESLSHGKPMLAWPMHSDQPLVAELVCKCLKAGLLVRPWEQHSAVTPAETIREVIEKVMARDEGLAVRERAKELMEFIRRSVAEGGSSRKDLDDFVAYIAR

SEQ ID NO: 2005 - protein, 463 aa, Zea mays subsp. mays
  peptide (1)..(463): Ceres Seq. ID no. 12407357
  misc_feature (6)..(463): Homolog of NCBI NO: 20067056 NR Description: putative glucosyltransferase [Phaseolus lunatus]
  misc_feature (6)..(369): Homolog of NCBI NO: 38345592 NR Description: OSJNBb0012E24.10 [Oryza sativa (japonica
  misc_feature (1)..(463): Homolog of NCBI NO: 34899110 NR Description: putative cis-zeatin O-glucosyltransferase
  misc_feature (6)..(463): Homolog of NCBI NO: 38345407 NR Description: OSJNBa0017B10.13 [Oryza sativa (japonica
  misc_feature (5)..(463): Homolog of NCBI NO: 38345403 NR Description: OSJNBa0017B10.9 [Oryza sativa (japonica
  misc_feature (1)..(463): Homolog of NCBI NO: 19743738 NR Description: cis-zeatin O-glucosyltransferase 2 [Zea mays]
  misc_feature (1)..(463): Homolog of NCBI NO: 38345593 NR Description: OSJNBb0012E24.11 [Oryza sativa (japonica
  misc_feature (1)..(463): Homolog of NCBI NO: 18568243 NR Description: putative cis-zeatin O-glucosyltransferase [Zea
  misc_feature (1)..(463): Homolog of NCBI NO: 14091010 NR Description: cis-zeatin O-glucosyltransferase [Zea mays]
  misc_feature (1)..(463): Homolog of NCBI NO: 38345594 NR Description: OSJNBb0012E24.12 [Oryza sativa (japonica
MESVAVAVVAVPFPAQGHLNGMLHLSLLLASRGLSVHYAAPGPHVRQARARVHGWGDDAHRRIEFHELEVPAYATPPPDPVAPSPFPTHLIPMSEAFLAGARAPVASLIGRVSARHRRVVVLYDRLSSFAAPEAARIPNGEAFCLQCVAACFDAAWTDAGQRLLRKHGLDAPHPGACMPREFVEYIVRTQEDSRSPAFAGVVANTCRAIESEFIDVVAGDPENRGKRVFAVGPMNPLLNVTAPTAGQSARHECLDWLDKQPPASVLYVSFGTTSSLRAEQIAELAAALRDSKQRFVWVLRDADRGVVHEEEAVESRHARFLSEFTEETQGIGLVITGWAPQLEILAHGATAAFMSHCGWNSTMESLSHGKPMLAWPMHSDQPLVAELVCKCLKAGLLVRPWEQHSAVTPAETIREVIEKVMARDEGLAVRERAKELMEFIRRSVAEGGSSRKDLDDFVAYIAR

SEQ ID NO: 2006 - DNA, 1491 bp, Zea mays subsp. mays
  misc_feature (1)..(1491): Ceres Seq. ID no. 12382090
  misc_feature: MA Experiment ID: 108527 Result: Up-regulated in Transcription
  misc_feature: MA Experiment 108527 PARAMETER Experiment Name: Zm_5mM_NO_P Parameter: Age (day) Value: 8
  misc_feature: MA Experiment 108527 PARAMETER Experiment Name: Zm_5mM_NO_P Parameter: Organism Value: Zea mays
  misc_feature: MA Experiment 108527 PARAMETER Experiment Name: Zm_5mM_NO_P Parameter: Plant Line Value: 35A19
  misc_feature: MA Experiment 108527 PARAMETER Experiment Name: Zm_5mM_NO_P Parameter: Timepoint (hr) Value: 6
  misc_feature: MA Experiment 108527 PARAMETER Experiment Name: Zm_5mM_NO_P Parameter: Tissue Value: Aerial
  misc_feature: MA Experiment 108527 PARAMETER Experiment Name: Zm_5mM_NO_P Parameter: Treatment Value: 5mM NO vs. No Treatment
  misc_feature: MA Experiment ID: 108544 Result: Down-regulated in Transcription
  misc_feature: MA Experiment ID: 108556 Result: Down-regulated in Transcription
  misc_feature: MA Experiment 108556 PARAMETER Experiment Name: Zm_Drought_P Parameter: Age (day) Value: 9
  misc_feature: MA Experiment 108556 PARAMETER Experiment Name: Zm_Drought_P Parameter: Organism Value: Zea mays
  misc_feature: MA Experiment 108556 PARAMETER Experiment Name: Zm_Drought_P Parameter: Plant Line Value: 35A19
  misc_feature: MA Experiment 108556 PARAMETER Experiment Name: Zm_Drought_P Parameter: Timepoint (hr) Value: 24
  misc_feature: MA Experiment 108556 PARAMETER Experiment Name: Zm_Drought_P Parameter: Tissue Value: Aerial
  misc_feature: MA Experiment 108556 PARAMETER Experiment Name: Zm_Drought_P Parameter: Treatment Value: Drought vs. No Drought
  misc_feature: MA Experiment ID: 108559 Result: Up-regulated in Transcription
  misc_feature: MA Experiment 108559 PARAMETER Experiment Name: Zm_5mM_NO_P Parameter: Age (day) Value: 8
  misc_feature: MA Experiment 108559 PARAMETER Experiment Name: Zm_5mM_NO_P Parameter: Organism Value: Zea mays
  misc_feature: MA Experiment 108559 PARAMETER Experiment Name: Zm_5mM_NO_P Parameter: Plant Line Value: 35A19
  misc_feature: MA Experiment 108559 PARAMETER Experiment Name: Zm_5mM_NO_P Parameter: Timepoint (hr) Value: 12
  misc_feature: MA Experiment 108559 PARAMETER Experiment Name: Zm_5mM_NO_P Parameter: Tissue Value: Aerial
  misc_feature: MA Experiment 108559 PARAMETER Experiment Name: Zm_5mM_NO_P Parameter: Treatment Value: 5mM NO vs. No Treatment
  misc_feature: MA Experiment ID: 20000477 Result: Up-regulated in Transcription
  misc_feature: MA Experiment 20000477 PARAMETER Experiment Name: Zm_5mM_SA_P Parameter: Age (day) Value: 10
  misc_feature: MA Experiment 20000477 PARAMETER Experiment Name: Zm_5mM_SA_P Parameter: Organism Value: Zea mays
  misc_feature: MA Experiment 20000477 PARAMETER Experiment Name: Zm_5mM_SA_P Parameter: Plant Line Value: 35A19
  misc_feature: MA Experiment 20000477 PARAMETER Experiment Name: Zm_5mM_SA_P Parameter: Timepoint (hr) Value: 48
  misc_feature: MA Experiment 20000477 PARAMETER Experiment Name: Zm_5mM_SA_P Parameter: Tissue Value: Aerial
  misc_feature: MA Experiment 20000477 PARAMETER Experiment Name: Zm_5mM_SA_P Parameter: Treatment Value: 5mM SA vs. No Treatment
  misc_feature: MA Experiment ID: 20000479 Result: Down-regulated in Transcription
  misc_feature: MA Experiment 20000479 PARAMETER Experiment Name: Zm_Drought_P Parameter: Age (day) Value: 10
  misc_feature: MA Experiment 20000479 PARAMETER Experiment Name: Zm_Drought_P Parameter: Organism Value: Zea mays
  misc_feature: MA Experiment 20000479 PARAMETER Experiment Name: Zm_Drought_P Parameter: Plant Line Value: 35A19
  misc_feature: MA Experiment 20000479 PARAMETER Experiment Name: Zm_Drought_P Parameter: Timepoint (hr) Value: 48
  misc_feature: MA Experiment 20000479 PARAMETER Experiment Name: Zm_Drought_P Parameter: Tissue Value: Aerial
  misc_feature: MA Experiment 20000479 PARAMETER Experiment Name: Zm_Drought_P Parameter: Treatment Value: Drought vs. No Drought
  misc_feature: MA Experiment ID: 20000480 Result: Down-regulated in Transcription
  misc_feature: MA Experiment 20000480 PARAMETER Experiment Name: Zm_Drought_P Parameter: Age (day) Value: 11
  misc_feature: MA Experiment 20000480 PARAMETER Experiment Name: Zm_Drought_P Parameter: Organism Value: Zea mays
  misc_feature: MA Experiment 20000480 PARAMETER Experiment Name: Zm_Drought_P Parameter: Plant Line Value: 35A19
  misc_feature: MA Experiment 20000480 PARAMETER Experiment Name: Zm_Drought_P Parameter: Timepoint (hr) Value: 72
  misc_feature: MA Experiment 20000480 PARAMETER Experiment Name: Zm_Drought_P Parameter: Tissue Value: Aerial
  misc_feature: MA Experiment 20000480 PARAMETER Experiment Name: Zm_Drought_P Parameter: Treatment Value: Drought vs. No Drought
  misc_feature: MA Experiment ID: 20000492 Result: Up-regulated in Transcription
  misc_feature: MA Experiment 20000492 PARAMETER Experiment Name: Zm_Hybrid_Seed_Dev_P Parameter: DAP Value: 12
  misc_feature: MA Experiment 20000492 PARAMETER Experiment Name: Zm_Hybrid_Seed_Dev_P Parameter: Organism Value: Zea mays
  misc_feature: MA Experiment 20000492 PARAMETER Experiment Name: Zm_Hybrid_Seed_Dev_P Parameter: Plant Line Value: 35A19
  misc_feature: MA Experiment 20000492 PARAMETER Experiment Name: Zm_Hybrid_Seed_Dev_P Parameter: Tissue Value: Fert Kernel vs. Unfert Floret
  misc_feature: MA Experiment ID: 20000535 Result: Down-regulated in Transcription
  misc_feature: MA Experiment 20000535 PARAMETER Experiment Name: Zm_Hybrid_Seed_Dev_P Parameter: DAP Value: 30 vs. 12
  misc_feature: MA Experiment 20000535 PARAMETER Experiment Name: Zm_Hybrid_Seed_Dev_P Parameter: Organism Value: Zea mays
  misc_feature: MA Experiment 20000535 PARAMETER Experiment Name: Zm_Hybrid_Seed_Dev_P Parameter: Plant Line Value: 35A19
  misc_feature: MA Experiment 20000535 PARAMETER Experiment Name: Zm_Hybrid_Seed_Dev_P Parameter: Tissue Value: Embryo vs. Unfert Floret
agtggcacagtggcagtggctggccacccaatcgtctcgttcgtcatctacctctccctcctccaacccaagctaagctaaacagcttacagctcgctccgccatcaccgtatcgagagagacagagacaggctagcgagggaatggagaggatgctggccaggctgatgcagcggcggagctccgtccccctgtccggcctcctccaccacggaggagcgcccgccccgctgcaggccgccggcgccactggggcctccccgctgatcttctcgcaccagcagcagcagcagcacacggccgcctccgccgtcctgccggggctcaagatcagggactccgcgtcccagctgatcgggaggactccgatggtgtacctgaacaaggtgaccgaggggtgcggcgcccgggtggctgccaagctcgagttcctgcagccgtccttcagcgtcaaagacagaccggcgatctcgatgctggaagacgccgaaaagagggggctcatcactccaggaaagaccacgttgatcgagcccacgtcggggaacatgggcatcgggctggcgttcatggcggcgctcaaggggtacgagctcgtgctcaccatgccgtcctacaccagcctggagaggagggtgacgatgcgggcgttcggcgccaacctggtgctgaccgacccggccaaagggatgggcgggacggtgaggaaggcgacggagctgtacgagagacatcccagcgcgcacatgctccagcagttccagaaccctgccaacgtcaaggtgcactacgacacgacgggaccggagatctgggaggacacgcttggccaggtcgatatcttcgtcatggggatcgggagcggcggcaccgtcacgggagtcggcaagtacctcaaggagaaaaaccctaacgcaaagatctatggagttgaacctgccgaggcaaatgttctgaatggtggaaagccaggacctcacctcatcactggaaacggagtagggttcaagccagatattctggacatggacgtgatggaaaaggtgctcgaggtgaaaggtgaggacgccgtcaagatggctcgagagctggcagtcaaggagggtcttttggtcgggatatcatcgggagccaacaccgttgctgctctcgagctagccaagaggccggagaacaaggggaagctcatcgtgaccgttcttccgagccttggcgagcggtacctgtcgtccgcgctgttcgatgagctgaggaaggaggcacaagccatggaaccggtcgcggtggattgatctcgccggtcaagctagctagcctgccgggcacgctggagatctggttcctatcgtcacagctgccagccaagccaattgtacttccattcccccctcatccagttttttattttattttaccgtcagtgtgtcacctcatctatgaaccttgcgaaaaggaaaaaaaaagtgcatgaataatgatgggaaaatgttg

SEQ ID NO: 2007 - protein, 429 aa, Zea mays subsp. mays
  peptide (1)..(429): Ceres Seq. ID no. 12382091
  misc_feature (114)..(403): Pfam Name: Pyridoxal-phosphate dependent enzyme Pfam Description: Pyridoxal-phosphate dependent enzyme
  misc_feature (103)..(425): Homolog of NCBI NO: 421795 NR Description: cysteine synthase (EC 4.2.99.8) B precursor,
  misc_feature (103)..(425): Homolog of NCBI NO: 12644209 NR Description: CYSTEINE SYNTHASE, CHLOROPLAST PRECURSOR SULFHYDRYLASE) (O-ACETYLSERINE (THIOL)-LYASE) (CSASE B) (CS-B)
  misc_feature (103)..(425): Homolog of NCBI NO: 303902 NR Description: cysteine synthase [Spinacia oleracea]
  misc_feature (102)..(429): Homolog of NCBI NO: 11995005 NR Description: beta-cyanoalanine synthase like protein [Solanum
  misc_feature (106)..(429): Homolog of NCBI NO: 15233111 NR Description: cysteine synthase AtcysC1
  misc_feature (97)..(429): Homolog of NCBI NO: 1071913 NR Description: cysteine synthase (EC 4.2.99.8) C precursor,
  misc_feature (105)..(429): Homolog of NCBI NO: 11559260 NR Description: beta-cyanoalanine synthase [Solanum tuberosum]
  misc_feature (105)..(429): Homolog of NCBI NO: 30840956 NR Description: beta-cyanoalanine synthase [Betula pendula]
  misc_feature (48)..(429): Homolog of NCBI NO: 38346461 NR Description: OSJNBa0019G23.9 [Oryza sativa (japonica
  misc_feature (48)..(429): Homolog of NCBI NO: 10241630 NR Description: cysteine synthase [Oryza sativa (indica
WHSGSGWPPNRLVRHLPLPPPTQAKLNSLQLAPPSPYRERQRQASEGMERMLARLMQRRSSVPLSGLLHHGGAPAPLQAAGATGASPLIFSHQQQQQHTAASAVLPGLKIRDSASQLIGRTPMVYLNKVTEGCGARVAAKLEFLQPSFSVKDRPAISMLEDAEKRGLITPGKTTLIEPTSGNMGIGLAFMAALKGYELVLTMPSYTSLERRVTMRAFGANLVLTDPAKGMGGTVRKATELYERHPSAHMLQQFQNPANVKVHYDTTGPEIWEDTLGQVDIFVMGIGSGGTVTGVGKYLKEKNPNAKIYGVEPAEANVLNGGKPGPHLITGNGVGFKPDILDMDVMEKVLEVKGEDAVKMARELAVKEGLLVGISSGANTVAALELAKRPENKGKLIVTVLPSLGERYLSSALFDELRKEAQAMEPVAVD

SEQ ID NO: 2008 - protein, 382 aa, Zea mays subsp. mays
  peptide (1)..(382): Ceres Seq. ID no. 12382092
  misc_feature (67)..(356): Pfam Name: Pyridoxal-phosphate dependent enzyme Pfam Description: Pyridoxal-phosphate dependent enzyme
  misc_feature (56)..(378): Homolog of NCBI NO: 421795 NR Description: cysteine synthase (EC 4.2.99.8) B precursor,
  misc_feature (56)..(378): Homolog of NCBI NO: 12644209 NR Description: CYSTEINE SYNTHASE, CHLOROPLAST PRECURSOR SULFHYDRYLASE) (O-ACETYLSERINE (THIOL)-LYASE) (CSASE B) (CS-B)
  misc_feature (56)..(378): Homolog of NCBI NO: 303902 NR Description: cysteine synthase [Spinacia oleracea]
  misc_feature (55)..(382): Homolog of NCBI NO: 11995005 NR Description: beta-cyanoalanine synthase like protein [Solanum
  misc_feature (59)..(382): Homolog of NCBI NO: 15233111 NR Description: cysteine synthase AtcysC1
  misc_feature (50)..(382): Homolog of NCBI NO: 1071913 NR Description: cysteine synthase (EC 4.2.99.8) C precursor,
  misc_feature (58)..(382): Homolog of NCBI NO: 11559260 NR Description: beta-cyanoalanine synthase [Solanum tuberosum]
  misc_feature (58)..(382): Homolog of NCBI NO: 30840956 NR Description: beta-cyanoalanine synthase [Betula pendula]
  misc_feature (1)..(382): Homolog of NCBI NO: 38346461 NR Description: OSJNBa0019G23.9 [Oryza sativa (japonica
  misc_feature (1)..(382): Homolog of NCBI NO: 10241630 NR Description: cysteine synthase [Oryza sativa (indica
MERMLARLMQRRSSVPLSGLLHHGGAPAPLQAAGATGASPLIFSHQQQQQHTAASAVLPGLKIRDSASQLIGRTPMVYLNKVTEGCGARVAAKLEFLQPSFSVKDRPAISMLEDAEKRGLITPGKTTLIEPTSGNMGIGLAFMAALKGYELVLTMPSYTSLERRVTMRAFGANLVLTDPAKGMGGTVRKATELYERHPSAHMLQQFQNPANVKVHYDTTGPEIWEDTLGQVDIFVMGIGSGGTVTGVGKYLKEKNPNAKIYGVEPAEANVLNGGKPGPHLITGNGVGFKPDILDMDVMEKVLEVKGEDAVKMARELAVKEGLLVGISSGANTVAALELAKRPENKGKLIVTVLPSLGERYLSSALFDELRKEAQAMEPVAVD

SEQ ID NO: 2009 - protein, 379 aa, Zea mays subsp. mays
  peptide (1)..(379): Ceres Seq. ID no. 12382093
  misc_feature (64)..(353): Pfam Name: Pyridoxal-phosphate dependent enzyme Pfam Description: Pyridoxal-phosphate dependent enzyme
  misc_feature (53)..(375): Homolog of NCBI NO: 421795 NR Description: cysteine synthase (EC 4.2.99.8) B precursor,
  misc_feature (53)..(375): Homolog of NCBI NO: 12644209 NR Description: CYSTEINE SYNTHASE, CHLOROPLAST PRECURSOR SULFHYDRYLASE) (O-ACETYLSERINE (THIOL)-LYASE) (CSASE B) (CS-B)
  misc_feature (53)..(375): Homolog of NCBI NO: 303902 NR Description: cysteine synthase [Spinacia oleracea]
  misc_feature (52)..(379): Homolog of NCBI NO: 11995005 NR Description: beta-cyanoalanine synthase like protein [Solanum
  misc_feature (56)..(379): Homolog of NCBI NO: 15233111 NR Description: cysteine synthase AtcysC1
  misc_feature (47)..(379): Homolog of NCBI NO: 1071913 NR Description: cysteine synthase (EC 4.2.99.8) C precursor,
  misc_feature (55)..(379): Homolog of NCBI NO: 11559260 NR Description: beta-cyanoalanine synthase [Solanum tuberosum]
  misc_feature (55)..(379): Homolog of NCBI NO: 30840956 NR Description: beta-cyanoalanine synthase [Betula pendula]
  misc_feature (1)..(379): Homolog of NCBI NO: 38346461 NR Description: OSJNBa0019G23.9 [Oryza sativa (japonica
  misc_feature (1)..(379): Homolog of NCBI NO: 10241630 NR Description: cysteine synthase [Oryza sativa (indica
MLARLMQRRSSVPLSGLLHHGGAPAPLQAAGATGASPLIFSHQQQQQHTAASAVLPGLKIRDSASQLIGRTPMVYLNKVTEGCGARVAAKLEFLQPSFSVKDRPAISMLEDAEKRGLITPGKTTLIEPTSGNMGIGLAFMAALKGYELVLTMPSYTSLERRVTMRAFGANLVLTDPAKGMGGTVRKATELYERHPSAHMLQQFQNPANVKVHYDTTGPEIWEDTLGQVDIFVMGIGSGGTVTGVGKYLKEKNPNAKIYGVEPAEANVLNGGKPGPHLITGNGVGFKPDILDMDVMEKVLEVKGEDAVKMARELAVKEGLLVGISSGANTVAALELAKRPENKGKLIVTVLPSLGERYLSSALFDELRKEAQAMEPVAVD

SEQ ID NO: 2010 - DNA, 1844 bp, Zea mays subsp. mays
  misc_feature (1)..(1844): Ceres Seq. ID no. 12405181
  misc_feature: MA Experiment ID: 108504 Result: Up-regulated in Transcription
  misc_feature: MA Experiment 108504 PARAMETER Experiment Name: Zm_Drought_P Parameter: Age (day) Value: 8
  misc_feature: MA Experiment 108504 PARAMETER Experiment Name: Zm_Drought_P Parameter: Organism Value: Zea mays
  misc_feature: MA Experiment 108504 PARAMETER Experiment Name: Zm_Drought_P Parameter: Plant Line Value: 35A19
  misc_feature: MA Experiment 108504 PARAMETER Experiment Name: Zm_Drought_P Parameter: Timepoint (hr) Value: 12
  misc_feature: MA Experiment 108504 PARAMETER Experiment Name: Zm_Drought_P Parameter: Tissue Value: Aerial
  misc_feature: MA Experiment 108504 PARAMETER Experiment Name: Zm_Drought_P Parameter: Treatment Value: Drought vs. No Drought
  misc_feature: MA Experiment ID: 108527 Result: Up-regulated in Transcription
  misc_feature: MA Experiment 108527 PARAMETER Experiment Name: Zm_5mM_NO_P Parameter: Age (day) Value: 8
  misc_feature: MA Experiment 108527 PARAMETER Experiment Name: Zm_5mM_NO_P Parameter: Organism Value: Zea mays
  misc_feature: MA Experiment 108527 PARAMETER Experiment Name: Zm_5mM_NO_P Parameter: Plant Line Value: 35A19
  misc_feature: MA Experiment 108527 PARAMETER Experiment Name: Zm_5mM_NO_P Parameter: Timepoint (hr) Value: 6
  misc_feature: MA Experiment 108527 PARAMETER Experiment Name: Zm_5mM_NO_P Parameter: Tissue Value: Aerial
  misc_feature: MA Experiment 108527 PARAMETER Experiment Name: Zm_5mM_NO_P Parameter: Treatment Value: 5mM NO vs. No Treatment
  misc_feature: MA Experiment ID: 108528 Result: Down-regulated in Transcription
  misc_feature: MA Experiment 108528 PARAMETER Experiment Name: Zm_Imbibed_Seeds_P Parameter: Age (day) Value: 5 vs. 2
  misc_feature: MA Experiment 108528 PARAMETER Experiment Name: Zm_Imbibed_Seeds_P Parameter: Organism Value: Zea mays
  misc_feature: MA Experiment 108528 PARAMETER Experiment Name: Zm_Imbibed_Seeds_P Parameter: Plant Line Value: 35A19
  misc_feature: MA Experiment 108528 PARAMETER Experiment Name: Zm_Imbibed_Seeds_P Parameter: Tissue Value: Aerial vs. Embryo
  misc_feature: MA Experiment ID: 108530 Result: Down-regulated in Transcription
  misc_feature: MA Experiment 108530 PARAMETER Experiment Name: Zm_Imbibed_Seeds_P Parameter: Age (day) Value: 6 vs. 2
  misc_feature: MA Experiment 108530 PARAMETER Experiment Name: Zm_Imbibed_Seeds_P Parameter: Organism Value: Zea mays
  misc_feature: MA Experiment 108530 PARAMETER Experiment Name: Zm_Imbibed_Seeds_P Parameter: Plant Line Value: 35A19
  misc_feature: MA Experiment 108530 PARAMETER Experiment Name: Zm_Imbibed_Seeds_P Parameter: Tissue Value: Aerial vs. Embryo
  misc_feature: MA Experiment ID: 108536 Result: Up-regulated in Transcription
  misc_feature: MA Experiment 108536 PARAMETER Experiment Name: Zm_Meristem_P Parameter: Age (day) Value: 8
  misc_feature: MA Experiment 108536 PARAMETER Experiment Name: Zm_Meristem_P Parameter: Organism Value: Zea mays
  misc_feature: MA Experiment 108536 PARAMETER Experiment Name: Zm_Meristem_P Parameter: Plant Line Value: 35A19
  misc_feature: MA Experiment 108536 PARAMETER Experiment Name: Zm_Meristem_P Parameter: Tissue Value: Shoot Meristem vs. Above Shoot Meristem
  misc_feature: MA Experiment ID: 108540 Result: Up-regulated in Transcription
  misc_feature: MA Experiment 108540 PARAMETER Experiment Name: Zm_20percent_PEG_P Parameter: Age (day) Value: 8
  misc_feature: MA Experiment 108540 PARAMETER Experiment Name: Zm_20percent_PEG_P Parameter: Organism Value: Zea mays
  misc_feature: MA Experiment 108540 PARAMETER Experiment Name: Zm_20percent_PEG_P Parameter: Plant Line Value: 35A19
  misc_feature: MA Experiment 108540 PARAMETER Experiment Name: Zm_20percent_PEG_P Parameter: Timepoint (hr) Value: 6
  misc_feature: MA Experiment 108540 PARAMETER Experiment Name: Zm_20percent_PEG_P Parameter: Tissue Value: Aerial
  misc_feature: MA Experiment 108540 PARAMETER Experiment Name: Zm_20percent_PEG_P Parameter: Treatment Value: 20percent PEG vs. No Treatment
  misc_feature: MA Experiment ID: 108542 Result: Up-regulated in Transcription
  misc_feature: MA Experiment 108542 PARAMETER Experiment Name: Zm_150mM_NaCl_P Parameter: Age (day) Value: 8
  misc_feature: MA Experiment 108542 PARAMETER Experiment Name: Zm_150mM_NaCl_P Parameter: Organism Value: Zea mays
  misc_feature: MA Experiment 108542 PARAMETER Experiment Name: Zm_150mM_NaCl_P Parameter: Plant Line Value: 35A19
  misc_feature: MA Experiment 108542 PARAMETER Experiment Name: Zm_150mM_NaCl_P Parameter: Timepoint (hr) Value: 6
  misc_feature: MA Experiment 108542 PARAMETER Experiment Name: Zm_150mM_NaCl_P Parameter: Tissue Value: Aerial
  misc_feature: MA Experiment 108542 PARAMETER Experiment Name: Zm_150mM_NaCl_P Parameter: Treatment Value: 150mM NaCl vs. No Treatment
  misc_feature: MA Experiment ID: 108545 Result: Down-regulated in Transcription
  misc_feature: MA Experiment 108545 PARAMETER Experiment Name: Zm_Imbibed_Seeds_P Parameter: Age (day) Value: 3 vs. 2
  misc_feature: MA Experiment 108545 PARAMETER Experiment Name: Zm_Imbibed_Seeds_P Parameter: Organism Value: Zea mays
  misc_feature: MA Experiment 108545 PARAMETER Experiment Name: Zm_Imbibed_Seeds_P Parameter: Plant Line Value: 35A19
  misc_feature: MA Experiment 108545 PARAMETER Experiment Name: Zm_Imbibed_Seeds_P Parameter: Tissue Value: Aerial vs. Embryo
  misc_feature: MA Experiment ID: 108547 Result: Down-regulated in Transcription
  misc_feature: MA Experiment 108547 PARAMETER Experiment Name: Zm_Imbibed_Seeds_P Parameter: Age (day) Value: 4 vs. 2
  misc_feature: MA Experiment 108547 PARAMETER Experiment Name: Zm_Imbibed_Seeds_P Parameter: Organism Value: Zea mays
  misc_feature: MA Experiment 108547 PARAMETER Experiment Name: Zm_Imbibed_Seeds_P Parameter: Plant Line Value: 35A19
  misc_feature: MA Experiment 108547 PARAMETER Experiment Name: Zm_Imbibed_Seeds_P Parameter: Tissue Value: Aerial vs. Embryo
  misc_feature: MA Experiment ID: 108556 Result: Up-regulated in Transcription
  misc_feature: MA Experiment 108556 PARAMETER Experiment Name: Zm_Drought_P Parameter: Age (day) Value: 9
  misc_feature: MA Experiment 108556 PARAMETER Experiment Name: Zm_Drought_P Parameter: Organism Value: Zea mays
  misc_feature: MA Experiment 108556 PARAMETER Experiment Name: Zm_Drought_P Parameter: Plant Line Value: 35A19
  misc_feature: MA Experiment 108556 PARAMETER Experiment Name: Zm_Drought_P Parameter: Timepoint (hr) Value: 24
  misc_feature: MA Experiment 108556 PARAMETER Experiment Name: Zm_Drought_P Parameter: Tissue Value: Aerial
  misc_feature: MA Experiment 108556 PARAMETER Experiment Name: Zm_Drought_P Parameter: Treatment Value: Drought vs. No Drought
  misc_feature: MA Experiment ID: 108597 Result: Up-regulated in Transcription
  misc_feature: MA Experiment 108597 PARAMETER Experiment Name: Zm_100uM_ABA_P Parameter: Age (day) Value: 9
  misc_feature: MA Experiment 108597 PARAMETER Experiment Name: Zm_100uM_ABA_P Parameter: Organism Value: Zea mays
  misc_feature: MA Experiment 108597 PARAMETER Experiment Name: Zm_100uM_ABA_P Parameter: Plant Line Value: 35A19
  misc_feature: MA Experiment 108597 PARAMETER Experiment Name: Zm_100uM_ABA_P Parameter: Timepoint (hr) Value: 24
  misc_feature: MA Experiment 108597 PARAMETER Experiment Name: Zm_100uM_ABA_P Parameter: Tissue Value: Aerial
  misc_feature: MA Experiment 108597 PARAMETER Experiment Name: Zm_100uM_ABA_P Parameter: Treatment Value: 100uM ABA vs. No Treatment
  misc_feature: MA Experiment ID: 20000108 Result: Up-regulated in Transcription
  misc_feature: MA Experiment 20000108 PARAMETER Experiment Name: Zm_Root-Tips_P Parameter: Age (day) Value: 12
  misc_feature: MA Experiment 20000108 PARAMETER Experiment Name: Zm_Root-Tips_P Parameter: Organism Value: Zea mays
  misc_feature: MA Experiment 20000108 PARAMETER Experiment Name: Zm_Root-Tips_P Parameter: Tissue Value: Root tips vs. Root mid region    35
  misc_feature: MA Experiment 20000108 PARAMETER Experiment Name: Zm_Root-Tips_P Parameter: Tissue Value: Root tips vs. Root mid region   Sequence Listing-Misc Features (4)
  misc_feature: MA Experiment ID: 20000477 Result: Up-regulated in Transcription
  misc_feature: MA Experiment 20000477 PARAMETER Experiment Name: Zm_5mM_SA_P Parameter: Age (day) Value: 10
  misc_feature: MA Experiment 20000477 PARAMETER Experiment Name: Zm_5mM_SA_P Parameter: Organism Value: Zea mays
  misc_feature: MA Experiment 20000477 PARAMETER Experiment Name: Zm_5mM_SA_P Parameter: Plant Line Value: 35A19
  misc_feature: MA Experiment 20000477 PARAMETER Experiment Name: Zm_5mM_SA_P Parameter: Timepoint (hr) Value: 48
  misc_feature: MA Experiment 20000477 PARAMETER Experiment Name: Zm_5mM_SA_P Parameter: Tissue Value: Aerial
  misc_feature: MA Experiment 20000477 PARAMETER Experiment Name: Zm_5mM_SA_P Parameter: Treatment Value: 5mM SA vs. No Treatment
  misc_feature: MA Experiment ID: 20000478 Result: Up-regulated in Transcription
  misc_feature: MA Experiment 20000478 PARAMETER Experiment Name: Zm_5mM_SA_P Parameter: Age (day) Value: 11
  misc_feature: MA Experiment 20000478 PARAMETER Experiment Name: Zm_5mM_SA_P Parameter: Organism Value: Zea mays
  misc_feature: MA Experiment 20000478 PARAMETER Experiment Name: Zm_5mM_SA_P Parameter: Plant Line Value: 35A19
  misc_feature: MA Experiment 20000478 PARAMETER Experiment Name: Zm_5mM_SA_P Parameter: Timepoint (hr) Value: 72
  misc_feature: MA Experiment 20000478 PARAMETER Experiment Name: Zm_5mM_SA_P Parameter: Tissue Value: Aerial
  misc_feature: MA Experiment 20000478 PARAMETER Experiment Name: Zm_5mM_SA_P Parameter: Treatment Value: 5mM SA vs. No Treatment
  misc_feature: MA Experiment ID: 20000480 Result: Up-regulated in Transcription
  misc_feature: MA Experiment 20000480 PARAMETER Experiment Name: Zm_Drought_P Parameter: Age (day) Value: 11
  misc_feature: MA Experiment 20000480 PARAMETER Experiment Name: Zm_Drought_P Parameter: Organism Value: Zea mays
  misc_feature: MA Experiment 20000480 PARAMETER Experiment Name: Zm_Drought_P Parameter: Plant Line Value: 35A19
  misc_feature: MA Experiment 20000480 PARAMETER Experiment Name: Zm_Drought_P Parameter: Timepoint (hr) Value: 72
  misc_feature: MA Experiment 20000480 PARAMETER Experiment Name: Zm_Drought_P Parameter: Tissue Value: Aerial
  misc_feature: MA Experiment 20000480 PARAMETER Experiment Name: Zm_Drought_P Parameter: Treatment Value: Drought vs. No Drought
  misc_feature: MA Experiment ID: 20000492 Result: Up-regulated in Transcription
  misc_feature: MA Experiment 20000492 PARAMETER Experiment Name: Zm_Hybrid_Seed_Dev_P Parameter: DAP Value: 12
  misc_feature: MA Experiment 20000492 PARAMETER Experiment Name: Zm_Hybrid_Seed_Dev_P Parameter: Organism Value: Zea mays
  misc_feature: MA Experiment 20000492 PARAMETER Experiment Name: Zm_Hybrid_Seed_Dev_P Parameter: Plant Line Value: 35A19
  misc_feature: MA Experiment 20000492 PARAMETER Experiment Name: Zm_Hybrid_Seed_Dev_P Parameter: Tissue Value: Fert Kernel vs. Unfert Floret
  misc_feature: MA Experiment ID: 20000533 Result: Up-regulated in Transcription
  misc_feature: MA Experiment 20000533 PARAMETER Experiment Name: Zm_0.001percent_MeJA_P Parameter: Age (day) Value: 11
  misc_feature: MA Experiment 20000533 PARAMETER Experiment Name: Zm_0.001percent_MeJA_P Parameter: Organism Value: Zea mays
  misc_feature: MA Experiment 20000533 PARAMETER Experiment Name: Zm_0.001percent_MeJA_P Parameter: Plant Line Value: 35A19
  misc_feature: MA Experiment 20000533 PARAMETER Experiment Name: Zm_0.001percent_MeJA_P Parameter: Timepoint (hr) Value: 72
  misc_feature: MA Experiment 20000533 PARAMETER Experiment Name: Zm_0.001percent_MeJA_P Parameter: Tissue Value: Aerial
  misc_feature: MA Experiment 20000533 PARAMETER Experiment Name: Zm_0.001percent_MeJA_P Parameter: Treatment Value: 0.001percent MeJA vs. No Treatment
  misc_feature: MA Experiment ID: 20000535 Result: Up-regulated in Transcription
  misc_feature: MA Experiment 20000535 PARAMETER Experiment Name: Zm_Hybrid_Seed_Dev_P Parameter: DAP Value: 30 vs. 12
  misc_feature: MA Experiment 20000535 PARAMETER Experiment Name: Zm_Hybrid_Seed_Dev_P Parameter: Organism Value: Zea mays
  misc_feature: MA Experiment 20000535 PARAMETER Experiment Name: Zm_Hybrid_Seed_Dev_P Parameter: Plant Line Value: 35A19
  misc_feature: MA Experiment 20000535 PARAMETER Experiment Name: Zm_Hybrid_Seed_Dev_P Parameter: Tissue Value: Embryo vs. Unfert Floret
  misc_feature: MA Experiment ID: 20000626 Result: Up-regulated in Transcription
  misc_feature: MA Experiment 20000626 PARAMETER Experiment Name: Zm_Herbicide-Treatments_P Parameter: Timepoint (hr) Value: 12
  misc_feature: MA Experiment 20000626 PARAMETER Experiment Name: Zm_Herbicide-Treatments_P Parameter: Tissue Value: Aerial
  misc_feature: MA Experiment 20000626 PARAMETER Experiment Name: Zm_Herbicide-Treatments_P Parameter: Treatment Value: Roundup vs. No Treatment
  misc_feature: MA Experiment ID: 20000630 Result: Up-regulated in Transcription
  misc_feature: MA Experiment 20000630 PARAMETER Experiment Name: Zm_Herbicide-Treatments_P Parameter: Timepoint (hr) Value: 4
  misc_feature: MA Experiment 20000630 PARAMETER Experiment Name: Zm_Herbicide-Treatments_P Parameter: Tissue Value: Aerial
  misc_feature: MA Experiment 20000630 PARAMETER Experiment Name: Zm_Herbicide-Treatments_P Parameter: Treatment Value: Roundup vs. No Treatment
ctaatcgaaaatcttgtttgtttgcttccgtcgtcccctctccacgtagagcacgcccccggaccaccttttataagcaccaaccatctggccttgccgcgccgattcgccacgaagccgcactgtgagagagggacgcggcctgttgtcccggcttttagacgcaacttccatcgctgcgaagctatccattcgtgttcgtcatggccgccagcgtcaccgtggaaaacctcaaccccaaggtcttaaaatgtgagtatgcagtccgtggggagattgtcatccatgctcagcgcctgcagcaacaactacaaacacaaccagggtctcttccttttgatgagatcctctattgcaatattgggaatccccaatctcttggtcagcaacctgtgacattcttcagggaggttcttgctctttgtgattatccgtgcctcttggaaaaagaggaaaccaaatcattgttcagtgctgatgcaatttctcgagcaaagcagattcttgcaactattcctggaagggcaacaggtgcatatagtcacagtcagggtatcaaaggactgcgtgatgcaattgctgctggaatcatgtcacgtgatggattccctgcaaatgcagatgacattttcattacagacggagcaagtcctggggtccacatgatgatgcaattactgattaggaatgagaaagatggcattctgtgcccaattcctcagtaccccttgtactcagcctccatagctcttcatggtggagctcttgtcccctattaccttaatgaaaaaactgggtggggtttggagatctctgatcttaagatgcaactggaaaatgctcggtcaaaaggcattgatgttagggctttggtggttatcaatccaggaaatccgactgggcaggttcttgctgaagacaaccaatatgatatagtgaaattctgcaaaaatgagggccttgttcttctagctgatgaggtatatcaagagaacatctatgtggacaacaagaaatttaactctttcaagaagattgtaagatccatggggtatggcgaggatgatctccctctagtatcgttacagtctgtttccaaaggatactatggagagtgtggtaaaagaggagggtacatggagattactggcttcagtactccagtaagagagcagatctacaagatagcttcagtgaacctgtgctccaatatcactggtcaaatccttgcgagcctcgtcatgaatccaccaaaggttggagacgaatcatatgcttcctacaaggcagagaaagatggaatccttgagtctttagctcgtcgtgcaaaggcgttggaggatgcattcaacaagcttgagggattttcatgtaacaaggccgaaggagcaatgtatcttttccctcagattcatctgccacagaaggcaatcgaggctgctaaagctgctaagaaagcgcctgacgctttctacgctctccgtctccttgaatcaactggaatcgtcgtggtccctggatctggatttcgtcaagttcctggaacatggcacatcagatgcacgatcctgccgcaggaagacaagatccccgcggtgatcagccgcttcagggctttccatgaggcgttcttggccgaataccgcgactaaactgttacgctgtgtgtgagttaagttggaggttcagtagaactgtagaagagctcagtgacagcgcagaaagaggcagtgttagaaaggcttaggtccttcttcacaggagcaacagttgtctccatcaaggagaaataaaaattttagttttacaacttctcattgacactgttgggttcttgacatggc

SEQ ID NO: 2011 - protein, 482 aa, Zea mays subsp. mays
  peptide (1)..(482): Ceres Seq. ID no. 12405182
  misc_feature (128)..(473): Pfam Name: Aminotransferase class I and II Pfam Description: Aminotransferase class I and II
  misc_feature (1)..(481): Homolog of NCBI NO: 39595413 NR Description: Hypothetical protein CBG04059 [Caenorhabditis
  misc_feature (5)..(482): Homolog of NCBI NO: 30698866 NR Description: alanine aminotransferase, putative [Arabidopsis
  misc_feature (5)..(482): Homolog of NCBI NO: 9082270 NR Description: alanine aminotransferase [Arabidopsis thaliana]
  misc_feature (5)..(482): Homolog of NCBI NO: 21954071 NR Description: putative alanine aminotransferase [Arabidopsis
  misc_feature (2)..(482): Homolog of NCBI NO: 34906732 NR Description: alanine aminotransferase [Oryza sativa (japonica
  misc_feature (1)..(482): Homolog of NCBI NO: 1703227 NR Description: ALANINE AMINOTRANSFERASE 2 (GPT)
  misc_feature (1)..(482): Homolog of NCBI NO: 37533928 NR Description: putative alanine aminotransferase
  misc_feature (1)..(482): Homolog of NCBI NO: 4730884 NR Description: alanine aminotransferase [Oryza sativa]
  misc_feature (1)..(482): Homolog of NCBI NO: 461498 NR Description: ALANINE AMINOTRANSFERASE 2 (GPT)
  misc_feature (1)..(482): Homolog of NCBI NO: 3694807 NR Description: alanine aminotransferase [Zea mays]
MAASVTVENLNPKVLKCEYAVRGEIVIHAQRLQQQLQTQPGSLPFDEILYCNIGNPQSLGQQPVTFFREVLALCDYPCLLEKEETKSLFSADAISRAKQILATIPGRATGAYSHSQGIKGLRDAIAAGIMSRDGFPANADDIFITDGASPGVHMMMQLLIRNEKDGILCPIPQYPLYSASIALHGGALVPYYLNEKTGWGLEISDLKMQLENARSKGIDVRALVVINPGNPTGQVLAEDNQYDIVKFCKNEGLVLLADEVYQENIYVDNKKFNSFKKIVRSMGYGEDDLPLVSLQSVSKGYYGECGKRGGYMEITGFSTPVREQIYKIASVNLCSNITGQILASLVMNPPKVGDESYASYKAEKDGILESLARRAKALEDAFNKLEGFSCNKAEGAMYLFPQIHLPQKAIEAAKAAKKAPDAFYALRLLESTGIVVVPGSGFRQVPGTWHIRCTILPQEDKIPAVISRFRAFHEAFLAEYRD

SEQ ID NO: 2012 - protein, 353 aa, Zea mays subsp. mays
  peptide (1)..(353): Ceres Seq. ID no. 12405183
  misc_feature (1)..(344): Pfam Name: Aminotransferase class I and II Pfam Description: Aminotransferase class I and II
  misc_feature (1)..(352): Homolog of NCBI NO: 39595413 NR Description: Hypothetical protein CBG04059 [Caenorhabditis
  misc_feature (1)..(353): Homolog of NCBI NO: 30698866 NR Description: alanine aminotransferase, putative [Arabidopsis
  misc_feature (1)..(353): Homolog of NCBI NO: 9082270 NR Description: alanine aminotransferase [Arabidopsis thaliana]
  misc_feature (1)..(353): Homolog of NCBI NO: 21954071 NR Description: putative alanine aminotransferase [Arabidopsis
  misc_feature (1)..(353): Homolog of NCBI NO: 34906732 NR Description: alanine aminotransferase [Oryza sativa (japonica
  misc_feature (1)..(353): Homolog of NCBI NO: 1703227 NR Description: ALANINE AMINOTRANSFERASE 2 (GPT)
  misc_feature (1)..(353): Homolog of NCBI NO: 37533928 NR Description: putative alanine aminotransferase
  misc_feature (1)..(353): Homolog of NCBI NO: 4730884 NR Description: alanine aminotransferase [Oryza sativa]
  misc_feature (1)..(353): Homolog of NCBI NO: 461498 NR Description: ALANINE AMINOTRANSFERASE 2 (GPT)
  misc_feature (1)..(353): Homolog of NCBI NO: 3694807 NR Description: alanine aminotransferase [Zea mays]
MSRDGFPANADDIFITDGASPGVHMMMQLLIRNEKDGILCPIPQYPLYSASIALHGGALVPYYLNEKTGWGLEISDLKMQLENARSKGIDVRALVVINPGNPTGQVLAEDNQYDIVKFCKNEGLVLLADEVYQENIYVDNKKFNSFKKIVRSMGYGEDDLPLVSLQSVSKGYYGECGKRGGYMEITGFSTPVREQIYKIASVNLCSNITGQILASLVMNPPKVGDESYASYKAEKDGILESLARRAKALEDAFNKLEGFSCNKAEGAMYLFPQIHLPQKAIEAAKAAKKAPDAFYALRLLESTGIVVVPGSGFRQVPGTWHIRCTILPQEDKIPAVISRFRAFHEAFLAEYRD

SEQ ID NO: 2013 - protein, 329 aa, Zea mays subsp. mays
  peptide (1)..(329): Ceres Seq. ID no. 12405184
  misc_feature (1)..(320): Pfam Name: Aminotransferase class I and II Pfam Description: Aminotransferase class I and II
  misc_feature (1)..(328): Homolog of NCBI NO: 39595413 NR Description: Hypothetical protein CBG04059 [Caenorhabditis
  misc_feature (1)..(329): Homolog of NCBI NO: 30698866 NR Description: alanine aminotransferase, putative [Arabidopsis
  misc_feature (1)..(329): Homolog of NCBI NO: 9082270 NR Description: alanine aminotransferase [Arabidopsis thaliana]
  misc_feature (1)..(329): Homolog of NCBI NO: 21954071 NR Description: putative alanine aminotransferase [Arabidopsis
  misc_feature (1)..(329): Homolog of NCBI NO: 34906732 NR Description: alanine aminotransferase [Oryza sativa (japonica
  misc_feature (1)..(329): Homolog of NCBI NO: 1703227 NR Description: ALANINE AMINOTRANSFERASE 2 (GPT)
  misc_feature (1)..(329): Homolog of NCBI NO: 37533928 NR Description: putative alanine aminotransferase
  misc_feature (1)..(329): Homolog of NCBI NO: 4730884 NR Description: alanine aminotransferase [Oryza sativa]
  misc_feature (1)..(329): Homolog of NCBI NO: 461498 NR Description: ALANINE AMINOTRANSFERASE 2 (GPT)
  misc_feature (1)..(329): Homolog of NCBI NO: 3694807 NR Description: alanine aminotransferase [Zea mays]
MMMQLLIRNEKDGILCPIPQYPLYSASIALHGGALVPYYLNEKTGWGLEISDLKMQLENARSKGIDVRALVVINPGNPTGQVLAEDNQYDIVKFCKNEGLVLLADEVYQENIYVDNKKFNSFKKIVRSMGYGEDDLPLVSLQSVSKGYYGECGKRGGYMEITGFSTPVREQIYKIASVNLCSNITGQILASLVMNPPKVGDESYASYKAEKDGILESLARRAKALEDAFNKLEGFSCNKAEGAMYLFPQIHLPQKAIEAAKAAKKAPDAFYALRLLESTGIVVVPGSGFRQVPGTWHIRCTILPQEDKIPAVISRFRAFHEAFLAEYRD

SEQ ID NO: 2014 - DNA, 1416 bp, Zea mays subsp. mays
  misc_feature (1)..(1416): Ceres Seq. ID no. 12351956
  misc_feature: MA Experiment ID: 108515 Result: Down-regulated in Transcription
  misc_feature: MA Experiment 108515 PARAMETER Experiment Name: Zm_2mM_SA_P Parameter: Age (day) Value: 8
  misc_feature: MA Experiment 108515 PARAMETER Experiment Name: Zm_2mM_SA_P Parameter: Organism Value: Zea mays
  misc_feature: MA Experiment 108515 PARAMETER Experiment Name: Zm_2mM_SA_P Parameter: Plant Line Value: 35A19
  misc_feature: MA Experiment 108515 PARAMETER Experiment Name: Zm_2mM_SA_P Parameter: Timepoint (hr) Value: 12
  misc_feature: MA Experiment 108515 PARAMETER Experiment Name: Zm_2mM_SA_P Parameter: Tissue Value: Aerial
  misc_feature: MA Experiment 108515 PARAMETER Experiment Name: Zm_2mM_SA_P Parameter: Treatment Value: 2mM SA vs. No Treatment
  misc_feature: MA Experiment ID: 108556 Result: Down-regulated in Transcription
  misc_feature: MA Experiment 108556 PARAMETER Experiment Name: Zm_Drought_P Parameter: Age (day) Value: 9
  misc_feature: MA Experiment 108556 PARAMETER Experiment Name: Zm_Drought_P Parameter: Organism Value: Zea mays
  misc_feature: MA Experiment 108556 PARAMETER Experiment Name: Zm_Drought_P Parameter: Plant Line Value: 35A19
  misc_feature: MA Experiment 108556 PARAMETER Experiment Name: Zm_Drought_P Parameter: Timepoint (hr) Value: 24
  misc_feature: MA Experiment 108556 PARAMETER Experiment Name: Zm_Drought_P Parameter: Tissue Value: Aerial
  misc_feature: MA Experiment 108556 PARAMETER Experiment Name: Zm_Drought_P Parameter: Treatment Value: Drought vs. No Drought
  misc_feature: MA Experiment ID: 20000478 Result: Down-regulated in Transcription
  misc_feature: MA Experiment 20000478 PARAMETER Experiment Name: Zm_5mM_SA_P Parameter: Age (day) Value: 11
  misc_feature: MA Experiment 20000478 PARAMETER Experiment Name: Zm_5mM_SA_P Parameter: Organism Value: Zea mays
  misc_feature: MA Experiment 20000478 PARAMETER Experiment Name: Zm_5mM_SA_P Parameter: Plant Line Value: 35A19
  misc_feature: MA Experiment 20000478 PARAMETER Experiment Name: Zm_5mM_SA_P Parameter: Timepoint (hr) Value: 72
  misc_feature: MA Experiment 20000478 PARAMETER Experiment Name: Zm_5mM_SA_P Parameter: Tissue Value: Aerial
  misc_feature: MA Experiment 20000478 PARAMETER Experiment Name: Zm_5mM_SA_P Parameter: Treatment Value: 5mM SA vs. No Treatment
  misc_feature: MA Experiment ID: 20000480 Result: Down-regulated in Transcription
  misc_feature: MA Experiment 20000480 PARAMETER Experiment Name: Zm_Drought_P Parameter: Age (day) Value: 11
  misc_feature: MA Experiment 20000480 PARAMETER Experiment Name: Zm_Drought_P Parameter: Organism Value: Zea mays
  misc_feature: MA Experiment 20000480 PARAMETER Experiment Name: Zm_Drought_P Parameter: Plant Line Value: 35A19
  misc_feature: MA Experiment 20000480 PARAMETER Experiment Name: Zm_Drought_P Parameter: Timepoint (hr) Value: 72
  misc_feature: MA Experiment 20000480 PARAMETER Experiment Name: Zm_Drought_P Parameter: Tissue Value: Aerial
  misc_feature: MA Experiment 20000480 PARAMETER Experiment Name: Zm_Drought_P Parameter: Treatment Value: Drought vs. No Drought
aactcaccaaacaaacactcgagcaaagctcagcctcacacagcctctcctctcgagctagagtgctactagcttagaagaagcagcagcttaccgctgaagctgcagcaatggcgaaatcttacaccttactgttcgtcgcactggtcgttctggcccttctagtgagccccattgcttgctcccgcaagctcgccaagccgaacaagcccaagccgacccacaagccggcggccagggtcacgcccggcagcaaccacaccggtatccccgcagtgtccgccgcctacggctccggcggctggttgtctgccggcgcgacgtactacggcgccccaaacggcgacggcagtgacggcggtgcgtgcgggtaccagaccgccgtcgggcagcgccccttctcgtcgatgatcgccgccgggagcccgtctctgttcaagggaggcaagggctgcggcgcctgctacgaggttaaatgcgacggcaacccggcatgctccggccagccggccaccgtggtcatcaccgacgagtgccccggcggtgtctgcctcgcagaggcggctcacttcgacatgagcggcacctccatgggcgccatggcgaagcccggcatggccgacaggcttcgcgccgccggcatcctcaagatccagtacaagagggtgccgtgcaagtacagcggcgtgaacatcgccttccgggtggaccagggatccaacccgttctacttggaggtgctcatcgagttcgaggacggcgacggcgacctcagcgccgtccacctcatggaggccgggtgcggcacgtggaccccgatggtgcagaactggggcgcgctctggcgctacaactccaacaccggcaaggcgctgaaggcgcccttctcgctccggctgacctccgactccggcagggtgctcgtcgccaacaacgtcatccccgccggctggaaccccggggccacgtaccgctccttggtgaactactcctgattgatgaactgcggcggcggttcggttctccgcgccccattgcatgcgcttggctggattattatgcgtggccaagaagtgctttgcagggtgcgtggtgtttaaggaacgagctagctagtctcgagtttgttttctgagaagaagaaaaaaatgtctgttcgggtgtccgcgagaggcggtggaagaagaagaggaggaggaggacaagaaggttaaggagccgtgtgttcttcactccctccacggtctctgcagtcacctagttatgtgtgtagtggtcggtgtaggtttctttttcgttgtgatggctcaggagaggagttggattggacgttgtatcagtctgtgtgtgtgtgcgcgcgtagttttctgtaccacgcaatcctttcagagaattgaattcctgctttcttgtttc

SEQ ID NO: 2015 - protein, 294 aa, Zea mays subsp. mays
  peptide (1)..(294): Ceres Seq. ID no. 12351957
  misc_feature (195)..(278): Pfam Name: Pollen allergen Pfam Description: Pollen allergen
  misc_feature (62)..(294): Homolog of NCBI NO: 1076486 NR Description: cim1 protein - soybean
  misc_feature (64)..(288): Homolog of NCBI NO: 16517017 NR Description: beta-expansin [Oryza sativa]
  misc_feature (64)..(288): Homolog of NCBI NO: 16303233 NR Description: beta-expansin [Oryza sativa]
  misc_feature (65)..(294): Homolog of NCBI NO: 34101047 NR Description: beta-expansin 1 precursor [Hordeum vulgare]
  misc_feature (65)..(293): Homolog of NCBI NO: 21666630 NR Description: beta-expansin [Oryza sativa]
  misc_feature (49)..(294): Homolog of NCBI NO: 8118428 NR Description: beta-expansin [Oryza sativa]
  misc_feature (49)..(294): Homolog of NCBI NO: 16303229 NR Description: beta-expansin 5 [Oryza sativa]
  misc_feature (1)..(293): Homolog of NCBI NO: 40363749 NR Description: putative beta-expansin [Triticum aestivum]
  misc_feature (1)..(293): Homolog of NCBI NO: 14193767 NR Description: beta-expansin 4 [Zea mays]
  misc_feature (1)..(294): Homolog of NCBI NO: 16517013 NR Description: beta-expansin [Oryza sativa]
MAKSYTLLFVALVVLALLVSPIACSRKLAKPNKPKPTHKPAARVTPGSNHTGIPAVSAAYGSGGWLSAGATYYGAPNGDGSDGGACGYQTAVGQRPFSSMIAAGSPSLFKGGKGCGACYEVKCDGNPACSGQPATVVITDECPGGVCLAEAAHFDMSGTSMGAMAKPGMADRLRAAGILKIQYKRVPCKYSGVNIAFRVDQGSNPFYLEVLIEFEDGDGDLSAVHLMEAGCGTWTPMVQNWGALWRYNSNTGKALKAPFSLRLTSDSGRVLVANNVIPAGWNPGATYRSLVNYS

SEQ ID NO: 2016 - protein, 219 aa, Zea mays subsp. mays
  peptide (1)..(219): Ceres Seq. ID no. 12351958
MRRQPGMLRPAGHRGHHRRVPRRCLPRRGGSLRHERHLHGRHGEARHGRQASRRRHPQDPVQEGAVQVQRREHRLPGGPGIQPVLLGGAHRVRGRRRRPQRRPPHGGRVRHVDPDGAELGRALALQLQHRQGAEGALLAPADLRLRQGARRQQRHPRRLEPRGHVPLLGELLLIDELRRRFGSPRPIACAWLDYYAWPRSALQGAWCLRNELASLEFVF

SEQ ID NO: 2017 - protein, 213 aa, Zea mays subsp. mays
  peptide (1)..(213): Ceres Seq. ID no. 12351959
MLRPAGHRGHHRRVPRRCLPRRGGSLRHERHLHGRHGEARHGRQASRRRHPQDPVQEGAVQVQRREHRLPGGPGIQPVLLGGAHRVRGRRRRPQRRPPHGGRVRHVDPDGAELGRALALQLQHRQGAEGALLAPADLRLRQGARRQQRHPRRLEPRGHVPLLGELLLIDELRRRFGSPRPIACAWLDYYAWPRSALQGAWCLRNELASLEFVF

SEQ ID NO: 2018 - DNA, 1845 bp, Zea mays subsp. mays
  misc_feature (1)..(1845): Ceres Seq. ID no. 12345235
  misc_feature: MA Experiment ID: 108527 Result: Down-regulated in Transcription
  misc_feature: MA Experiment 108527 PARAMETER Experiment Name: Zm_5mM_NO_P Parameter: Age (day) Value: 8
  misc_feature: MA Experiment 108527 PARAMETER Experiment Name: Zm_5mM_NO_P Parameter: Organism Value: Zea mays
  misc_feature: MA Experiment 108527 PARAMETER Experiment Name: Zm_5mM_NO_P Parameter: Plant Line Value: 35A19
  misc_feature: MA Experiment 108527 PARAMETER Experiment Name: Zm_5mM_NO_P Parameter: Timepoint (hr) Value: 6
  misc_feature: MA Experiment 108527 PARAMETER Experiment Name: Zm_5mM_NO_P Parameter: Tissue Value: Aerial
  misc_feature: MA Experiment 108527 PARAMETER Experiment Name: Zm_5mM_NO_P Parameter: Treatment Value: 5mM NO vs. No Treatment
  misc_feature: MA Experiment ID: 108543 Result: Up-regulated in Transcription
aaaacaaactccaagcccatccatcaccagtcctctgtcccctccccgaccgcaacgatctgctttgcatcttccccttcctccaattccagtcccatgcgtaatcgtctttcggaattgaatctctccatgtcatggcgctctgagcaagtacagctgcagtcagtgagagaaatgtaggcaccacaaatcggtccagcaaatccctgctcgtgctctaccaaaaaatccagtctttttccagcccaaatccgcctcttccgctgctgccataaagtccggactttacgaggctttcacgacgtgcgagatttctgttatcgatctccacgaacccgatagcctgccataaagtctgcacagacgcttcgcattgcttcaaccaaagatccatccaaactctgcaccccaaaagctagtacgatctcggggggacatgaagcgcctgcagtgcttcaagaagagcagcggcggcggcaatggtggcgggccggggaagcgcctggagcggcagctgtcgctgggcgagtacaagaaggcagtgtcgtggtccaagtacctcgtagcgccgccgggggctaggatccggagcggcggcgaggagctgtggagcgccgacctgtccaagctggagatccggggcaagtttgcgtcaggccggcacagccgcgtctactccggcaggtacaccggccgcgaggtggccatcaagatggtcagtcanccggaggaggacgccgcgctcgccgctgagctagagcgccagttcgcctccgaggtcgcgctcctacttcgcctccaccacccaaacatcatctcgtttgttgcagcatgcaagaaaccaccagtattctgcatcatcactgagttcatggcagggggctcccttaggaagtatctacatcagcaggagcctcactcagttcccctcaacctagtgctgaaattagctctagatatcgctcgcggaatgagctacctacactcccagggtatactccatagagacctgaaatcagagaacatacttctgggagaagatatgtcagtcaaagtcgcagatttcgggatttcatgcttggaatcacagtgtggaagtggcaaggggtttacaggaacctacaggtggatggctccggagatgatcaaagaggaacatcatactaggaaagtggacgtgtacagctttggaatcgtcatgtgggagatcttgactgctttggtcccgttcagcgacatgactccagagcaggctgctgttgctgttgccctgaagaatgcaaggccgccactgcctgcttcatgccctgtggcaataagccacctgatcatgcagtgctgggcgaccaaccctgacaaaagacctcagtttgatgacatcgtggcgatcctcgagagctacaaggaagcccttgatgaggacccgtcgttcttcttgtcgtatataccacctccaccggaccacggccaccaccaccatcatcagagccttctccggtgcttccctcgctccatgcgaaggtctgcatctctgaaagtatgatcaggccgggatgttgcctctgctcatcgatgctgtgtacaatatgcaccccctttcgactttctttgttttctatgcgcgcgtcggccctctattatgcggcattagcatgctatatgagctagtttatgctctcattttctccttgttggttaattatttccgtcattgatgccttgagtaatgtagagatgacaggcaggcatgcagcttccggttattatctatggatgccatttgcttttggtgatgggaaacatgaaagagccccagtaaatgtaatataattaagctctccatcc

SEQ ID NO: 2019 - protein, 368 aa, Zea mays subsp. mays
  peptide (1)..(368): Ceres Seq. ID no. 12345236
  misc_feature (33)..(352): Homolog of NCBI NO: 18087633 NR Description: AT5g58950/k19m22_150 [Arabidopsis thaliana]
  misc_feature (33)..(352): Homolog of NCBI NO: 18424175 NR Description: protein kinase 6 - like
  misc_feature (56)..(348): Homolog of NCBI NO: 34909474 NR Description: putative protein kinase [Oryza sativa (japonica
  misc_feature (31)..(343): Homolog of NCBI NO: 10241603 NR Description: protein kinase (PK) [Fagus sylvatica]
  misc_feature (1)..(352): Homolog of NCBI NO: 478809 NR Description: protein kinase 6 (EC 2.7.1.-) - soybean
  misc_feature (1)..(127): Homolog of NCBI NO: 7940280 NR Description: F24O1.13 [Arabidopsis thaliana]
  misc_feature (142)..(328): Homolog of NCBI NO: 7940280 NR Description: F24O1.13 [Arabidopsis thaliana]
  misc_feature (53)..(328): Homolog of NCBI NO: 15220773 NR Description: protein kinase, putative; protein id: At1g62400.1
  misc_feature (1)..(328): Homolog of NCBI NO: 7488256 NR Description: protein kinase homolog F24O1.13 - Arabidopsis
  misc_feature (4)..(281): Homolog of NCBI NO: 34894114 NR Description: putative protein kinase [Oryza sativa (japonica
  misc_feature (96)..(96): Xaa is any aa, unknown or other
MKRLQCFKKSSGGGNGGGPGKRLERQLSLGEYKKAVSWSKYLVAPPGARIRSGGEELWSADLSKLEIRGKFASGRHSRVYSGRYTGREVAIKMVSXPEEDAALAAELERQFASEVALLLRLHHPNIISFVAACKKPPVFCIITEFMAGGSLRKYLHQQEPHSVPLNLVLKLALDIARGMSYLHSQGILHRDLKSENILLGEDMSVKVADFGISCLESQCGSGKGFTGTYRWMAPEMIKEEHHTRKVDVYSFGIVMWEILTALVPFSDMTPEQAAVAVALKNARPPLPASCPVAISHLIMQCWATNPDKRPQFDDIVAILESYKEALDEDPSFFLSYIPPPPDHGHHHHHQSLLRCFPRSMRRSASLKV

SEQ ID NO: 2020 - protein, 276 aa, Zea mays subsp. mays
  peptide (1)..(276): Ceres Seq. ID no. 12345237
  misc_feature (1)..(260): Homolog of NCBI NO: 18087633 NR Description: AT5g58950/k19m22_150 [Arabidopsis thaliana]
  misc_feature (1)..(260): Homolog of NCBI NO: 18424175 NR Description: protein kinase 6 - like
  misc_feature (1)..(256): Homolog of NCBI NO: 34909474 NR Description: putative protein kinase [Oryza sativa (japonica
  misc_feature (1)..(251): Homolog of NCBI NO: 10241603 NR Description: protein kinase (PK) [Fagus sylvatica]
  misc_feature (1)..(260): Homolog of NCBI NO: 478809 NR Description: protein kinase 6 (EC 2.7.1.-) - soybean
  misc_feature (1)..(35): Homolog of NCBI NO: 7940280 NR Description: F24O1.13 [Arabidopsis thaliana]
  misc_feature (50)..(236): Homolog of NCBI NO: 7940280 NR Description: F24O1.13 [Arabidopsis thaliana]
  misc_feature (1)..(236): Homolog of NCBI NO: 15220773 NR Description: protein kinase, putative; protein id: At1g62400.1
  misc_feature (1)..(236): Homolog of NCBI NO: 7488256 NR Description: protein kinase homolog F24O1.13 - Arabidopsis
  misc_feature (1)..(189): Homolog of NCBI NO: 34894114 NR Description: putative protein kinase [Oryza sativa (japonica
  misc_feature (4)..(4): Xaa is any aa, unknown or other
MVSXPEEDAALAAELERQFASEVALLLRLHHPNIISFVAACKKPPVFCIITEFMAGGSLRKYLHQQEPHSVPLNLVLKLALDIARGMSYLHSQGILHRDLKSENILLGEDMSVKVADFGISCLESQCGSGKGFTGTYRWMAPEMIKEEHHTRKVDVYSFGIVMWEILTALVPFSDMTPEQAAVAVALKNARPPLPASCPVAISHLIMQCWATNPDKRPQFDDIVAILESYKEALDEDPSFFLSYIPPPPDHGHHHHHQSLLRCFPRSMRRSASLKV

SEQ ID NO: 2021 - protein, 223 aa, Zea mays subsp. mays
  peptide (1)..(223): Ceres Seq. ID no. 12345238
  misc_feature (1)..(183): Homolog of NCBI NO: 7940280 NR Description: F24O1.13 [Arabidopsis thaliana]
  misc_feature (1)..(183): Homolog of NCBI NO: 15220773 NR Description: protein kinase, putative; protein id: At1g62400.1
  misc_feature (1)..(183): Homolog of NCBI NO: 7488256 NR Description: protein kinase homolog F24O1.13 - Arabidopsis
  misc_feature (1)..(136): Homolog of NCBI NO: 34894114 NR Description: putative protein kinase [Oryza sativa (japonica
  misc_feature (1)..(183): Homolog of NCBI NO: 34903666 NR Description: putative protein kinase [Oryza sativa (japonica
  misc_feature (1)..(207): Homolog of NCBI NO: 18087633 NR Description: AT5g58950/k19m22_150 [Arabidopsis thaliana]
  misc_feature (1)..(207): Homolog of NCBI NO: 18424175 NR Description: protein kinase 6 - like
  misc_feature (1)..(203): Homolog of NCBI NO: 34909474 NR Description: putative protein kinase [Oryza sativa (japonica
  misc_feature (1)..(198): Homolog of NCBI NO: 10241603 NR Description: protein kinase (PK) [Fagus sylvatica]
  misc_feature (1)..(207): Homolog of NCBI NO: 478809 NR Description: protein kinase 6 (EC 2.7.1.-) - soybean
MAGGSLRKYLHQQEPHSVPLNLVLKLALDIARGMSYLHSQGILHRDLKSENILLGEDMSVKVADFGISCLESQCGSGKGFTGTYRWMAPEMIKEEHHTRKVDVYSFGIVMWEILTALVPFSDMTPEQAAVAVALKNARPPLPASCPVAISHLIMQCWATNPDKRPQFDDIVAILESYKEALDEDPSFFLSYIPPPPDHGHHHHHQSLLRCFPRSMRRSASLKV

SEQ ID NO: 2022 - DNA, 1385 bp, Zea mays subsp. mays
  misc_feature (1)..(1385): Ceres Seq. ID no. 12351964
  misc_feature: MA Experiment ID: 108535 Result: Up-regulated in Transcription
  misc_feature: MA Experiment 108535 PARAMETER Experiment Name: Zm_Meristem_P Parameter: Age (day) Value: 8
  misc_feature: MA Experiment 108535 PARAMETER Experiment Name: Zm_Meristem_P Parameter: Organism Value: Zea mays
  misc_feature: MA Experiment 108535 PARAMETER Experiment Name: Zm_Meristem_P Parameter: Plant Line Value: 35A19
  misc_feature: MA Experiment 108535 PARAMETER Experiment Name: Zm_Meristem_P Parameter: Tissue Value: Root Meristem vs. Above Root Meristem
accagcctgctccggtcctcttggagttgggcctgcccacctcccggccggtccgccgcgcggttccagtttcgcctctcgtcgccggtcctggcgagccccgcctccttgatctccgaccagcagcttccccactgcccactccccagccccggacgtgcccttcgccggtgctgtcatggcgttcggccgacggagccccggatcctcgcggcaccctcccgcgctcaccatcgtcacggcgctactcctcgcctccctctacttcgccgccgcggcggcggctctatcgcccaccgacgcgatgcacaacaacaactgggccgtgctcgtgtgtacctcccgcttctggtttaattatcgacacatggcgaatacattgtccctatacaggactgttaagagattaggaatacctgatgagcgaatcatacttatgttggcggacgatatggcctgtaacccaaggaacagctatcctgcccaagttttcaataatgagaaccaccagctaaatctctatggtgacaatgttgaggtcgattatcgagggtatgaggtgacagttgaaaatttcttgagagttttgactggccgacatgaaagtgctgtaccaagatcgaagcgtcttcttagtgatgaaggaagtcatatacttttgtacatgactggacatggtggtgatgaatttttgaagttccaagattctgaagagcttcagagccatgacttagcagatgctgtgaagcaaatgaaggagaagcatagatttaaagagctgctgataatggtagatacctgccaagctgctactctcttttcacagcttcagtcacctggtgttttggcgattggtagtagcatgaagggtgaaaactcttattctcaccatcttgattcagatgtaggtgtttctgttgtggataggtttacctattatacacttgctttctttgagaaactgaacatgtatagcaatgcctcactgaacagccttttcacctcatacaatccttccatgctgttgtctactgcatattatcgaatggatctttatgaacgtcccttaaatgaggtgcctgtgacaaatttttttggatcagtcatgaagactctccacactgattcagcctacacaggtttcttggctgcgcatgacaatgaaactccaatgtccacgggagataaccttgatgatcatttcatgttaaagggcagggctatcgcacgaagatcaaccatagaaaaggaggcacaattaacaccgcatggatggactgaagttctggctgaacagctggagggaaagaatactgatactgttgtgatgtatggtctgggagctatgggtatactgttggcactttcaacctggttatcaatgt

SEQ ID NO: 2023 - protein, 402 aa, Zea mays subsp. mays
  peptide (1)..(402): Ceres Seq. ID no. 12351965
  misc_feature (19)..(322): Pfam Name: Peptidase C13 family Pfam Description: Peptidase C13 family
  misc_feature (16)..(311): Homolog of NCBI NO: 20071719 NR Description: Similar to phosphatidylinositol glycan, class K
  misc_feature (16)..(311): Homolog of NCBI NO: 23199983 NR Description: phosphatidylinositol glycan, class K precursor
  misc_feature (16)..(311): Homolog of NCBI NO: 1518259 NR Description: gpi8 [Homo sapiens]
  misc_feature (19)..(316): Homolog of NCBI NO: 24639234 NR Description: CG4406-PA [Drosophila melanogaster]
  misc_feature (19)..(316): Homolog of NCBI NO: 7511896 NR Description: hypothetical protein 133E12.3 - fruit fly
  misc_feature (17)..(317): Homolog of NCBI NO: 6320538 NR Description: Protein involved in the attachment of
  misc_feature (43)..(322): Homolog of NCBI NO: 9802563 NR Description: F22O13.24 [Arabidopsis thaliana]
  misc_feature (17)..(322): Homolog of NCBI NO: 7485988 NR Description: hypothetical protein F22O13.26 - Arabidopsis
  misc_feature (17)..(400): Homolog of NCBI NO: 21537105 NR Description: putative GPI-anchor transamidase [Arabidopsis
  misc_feature (17)..(400): Homolog of NCBI NO: 18390936 NR Description: putative GPI-anchor transamidase (U32517)
MAFGRRSPGSSRHPPALTIVTALLLASLYFAAAAAALSPTDAMHNNNWAVLVCTSRFWFNYRHMANTLSLYRTVKRLGIPDERIILMLADDMACNPRNSYPAQVFNNENHQLNLYGDNVEVDYRGYEVTVENFLRVLTGRHESAVPRSKRLLSDEGSHILLYMTGHGGDEFLKFQDSEELQSHDLADAVKQMKEKHRFKELLIMVDTCQAATLFSQLQSPGVLAIGSSMKGENSYSHHLDSDVGVSVVDRFTYYTLAFFEKLNMYSNASLNSLFTSYNPSMLLSTAYYRMDLYERPLNEVPVTNFFGSVMKTLHTDSAYTGFLAAHDNETPMSTGDNLDDHFMLKGRAIARRSTIEKEAQLTPHGWTEVLAEQLEGKNTDTVVMYGLGAMGILLALSTWLSM

SEQ ID NO: 2024 - protein, 360 aa, Zea mays subsp. mays
  peptide (1)..(360): Ceres Seq. ID no. 12351966
  misc_feature (1)..(280): Pfam Name: Peptidase C13 family Pfam Description: Peptidase C13 family
  misc_feature (1)..(269): Homolog of NCBI NO: 20071719 NR Description: Similar to phosphatidylinositol glycan, class K
  misc_feature (1)..(269): Homolog of NCBI NO: 23199983 NR Description: phosphatidylinositol glycan, class K precursor
  misc_feature (1)..(269): Homolog of NCBI NO: 1518259 NR Description: gpi8 [Homo sapiens]
  misc_feature (1)..(274): Homolog of NCBI NO: 24639234 NR Description: CG4406-PA [Drosophila melanogaster]
  misc_feature (1)..(274): Homolog of NCBI NO: 7511896 NR Description: hypothetical protein 133E12.3 - fruit fly
  misc_feature (1)..(275): Homolog of NCBI NO: 6320538 NR Description: Protein involved in the attachment of
  misc_feature (1)..(280): Homolog of NCBI NO: 9802563 NR Description: F22O13.24 [Arabidopsis thaliana]
  misc_feature (1)..(280): Homolog of NCBI NO: 7485988 NR Description: hypothetical protein F22O13.26 - Arabidopsis
  misc_feature (1)..(358): Homolog of NCBI NO: 21537105 NR Description: putative GPI-anchor transamidase [Arabidopsis
  misc_feature (1)..(358): Homolog of NCBI NO: 18390936 NR Description: putative GPI-anchor transamidase (U32517)
MHNNNWAVLVCTSRFWFNYRHMANTLSLYRTVKRLGIPDERIILMLADDMACNPRNSYPAQVFNNENHQLNLYGDNVEVDYRGYEVTVENFLRVLTGRHESAVPRSKRLLSDEGSHILLYMTGHGGDEFLKFQDSEELQSHDLADAVKQMKEKHRFKELLIMVDTCQAATLFSQLQSPGVLAIGSSMKGENSYSHHLDSDVGVSVVDRFTYYTLAFFEKLNMYSNASLNSLFTSYNPSMLLSTAYYRMDLYERPLNEVPVTNFFGSVMKTLHTDSAYTGFLAAHDNETPMSTGDNLDDHFMLKGRAIARRSTIEKEAQLTPHGWTEVLAEQLEGKNTDTVVMYGLGAMGILLALSTWLSM

SEQ ID NO: 2025 - protein, 339 aa, Zea mays subsp. mays
  peptide (1)..(339): Ceres Seq. ID no. 12351967
  misc_feature (1)..(259): Pfam Name: Peptidase C13 family Pfam Description: Peptidase C13 family
  misc_feature (1)..(248): Homolog of NCBI NO: 20071719 NR Description: Similar to phosphatidylinositol glycan, class K
  misc_feature (1)..(248): Homolog of NCBI NO: 23199983 NR Description: phosphatidylinositol glycan, class K precursor
  misc_feature (1)..(248): Homolog of NCBI NO: 1518259 NR Description: gpi8 [Homo sapiens]
  misc_feature (1)..(253): Homolog of NCBI NO: 24639234 NR Description: CG4406-PA [Drosophila melanogaster]
  misc_feature (1)..(253): Homolog of NCBI NO: 7511896 NR Description: hypothetical protein 133E12.3 - fruit fly
  misc_feature (1)..(254): Homolog of NCBI NO: 6320538 NR Description: Protein involved in the attachment of
  misc_feature (1)..(259): Homolog of NCBI NO: 9802563 NR Description: F22O13.24 [Arabidopsis thaliana]
  misc_feature (1)..(259): Homolog of NCBI NO: 7485988 NR Description: hypothetical protein F22O13.26 - Arabidopsis
  misc_feature (1)..(337): Homolog of NCBI NO: 21537105 NR Description: putative GPI-anchor transamidase [Arabidopsis
  misc_feature (1)..(337): Homolog of NCBI NO: 18390936 NR Description: putative GPI-anchor transamidase (U32517)
MANTLSLYRTVKRLGIPDERIILMLADDMACNPRNSYPAQVFNNENHQLNLYGDNVEVDYRGYEVTVENFLRVLTGRHESAVPRSKRLLSDEGSHILLYMTGHGGDEFLKFQDSEELQSHDLADAVKQMKEKHRFKELLIMVDTCQAATLFSQLQSPGVLAIGSSMKGENSYSHHLDSDVGVSVVDRFTYYTLAFFEKLNMYSNASLNSLFTSYNPSMLLSTAYYRMDLYERPLNEVPVTNFFGSVMKTLHTDSAYTGFLAAHDNETPMSTGDNLDDHFMLKGRAIARRSTIEKEAQLTPHGWTEVLAEQLEGKNTDTVVMYGLGAMGILLALSTWLSM

SEQ ID NO: 2026 - DNA, 1477 bp, Zea mays subsp. mays
  misc_feature (1)..(1477): Ceres Seq. ID no. 12405682
  misc_feature: MA Experiment ID: 108522 Result: Down-regulated in Transcription
  misc_feature: MA Experiment 108522 PARAMETER Experiment Name: Zm_42deg_Heat_P Parameter: Age (day) Value: 8
  misc_feature: MA Experiment 108522 PARAMETER Experiment Name: Zm_42deg_Heat_P Parameter: Organism Value: Zea mays
  misc_feature: MA Experiment 108522 PARAMETER Experiment Name: Zm_42deg_Heat_P Parameter: Plant Line Value: 35A19
  misc_feature: MA Experiment 108522 PARAMETER Experiment Name: Zm_42deg_Heat_P Parameter: Temperature (deg C) Value: 42 vs. 22
  misc_feature: MA Experiment 108522 PARAMETER Experiment Name: Zm_42deg_Heat_P Parameter: Timepoint (hr) Value: 1
  misc_feature: MA Experiment 108522 PARAMETER Experiment Name: Zm_42deg_Heat_P Parameter: Tissue Value: Aerial
aaaagactgcgagtgcgcatccttcgtccttccccttcccagccgccctctccccccctctcccggtcgcctctaacgtcgctggtgactcacgaagacctccatcgacggcggtgaaactggggccgacttctggagggtttgacttgttggatacagcgctggctcttccaatcgccgggtgctctctgccactctgtcttgcggagccctcaccgcggaaaccagttggtgcgcgtggccatggcggtggcgaaggtcaaatcggtcgccctctccgtcagtcacaagtgccggaacatcttggccgccggttgggaagcccacctcaacactgtcaaggctgacaacaagggaagcaagaatgagatttacacgtcgagggtgcactacatgatccataagggcacgccctacttgattgtccccgagaacgacatgcacaacattaacattataatcgatgagcgggggtctcttgcagtattcagtccgatccgtggccgagttgcgagcttattgaagccatcgaagacacctcctcgtgttgctatgactggtgatgttctgcgcctgaaagactcaaaggttccaattattgccgatagcctgaagcaaactattctgaaggaacatgaagctgctagtaaagctagttatggagtgtcagcaatactgtcttcggcaggtgctacctgcaggtcccggagtgagggcctccttagtctactcagtgaggagagctcttacaacatcttaaaatttgacataggttcctgtgtctacatagacttcaatgggagcagccataatattgaattggacagctttgaagcaccaaaagcagatctgctaatgccattctctgcgaagcttgtggatggtatcaaccaaaatgactctaggaggagggcactggtgatgttctgttttgcgtattttaatagcgctgtcatgctttccattgaccaccatggttttgatgtcctcgccaaagtgcctcaaggagacatccttactaatccacaataccactggaaggagttcaggttcacattcaaggaacctgccaaggatgctgaggacttctgccgcatgctggttgggttagaggaagagggtttgcagaccgtgaagagctgtagcggttacggttgacaacccacttgcaaggttcacattcaaggaaccagccaaggatgctgaggactctgccgcatgctggttcgattagagggattttgcagcgcgtgaagagctatagcggtctaggtgacagctcacttgccacaaaaccagtgagaaactatatatccgttattttggaactttgaaatatggttttagattgctatgttttattcgaagatctatggcttctcgaatttaatagagtagatgatgtttgaacatggagccgtaaactatcaatatctgtttgaatggtatttatataaataataaaactggtaacggc

SEQ ID NO: 2027 - protein, 304 aa, Zea mays subsp. mays
  peptide (1)..(304): Ceres Seq. ID no. 12405683
  misc_feature (72)..(292): Homolog of NCBI NO: 15229211 NR Description: unknown protein; protein id: At3g04020.1 thaliana] >gi|6223647|gb|AAF05861.1|AC011698_12 unknown protein
MAVAKVKSVALSVSHKCRNILAAGWEAHLNTVKADNKGSKNEIYTSRVHYMIHKGTPYLIVPENDMHNINIIIDERGSLAVFSPIRGRVASLLKPSKTPPRVAMTGDVLRLKDSKVPIIADSLKQTILKEHEAASKASYGVSAILSSAGATCRSRSEGLLSLLSEESSYNILKFDIGSCVYIDFNGSSHNIELDSFEAPKADLLMPFSAKLVDGINQNDSRRRALVMFCFAYFNSAVMLSIDHHGFDVLAKVPQGDILTNPQYHWKEFRFTFKEPAKDAEDFCRMLVGLEEEGLQTVKSCSGYG

SEQ ID NO: 2028 - protein, 254 aa, Zea mays subsp. mays
  peptide (1)..(254): Ceres Seq. ID no. 12405684
  misc_feature (22)..(242): Homolog of NCBI NO: 15229211 NR Description: unknown protein; protein id: At3g04020.1 thaliana] >gi|6223647|gb|AAF05861.1|AC011698_12 unknown protein
MIHKGTPYLIVPENDMHNINIIIDERGSLAVFSPIRGRVASLLKPSKTPPRVAMTGDVLRLKDSKVPIIADSLKQTILKEHEAASKASYGVSAILSSAGATCRSRSEGLLSLLSEESSYNILKFDIGSCVYIDFNGSSHNIELDSFEAPKADLLMPFSAKLVDGINQNDSRRRALVMFCFAYFNSAVMLSIDHHGFDVLAKVPQGDILTNPQYHWKEFRFTFKEPAKDAEDFCRMLVGLEEEGLQTVKSCSGYG

SEQ ID NO: 2029 - protein, 239 aa, Zea mays subsp. mays
  peptide (1)..(239): Ceres Seq. ID no. 12405685
  misc_feature (7)..(227): Homolog of NCBI NO: 15229211 NR Description: unknown protein; protein id: At3g04020.1 thaliana] >gi|6223647|gb|AAF05861.1|AC011698_12 unknown protein
MHNINIIIDERGSLAVFSPIRGRVASLLKPSKTPPRVAMTGDVLRLKDSKVPIIADSLKQTILKEHEAASKASYGVSAILSSAGATCRSRSEGLLSLLSEESSYNILKFDIGSCVYIDFNGSSHNIELDSFEAPKADLLMPFSAKLVDGINQNDSRRRALVMFCFAYFNSAVMLSIDHHGFDVLAKVPQGDILTNPQYHWKEFRFTFKEPAKDAEDFCRMLVGLEEEGLQTVKSCSGYG

SEQ ID NO: 2030 - DNA, 1339 bp, Zea mays subsp. mays
  misc_feature (1)..(1339): Ceres Seq. ID no. 12405822
  misc_feature: MA Experiment ID: 108689 Result: Up-regulated in Transcription
  misc_feature: MA Experiment 108689 PARAMETER Experiment Name: Zm_Drought_Roots_P Parameter: Age (day) Value: 9
  misc_feature: MA Experiment 108689 PARAMETER Experiment Name: Zm_Drought_Roots_P Parameter: Organism Value: Zea mays
  misc_feature: MA Experiment 108689 PARAMETER Experiment Name: Zm_Drought_Roots_P Parameter: Plant Line Value: 35A19
  misc_feature: MA Experiment 108689 PARAMETER Experiment Name: Zm_Drought_Roots_P Parameter: Timepoint (hr) Value: 24
  misc_feature: MA Experiment 108689 PARAMETER Experiment Name: Zm_Drought_Roots_P Parameter: Tissue Value: Roots
  misc_feature: MA Experiment 108689 PARAMETER Experiment Name: Zm_Drought_Roots_P Parameter: Treatment Value: Drought vs. No Drought
cggttctttaattgcgcgccaatctgttttatatatacggagagagcactcctgttttgtggcaaattctattactagctgcaaaagggcgtgtttgagactagcggaccgaccttgaagttgaagttgaaaaggccggcctgcgcggcgatggatgtcaagtgccggcgtctggaggggaaggtggccatcgtgacggcgtccacgatggggatcggcctcgccatcgccgagcgcctcggtctggagggcgccgccgtcgtcatctcctcccgcaagcagaagaacgtgaacgaggcggtggaggggctcagggccaagggtatcaccgcggttggtgccgtctgccacgtctccgacgcacagcagcgcaagagcctcatcgagacggccgtcaagagctttgggcacatagatattcttgtctccaatgctgccgcaaatccttctgtagatagcatacttgaaatgaaagagtctgttctcgataagttgtgggatattaacgtcaaggcttctatccttcttatccaggatgctgctcctcacctacggaaggggtcatctgtgattattatttcttcaattgctggttacaatccagaacaaggattgacaatgtatagtgtcacaaagactgctctctttggtctcacgaaggctcttgctggtgagatgggacccgatactcgtgttaactgtatagcccctggttttgttcctacacggtttgctagtttcctcacagaaaatgagaccattaggaaagagcttaacgagaggaccaagcttaagagattgggtactgtggaagacatggctgcggctgcggctttcctggcatctgacgacgcatcatacattacggctgaaaccattgttgttgctggaggggtgcagtctaggctgtaaatctggctgaagtttatatttacttggttaataatgtgtactagtgccctaggcgtggctaataatgtgtactagtgccgctagagcatcaggctaccttctatatatgacaggcaactctaaaatattttctatatcttattcctcttcaataatgtcctctctatcagcatcttctatatgtcgttctccagtctccacgcttaaaaaaatttgtattaaggatatattttgttttcagttttttttaagcgtggagaacataagtagcctcggttcatgaatcagatgtatggattattgtaacgcattcttgaaagggaaaaacatgtattatagcgtgataactgtaccttttgtgtttgttgtacagaaccatagaattgtacttcattttaggtgaagacgcctttgaacatttaagccc

SEQ ID NO: 2031 - protein, 253 aa, Zea mays subsp. mays
  peptide (1)..(253): Ceres Seq. ID no. 12405823
  misc_feature (1)..(253): Homolog of NCBI NO: 39593247 NR Description: Hypothetical protein CBG09503 [Caenorhabditis
  misc_feature (8)..(253): Homolog of NCBI NO: 27807351 NR Description: NADPH-dependent retinol dehydrogenase/reductase
  misc_feature (1)..(253): Homolog of NCBI NO: 17298119 NR Description: carbonyl reductase/NADP-retinol dehydrogenase
  misc_feature (8)..(253): Homolog of NCBI NO: 33337583 NR Description: Hep27-like protein [Homo sapiens]
  misc_feature (8)..(253): Homolog of NCBI NO: 11559416 NR Description: NADPH-dependent retinol dehydrogenase/reductase
  misc_feature (8)..(253): Homolog of NCBI NO: 7023407 NR Description: unnamed protein product [Homo sapiens]
  misc_feature (8)..(253): Homolog of NCBI NO: 11559412 NR Description: NADPH-dependent retinol dehydrogenase/reductase
  misc_feature (1)..(253): Homolog of NCBI NO: 21355319 NR Description: CG10672-PA [Drosophila melanogaster]
  misc_feature (6)..(253): Homolog of NCBI NO: 33991766 NR Description: Unknown (protein for MGC:65987) [Danio rerio]
  misc_feature (6)..(253): Homolog of NCBI NO: 18412959 NR Description: coded for by A. thaliana cDNA Z18000
MDVKCRRLEGKVAIVTASTMGIGLAIAERLGLEGAAVVISSRKQKNVNEAVEGLRAKGITAVGAVCHVSDAQQRKSLIETAVKSFGHIDILVSNAAANPSVDSILEMKESVLDKLWDINVKASILLIQDAAPHLRKGSSVIIISSIAGYNPEQGLTMYSVTKTALFGLTKALAGEMGPDTRVNCIAPGFVPTRFASFLTENETIRKELNERTKLKRLGTVEDMAAAAAFLASDDASYITAETIVVAGGVQSRL

SEQ ID NO: 2032 - protein, 234 aa, Zea mays subsp. mays
  peptide (1)..(234): Ceres Seq. ID no. 12405824
  misc_feature (1)..(234): Homolog of NCBI NO: 39593247 NR Description: Hypothetical protein CBG09503 [Caenorhabditis
  misc_feature (1)..(234): Homolog of NCBI NO: 27807351 NR Description: NADPH-dependent retinol dehydrogenase/reductase
  misc_feature (1)..(234): Homolog of NCBI NO: 17298119 NR Description: carbonyl reductase/NADP-retinol dehydrogenase
  misc_feature (1)..(234): Homolog of NCBI NO: 33337583 NR Description: Hep27-like protein [Homo sapiens]
  misc_feature (1)..(234): Homolog of NCBI NO: 11559416 NR Description: NADPH-dependent retinol dehydrogenase/reductase
  misc_feature (1)..(234): Homolog of NCBI NO: 7023407 NR Description: unnamed protein product [Homo sapiens]
  misc_feature (1)..(234): Homolog of NCBI NO: 11559412 NR Description: NADPH-dependent retinol dehydrogenase/reductase
  misc_feature (1)..(234): Homolog of NCBI NO: 21355319 NR Description: CG10672-PA [Drosophila melanogaster]
  misc_feature (1)..(234): Homolog of NCBI NO: 33991766 NR Description: Unknown (protein for MGC:65987) [Danio rerio]
  misc_feature (1)..(234): Homolog of NCBI NO: 18412959 NR Description: coded for by A. thaliana cDNA Z18000
MGIGLAIAERLGLEGAAVVISSRKQKNVNEAVEGLRAKGITAVGAVCHVSDAQQRKSLIETAVKSFGHIDILVSNAAANPSVDSILEMKESVLDKLWDINVKASILLIQDAAPHLRKGSSVIIISSIAGYNPEQGLTMYSVTKTALFGLTKALAGEMGPDTRVNCIAPGFVPTRFASFLTENETIRKELNERTKLKRLGTVEDMAAAAAFLASDDASYITAETIVVAGGVQSRL

SEQ ID NO: 2033 - protein, 147 aa, Zea mays subsp. mays
  peptide (1)..(147): Ceres Seq. ID no. 12405825
  misc_feature (1)..(147): Homolog of NCBI NO: 39593247 NR Description: Hypothetical protein CBG09503 [Caenorhabditis
  misc_feature (1)..(147): Homolog of NCBI NO: 27807351 NR Description: NADPH-dependent retinol dehydrogenase/reductase
  misc_feature (1)..(147): Homolog of NCBI NO: 17298119 NR Description: carbonyl reductase/NADP-retinol dehydrogenase
  misc_feature (1)..(147): Homolog of NCBI NO: 33337583 NR Description: Hep27-like protein [Homo sapiens]
  misc_feature (1)..(147): Homolog of NCBI NO: 11559416 NR Description: NADPH-dependent retinol dehydrogenase/reductase
  misc_feature (1)..(147): Homolog of NCBI NO: 7023407 NR Description: unnamed protein product [Homo sapiens]
  misc_feature (1)..(147): Homolog of NCBI NO: 11559412 NR Description: NADPH-dependent retinol dehydrogenase/reductase
  misc_feature (1)..(147): Homolog of NCBI NO: 21355319 NR Description: CG10672-PA [Drosophila melanogaster]
  misc_feature (1)..(147): Homolog of NCBI NO: 33991766 NR Description: Unknown (protein for MGC:65987) [Danio rerio]
  misc_feature (1)..(147): Homolog of NCBI NO: 18412959 NR Description: coded for by A. thaliana cDNA Z18000
MKESVLDKLWDINVKASILLIQDAAPHLRKGSSVIIISSIAGYNPEQGLTMYSVTKTALFGLTKALAGEMGPDTRVNCIAPGFVPTRFASFLTENETIRKELNERTKLKRLGTVEDMAAAAAFLASDDASYITAETIVVAGGVQSRL

SEQ ID NO: 2034 - DNA, 1309 bp, Zea mays subsp. mays
  misc_feature (1)..(1309): Ceres Seq. ID no. 12365183
  misc_feature: MA Experiment ID: 108504 Result: Up-regulated in Transcription
  misc_feature: MA Experiment 108504 PARAMETER Experiment Name: Zm_Drought_P Parameter: Age (day) Value: 8
  misc_feature: MA Experiment 108504 PARAMETER Experiment Name: Zm_Drought_P Parameter: Organism Value: Zea mays
  misc_feature: MA Experiment 108504 PARAMETER Experiment Name: Zm_Drought_P Parameter: Plant Line Value: 35A19
  misc_feature: MA Experiment 108504 PARAMETER Experiment Name: Zm_Drought_P Parameter: Timepoint (hr) Value: 12
  misc_feature: MA Experiment 108504 PARAMETER Experiment Name: Zm_Drought_P Parameter: Tissue Value: Aerial
  misc_feature: MA Experiment 108504 PARAMETER Experiment Name: Zm_Drought_P Parameter: Treatment Value: Drought vs. No Drought
  misc_feature: MA Experiment ID: 108522 Result: Up-regulated in Transcription
  misc_feature: MA Experiment 108522 PARAMETER Experiment Name: Zm_42deg_Heat_P Parameter: Age (day) Value: 8
  misc_feature: MA Experiment 108522 PARAMETER Experiment Name: Zm_42deg_Heat_P Parameter: Organism Value: Zea mays
  misc_feature: MA Experiment 108522 PARAMETER Experiment Name: Zm_42deg_Heat_P Parameter: Plant Line Value: 35A19
  misc_feature: MA Experiment 108522 PARAMETER Experiment Name: Zm_42deg_Heat_P Parameter: Temperature (deg C) Value: 42 vs. 22
  misc_feature: MA Experiment 108522 PARAMETER Experiment Name: Zm_42deg_Heat_P Parameter: Timepoint (hr) Value: 1
  misc_feature: MA Experiment 108522 PARAMETER Experiment Name: Zm_42deg_Heat_P Parameter: Tissue Value: Aerial
  misc_feature: MA Experiment ID: 108523 Result: Up-regulated in Transcription
  misc_feature: MA Experiment 108523 PARAMETER Experiment Name: Zm_42deg_Heat_P Parameter: Age (day) Value: 8
  misc_feature: MA Experiment 108523 PARAMETER Experiment Name: Zm_42deg_Heat_P Parameter: Organism Value: Zea mays
  misc_feature: MA Experiment 108523 PARAMETER Experiment Name: Zm_42deg_Heat_P Parameter: Plant Line Value: 35A19
  misc_feature: MA Experiment 108523 PARAMETER Experiment Name: Zm_42deg_Heat_P Parameter: Temperature (deg C) Value: 42 vs. 22
  misc_feature: MA Experiment 108523 PARAMETER Experiment Name: Zm_42deg_Heat_P Parameter: Timepoint (hr) Value: 6
  misc_feature: MA Experiment 108523 PARAMETER Experiment Name: Zm_42deg_Heat_P Parameter: Tissue Value: Aerial
  misc_feature: MA Experiment ID: 108528 Result: Up-regulated in Transcription
  misc_feature: MA Experiment 108528 PARAMETER Experiment Name: Zm_Imbibed_Seeds_P Parameter: Age (day) Value: 5 vs. 2
  misc_feature: MA Experiment 108528 PARAMETER Experiment Name: Zm_Imbibed_Seeds_P Parameter: Organism Value: Zea mays
  misc_feature: MA Experiment 108528 PARAMETER Experiment Name: Zm_Imbibed_Seeds_P Parameter: Plant Line Value: 35A19
  misc_feature: MA Experiment 108528 PARAMETER Experiment Name: Zm_Imbibed_Seeds_P Parameter: Tissue Value: Aerial vs. Embryo
  misc_feature: MA Experiment ID: 108530 Result: Up-regulated in Transcription
  misc_feature: MA Experiment 108530 PARAMETER Experiment Name: Zm_Imbibed_Seeds_P Parameter: Age (day) Value: 6 vs. 2
  misc_feature: MA Experiment 108530 PARAMETER Experiment Name: Zm_Imbibed_Seeds_P Parameter: Organism Value: Zea mays
  misc_feature: MA Experiment 108530 PARAMETER Experiment Name: Zm_Imbibed_Seeds_P Parameter: Plant Line Value: 35A19
  misc_feature: MA Experiment 108530 PARAMETER Experiment Name: Zm_Imbibed_Seeds_P Parameter: Tissue Value: Aerial vs. Embryo
  misc_feature: MA Experiment ID: 108534 Result: Up-regulated in Transcription
  misc_feature: MA Experiment 108534 PARAMETER Experiment Name: Zm_4deg_Cold_P Parameter: Age (hr) Value: 8
  misc_feature: MA Experiment 108534 PARAMETER Experiment Name: Zm_4deg_Cold_P Parameter: Organism Value: Zea mays
  misc_feature: MA Experiment 108534 PARAMETER Experiment Name: Zm_4deg_Cold_P Parameter: Plant Line Value: 35A19
  misc_feature: MA Experiment 108534 PARAMETER Experiment Name: Zm_4deg_Cold_P Parameter: Temperature (deg C) Value: 4 vs. 22
  misc_feature: MA Experiment 108534 PARAMETER Experiment Name: Zm_4deg_Cold_P Parameter: Timepoint (hr) Value: 6
  misc_feature: MA Experiment 108534 PARAMETER Experiment Name: Zm_4deg_Cold_P Parameter: Tissue Value: Aerial
  misc_feature: MA Experiment ID: 108535 Result: Down-regulated in Transcription
  misc_feature: MA Experiment 108535 PARAMETER Experiment Name: Zm_Meristem_P Parameter: Age (day) Value: 8
  misc_feature: MA Experiment 108535 PARAMETER Experiment Name: Zm_Meristem_P Parameter: Organism Value: Zea mays
  misc_feature: MA Experiment 108535 PARAMETER Experiment Name: Zm_Meristem_P Parameter: Plant Line Value: 35A19
  misc_feature: MA Experiment 108535 PARAMETER Experiment Name: Zm_Meristem_P Parameter: Tissue Value: Root Meristem vs. Above Root Meristem
  misc_feature: MA Experiment ID: 108556 Result: Up-regulated in Transcription
  misc_feature: MA Experiment 108556 PARAMETER Experiment Name: Zm_Drought_P Parameter: Age (day) Value: 9
  misc_feature: MA Experiment 108556 PARAMETER Experiment Name: Zm_Drought_P Parameter: Organism Value: Zea mays
  misc_feature: MA Experiment 108556 PARAMETER Experiment Name: Zm_Drought_P Parameter: Plant Line Value: 35A19
  misc_feature: MA Experiment 108556 PARAMETER Experiment Name: Zm_Drought_P Parameter: Timepoint (hr) Value: 24
  misc_feature: MA Experiment 108556 PARAMETER Experiment Name: Zm_Drought_P Parameter: Tissue Value: Aerial
  misc_feature: MA Experiment 108556 PARAMETER Experiment Name: Zm_Drought_P Parameter: Treatment Value: Drought vs. No Drought
  misc_feature: MA Experiment ID: 108688 Result: Down-regulated in Transcription
  misc_feature: MA Experiment 108688 PARAMETER Experiment Name: Zm_Embryos-Flowers__P Parameter: Tissue Value: Immature Flowers vs. Aerial+
atgcacaggcggactcgcggactcggggctcgtaccaacaggaaaaaaggcccagaggcagtgccgtgaccgattcgagacgcaagagaaggatcgagacgaggcggcggttttccggggcagcatcgtctcggccacgaagatgtcttactcaaggggctcaaggtatggatctcgctcaccttactcgagaagcacaaggtaccgaagtcgctctaggagtgtcgactctagtgatgctgaaaaccctgggaacaacctgtatgtgactggtttgtcggctcgtgtaacggatcgagatctggagaagcacttctccactgagggtgaggtgattgatgcaagcgttgtgtatgatccttggacaagggaatcacgggggtttggttttgttaccatggctgctgttaaagatgcagatcgctgcatcaaatatctggaccgttctgtgttgcaaggtcgggtcataactgttgagaagggtagatgttggtagctgctctgcaacaaactgatacaacctaacaccaaaccatgccaacctcagccaaagggcaaagagaagacgaggtagaaccccaacacctgggaagtatcttggcacaaaatcatcccgtggacggaggtactccacaagctactcacctgatcggaggggccgttacagttcccgctactcacctgatcggagggactgtcatggtagagaccggtcatactctccatatgacagaaggcgatcatactctccttacggcagggatgaatcatattccccttactatggccggcgatcatactcaccttactacagcagacggtatcgttcaaggtccccatactgctacagaagacgcaggtcaccttctgtttcgccatactaccgccggcacaggtacagatctgtctccaagtcatccagttcatctccaagggccagaggacggagctattcgtgcagtttatcaccacagagaagctactcgcgcagccattccccagaatccgagagatcaacaagctattctcctaagaaagggagtaaaagggaaccctcgcgtagcagatactctggcaagagtcgtcattcaagggaaagccactctcatagccgcagttcgtactccaggtctgtgtccagggagcgctcagcttgatctgcgaggtgtgtcgtcctaggtggttataagatatgcgctgtatttgcatctatcagaacttgtgtacttcgtatattacgaacttgagaactgtatggatgtgtgcattgtgccaaattatgttcattctgtgctatctttctgatgct

SEQ ID NO: 2035 - protein, 214 aa, Zea mays subsp. mays
  peptide (1)..(214): Ceres Seq. ID no. 12365184
MPTSAKGQREDEVEPQHLGSILAQNHPVDGGTPQATHLIGGAVTVPATHLIGGTVMVETGHTLHMTEGDHTLLTAGMNHIPLTMAGDHTHLTTADGIVQGPHTATEDAGHLLFRHTTAGTGTDLSPSHPVHLQGPEDGAIRAVYHHREATRAAIPQNPRDQQAILLRKGVKGNPRVADTLARVVIQGKATLIAAVRTPGLCPGSAQLDLRGVSS

SEQ ID NO: 2036 - protein, 164 aa, Zea mays subsp. mays
  peptide (1)..(164): Ceres Seq. ID no. 12365185
  misc_feature (87)..(158): Pfam Name: RNA recognition motif. (a.k.a. RRM, RBD, or RNP domain) Pfam Description: RNA recognition motif. (a.k.a. RRM, RBD, or RNP
  misc_feature (86)..(162): Homolog of NCBI NO: 28279759 NR Description: Similar to splicing factor, arginine/serine-rich
  misc_feature (87)..(162): Homolog of NCBI NO: 29735276 NR Description: similar to 46kD arginine/serine-rich splicing
  misc_feature (48)..(164): Homolog of NCBI NO: 30680096 NR Description: transformer serine/arginine-rich
  misc_feature (49)..(162): Homolog of NCBI NO: 7489207 NR Description: transformer-SR ribonucleoprotein - common tobacco
  misc_feature (47)..(162): Homolog of NCBI NO: 40253470 NR Description: putative transformer-SR ribonucleoprotein
  misc_feature (46)..(162): Homolog of NCBI NO: 11275253 NR Description: transformer-2-like protein - liverwort
  misc_feature (73)..(162): Homolog of NCBI NO: 8778550 NR Description: F22G5.31 [Arabidopsis thaliana]
  misc_feature (48)..(162): Homolog of NCBI NO: 28973767 NR Description: putative transformer-SR ribonucleoprotein
  misc_feature (48)..(162): Homolog of NCBI NO: 18390758 NR Description: transformer serine/arginine-rich
  misc_feature (68)..(162): Homolog of NCBI NO: 34902002 NR Description: putative transformer serine/arginine-rich
CTGGLADSGLVPTGKKAQRQCRDRFETQEKDRDEAAVFRGSIVSATKMSYSRGSRYGSRSPYSRSTRYRSRSRSVDSSDAENPGNNLYVTGLSARVTDRDLEKHFSTEGEVIDASVVYDPWTRESRGFGFVTMAAVKDADRCIKYLDRSVLQGRVITVEKGRCW

SEQ ID NO: 2037 - protein, 159 aa, Zea mays subsp. mays
  peptide (1)..(159): Ceres Seq. ID no. 12365186
MVETGHTLHMTEGDHTLLTAGMNHIPLTMAGDHTHLTTADGIVQGPHTATEDAGHLLFRHTTAGTGTDLSPSHPVHLQGPEDGAIRAVYHHREATRAAIPQNPRDQQAILLRKGVKGNPRVADTLARVVIQGKATLIAAVRTPGLCPGSAQLDLRGVSS

SEQ ID NO: 2038 - DNA, 1379 bp, Zea mays subsp. mays
  misc_feature (1)..(1379): Ceres Seq. ID no. 12353653
  misc_feature: MA Experiment ID: 108543 Result: Down-regulated in Transcription
  misc_feature: MA Experiment ID: 20000488 Result: Down-regulated in Transcription
  misc_feature: MA Experiment 20000488 PARAMETER Experiment Name: Zm_50mM_NH4NO3_L_to_H_P Parameter: Organism Value: Zea mays
  misc_feature: MA Experiment 20000488 PARAMETER Experiment Name: Zm_50mM_NH4NO3_L_to_H_P Parameter: Timepoint (hr) Value: 8
  misc_feature: MA Experiment 20000488 PARAMETER Experiment Name: Zm_50mM_NH4NO3_L_to_H_P Parameter: Tissue Value: Leaves
  misc_feature: MA Experiment 20000488 PARAMETER Experiment Name: Zm_50mM_NH4NO3_L_to_H_P Parameter: Treatment Value: 50mM NH4NO3 vs. 100mM Mannitol
  misc_feature: MA Experiment ID: 20000492 Result: Down-regulated in Transcription
  misc_feature: MA Experiment 20000492 PARAMETER Experiment Name: Zm_Hybrid_Seed_Dev_P Parameter: DAP Value: 12
  misc_feature: MA Experiment 20000492 PARAMETER Experiment Name: Zm_Hybrid_Seed_Dev_P Parameter: Organism Value: Zea mays
  misc_feature: MA Experiment 20000492 PARAMETER Experiment Name: Zm_Hybrid_Seed_Dev_P Parameter: Plant Line Value: 35A19
  misc_feature: MA Experiment 20000492 PARAMETER Experiment Name: Zm_Hybrid_Seed_Dev_P Parameter: Tissue Value: Fert Kernel vs. Unfert Floret
  misc_feature: MA Experiment ID: 20000534 Result: Down-regulated in Transcription
  misc_feature: MA Experiment 20000534 PARAMETER Experiment Name: Zm_Hybrid_Pollen_P Parameter: Age (day) Value: 8
  misc_feature: MA Experiment 20000534 PARAMETER Experiment Name: Zm_Hybrid_Pollen_P Parameter: Organism Value: Zea mays
  misc_feature: MA Experiment 20000534 PARAMETER Experiment Name: Zm_Hybrid_Pollen_P Parameter: Plant Line Value: 35A19
  misc_feature: MA Experiment 20000534 PARAMETER Experiment Name: Zm_Hybrid_Pollen_P Parameter: Tissue Value: Pollen vs. Aerial
  misc_feature: MA Experiment ID: 20000535 Result: Down-regulated in Transcription
  misc_feature: MA Experiment 20000535 PARAMETER Experiment Name: Zm_Hybrid_Seed_Dev_P Parameter: DAP Value: 30 vs. 12
  misc_feature: MA Experiment 20000535 PARAMETER Experiment Name: Zm_Hybrid_Seed_Dev_P Parameter: Organism Value: Zea mays
  misc_feature: MA Experiment 20000535 PARAMETER Experiment Name: Zm_Hybrid_Seed_Dev_P Parameter: Plant Line Value: 35A19
  misc_feature: MA Experiment 20000535 PARAMETER Experiment Name: Zm_Hybrid_Seed_Dev_P Parameter: Tissue Value: Embryo vs. Unfert Floret
  misc_feature: MA Experiment ID: 20001608 Result: Down-regulated in Transcription
  misc_feature: MA Experiment 20001608 PARAMETER Experiment Name: Zm_50ppm_KNO3_L-to-H_P Parameter: Age (day) Value: 21
  misc_feature: MA Experiment 20001608 PARAMETER Experiment Name: Zm_50ppm_KNO3_L-to-H_P Parameter: Organism Value: Zea mays
  misc_feature: MA Experiment 20001608 PARAMETER Experiment Name: Zm_50ppm_KNO3_L-to-H_P Parameter: Plant Line Value: 35A19
  misc_feature: MA Experiment 20001608 PARAMETER Experiment Name: Zm_50ppm_KNO3_L-to-H_P Parameter: Timepoint (hr) Value: 48
  misc_feature: MA Experiment 20001608 PARAMETER Experiment Name: Zm_50ppm_KNO3_L-to-H_P Parameter: Tissue Value: Shoots
  misc_feature: MA Experiment 20001608 PARAMETER Experiment Name: Zm_50ppm_KNO3_L-to-H_P Parameter: Treatment Value: 50ppm KNO3 vs. 50ppm KCl
cccagctagacctacagaaaaaaaactctaaaatagttgttggtaaaccagcaggtgagcagtcgaacatcgtggccgcctctgctcagcccagatctccgatggccaccgcacccgccgccccgccgccggcctccgcggacgacgagatcatctacgagtccatgccctgcatccgcgtctacaaggaccgcgtggagcgctacttcggcaccgagttcgtcgccgcctcgacgaacgactccaccggcgtggcctccagggacgtcgtcatctcccccaacgtctccgcgcgcctctacctcccgcgcctggacgacgggaacgccaagctccccatcttcgtctactaccacggcggcggcttctgcatcggctccgccttcaaccccatcttccacgactacttcaactgcctcgtggccctcgccgacatcctcgtcgtctccgtcgagtaccgcctcgccccggagcaccccgtccccgccgcctacgccgactcctgggaagcgctcgcctgggtcatctctcacctcggccccgccggcgacggcgcccgggacccgtggatcgcgagccacgccgacttctcccgcctcttcctgggcggcgagagcgcgggctccaacatcgcgcaccacatggcgatgcgcgctgccgcggaggggctggcccacggcgcccggatccggggactcgtcatgatccacccctacttcctgggcacggacaaggtgccctccgacgacctcagcccggaggtgcgcgagagcctggggtccctgtggcgcttcatgtgcccgaccaccacgggggaggacgacccgctcatcaaccccttcgttgacggcgccccgccgctagcgtccctgccgtgcggccgcgtgctcgtgtgcatcggcgagggcgacgtcctccgcgaccgcggccgcgcctactacgaccggctcagggccagcgggtggcccggcaaggcagagatttggcaggcgcccggcaagggacacacgttccacctcctggatccgtgctgcgacgaggccatcgcgcaggataaagtcatcagctacttcctcagccactgactcgcctcgcgtcctcgccggtggtggtggcgttgttgggcttggatcaaaattagcttctttcatgctggcgctacactacataccttacttctagtacatatcaggttcagagttgtatccgtattctttgaaattggatctcagaatggagctttgcccattgttagtaggcaatggtgttgatgtattgcacctggtaatttggggacgatgatacagtcatagtgtcatacatatgaaattatacttgtttgtcacacagaatttgttgaaacaaatgttccatctttt

SEQ ID NO: 2039 - protein, 360 aa, Zea mays subsp. mays
  peptide (1)..(360): Ceres Seq. ID no. 12353654
  misc_feature (47)..(348): Homolog of NCBI NO: 15222795 NR Description: unknown protein; protein id: At1g49660.1
  misc_feature (47)..(347): Homolog of NCBI NO: 15221975 NR Description: hypothetical protein; protein id: At1g19190.1
  misc_feature (46)..(347): Homolog of NCBI NO: 18402731 NR Description: expressed protein
  misc_feature (46)..(359): Homolog of NCBI NO: 21537287 NR Description: putative esterase [Arabidopsis thaliana]
  misc_feature (47)..(347): Homolog of NCBI NO: 15228426 NR Description: putative protein; protein id: At3g48700.1
  misc_feature (45)..(359): Homolog of NCBI NO: 21536771 NR Description: unknown [Arabidopsis thaliana]
  misc_feature (44)..(359): Homolog of NCBI NO: 38344841 NR Description: OSJNBa0064H22.22 [Oryza sativa (japonica
  misc_feature (47)..(348): Homolog of NCBI NO: 15228425 NR Description: putative protein
  misc_feature (45)..(359): Homolog of NCBI NO: 18401743 NR Description: expressed protein
  misc_feature (47)..(348): Homolog of NCBI NO: 18086341 NR Description: AT3g48690/T8P19_200 [Arabidopsis thaliana]
QLDLQKKNSKIVVGKPAGEQSNIVAASAQPRSPMATAPAAPPPASADDEIIYESMPCIRVYKDRVERYFGTEFVAASTNDSTGVASRDVVISPNVSARLYLPRLDDGNAKLPIFVYYHGGGFCIGSAFNPIFHDYFNCLVALADILVVSVEYRLAPEHPVPAAYADSWEALAWVISHLGPAGDGARDPWIASHADFSRLFLGGESAGSNIAHHMAMRAAAEGLAHGARIRGLVMIHPYFLGTDKVPSDDLSPEVRESLGSLWRFMCPTTTGEDDPLINPFVDGAPPLASLPCGRVLVCIGEGDVLRDRGRAYYDRLRASGWPGKAEIWQAPGKGHTFHLLDPCCDEAIAQDKVISYFLSH

SEQ ID NO: 2040 - protein, 327 aa, Zea mays subsp. mays
  peptide (1)..(327): Ceres Seq. ID no. 12353655
  misc_feature (12)..(326): Homolog of NCBI NO: 18401743 NR Description: expressed protein
  misc_feature (14)..(315): Homolog of NCBI NO: 18086341 NR Description: AT3g48690/T8P19_200 [Arabidopsis thaliana]
  misc_feature (14)..(315): Homolog of NCBI NO: 15222795 NR Description: unknown protein; protein id: At1g49660.1
  misc_feature (14)..(314): Homolog of NCBI NO: 15221975 NR Description: hypothetical protein; protein id: At1g19190.1
  misc_feature (13)..(314): Homolog of NCBI NO: 18402731 NR Description: expressed protein
  misc_feature (13)..(326): Homolog of NCBI NO: 21537287 NR Description: putative esterase [Arabidopsis thaliana]
  misc_feature (14)..(314): Homolog of NCBI NO: 15228426 NR Description: putative protein; protein id: At3g48700.1
  misc_feature (12)..(326): Homolog of NCBI NO: 21536771 NR Description: unknown [Arabidopsis thaliana]
  misc_feature (11)..(326): Homolog of NCBI NO: 38344841 NR Description: OSJNBa0064H22.22 [Oryza sativa (japonica
  misc_feature (14)..(315): Homolog of NCBI NO: 15228425 NR Description: putative protein
MATAPAAPPPASADDEIIYESMPCIRVYKDRVERYFGTEFVAASTNDSTGVASRDVVISPNVSARLYLPRLDDGNAKLPIFVYYHGGGFCIGSAFNPIFHDYFNCLVALADILVVSVEYRLAPEHPVPAAYADSWEALAWVISHLGPAGDGARDPWIASHADFSRLFLGGESAGSNIAHHMAMRAAAEGLAHGARIRGLVMIHPYFLGTDKVPSDDLSPEVRESLGSLWRFMCPTTTGEDDPLINPFVDGAPPLASLPCGRVLVCIGEGDVLRDRGRAYYDRLRASGWPGKAEIWQAPGKGHTFHLLDPCCDEAIAQDKVISYFLSH

SEQ ID NO: 2041 - protein, 306 aa, Zea mays subsp. mays
  peptide (1)..(306): Ceres Seq. ID no. 12353656
  misc_feature (1)..(294): Homolog of NCBI NO: 15222795 NR Description: unknown protein; protein id: At1g49660.1
  misc_feature (1)..(293): Homolog of NCBI NO: 15221975 NR Description: hypothetical protein; protein id: At1g19190.1
  misc_feature (1)..(293): Homolog of NCBI NO: 18402731 NR Description: expressed protein
  misc_feature (1)..(305): Homolog of NCBI NO: 21537287 NR Description: putative esterase [Arabidopsis thaliana]
  misc_feature (1)..(293): Homolog of NCBI NO: 15228426 NR Description: putative protein; protein id: At3g48700.1
  misc_feature (1)..(305): Homolog of NCBI NO: 21536771 NR Description: unknown [Arabidopsis thaliana]
  misc_feature (1)..(305): Homolog of NCBI NO: 38344841 NR Description: OSJNBa0064H22.22 [Oryza sativa (japonica
  misc_feature (1)..(294): Homolog of NCBI NO: 15228425 NR Description: putative protein
  misc_feature (1)..(305): Homolog of NCBI NO: 18401743 NR Description: expressed protein
  misc_feature (1)..(294): Homolog of NCBI NO: 18086341 NR Description: AT3g48690/T8P19_200 [Arabidopsis thaliana]
MPCIRVYKDRVERYFGTEFVAASTNDSTGVASRDVVISPNVSARLYLPRLDDGNAKLPIFVYYHGGGFCIGSAFNPIFHDYFNCLVALADILVVSVEYRLAPEHPVPAAYADSWEALAWVISHLGPAGDGARDPWIASHADFSRLFLGGESAGSNIAHHMAMRAAAEGLAHGARIRGLVMIHPYFLGTDKVPSDDLSPEVRESLGSLWRFMCPTTTGEDDPLINPFVDGAPPLASLPCGRVLVCIGEGDVLRDRGRAYYDRLRASGWPGKAEIWQAPGKGHTFHLLDPCCDEAIAQDKVISYFLSH

SEQ ID NO: 2042 - DNA, 1005 bp, Zea mays subsp. mays
  misc_feature (1)..(1005): Ceres Seq. ID no. 13492805
  misc_feature: MA Experiment ID: 108543 Result: Down-regulated in Transcription
  misc_feature: MA Experiment ID: 108559 Result: Up-regulated in Transcription
  misc_feature: MA Experiment 108559 PARAMETER Experiment Name: Zm_5mM_NO_P Parameter: Age (day) Value: 8
  misc_feature: MA Experiment 108559 PARAMETER Experiment Name: Zm_5mM_NO_P Parameter: Organism Value: Zea mays
  misc_feature: MA Experiment 108559 PARAMETER Experiment Name: Zm_5mM_NO_P Parameter: Plant Line Value: 35A19
  misc_feature: MA Experiment 108559 PARAMETER Experiment Name: Zm_5mM_NO_P Parameter: Timepoint (hr) Value: 12
  misc_feature: MA Experiment 108559 PARAMETER Experiment Name: Zm_5mM_NO_P Parameter: Tissue Value: Aerial
  misc_feature: MA Experiment 108559 PARAMETER Experiment Name: Zm_5mM_NO_P Parameter: Treatment Value: 5mM NO vs. No Treatment
  misc_feature: MA Experiment ID: 20000477 Result: Up-regulated in Transcription
  misc_feature: MA Experiment 20000477 PARAMETER Experiment Name: Zm_5mM_SA_P Parameter: Age (day) Value: 10
  misc_feature: MA Experiment 20000477 PARAMETER Experiment Name: Zm_5mM_SA_P Parameter: Organism Value: Zea mays
  misc_feature: MA Experiment 20000477 PARAMETER Experiment Name: Zm_5mM_SA_P Parameter: Plant Line Value: 35A19
  misc_feature: MA Experiment 20000477 PARAMETER Experiment Name: Zm_5mM_SA_P Parameter: Timepoint (hr) Value: 48
  misc_feature: MA Experiment 20000477 PARAMETER Experiment Name: Zm_5mM_SA_P Parameter: Tissue Value: Aerial
  misc_feature: MA Experiment 20000477 PARAMETER Experiment Name: Zm_5mM_SA_P Parameter: Treatment Value: 5mM SA vs. No Treatment
  misc_feature: MA Experiment ID: 20000478 Result: Up-regulated in Transcription
  misc_feature: MA Experiment 20000478 PARAMETER Experiment Name: Zm_5mM_SA_P Parameter: Age (day) Value: 11
  misc_feature: MA Experiment 20000478 PARAMETER Experiment Name: Zm_5mM_SA_P Parameter: Organism Value: Zea mays
  misc_feature: MA Experiment 20000478 PARAMETER Experiment Name: Zm_5mM_SA_P Parameter: Plant Line Value: 35A19
  misc_feature: MA Experiment 20000478 PARAMETER Experiment Name: Zm_5mM_SA_P Parameter: Timepoint (hr) Value: 72
  misc_feature: MA Experiment 20000478 PARAMETER Experiment Name: Zm_5mM_SA_P Parameter: Tissue Value: Aerial
  misc_feature: MA Experiment 20000478 PARAMETER Experiment Name: Zm_5mM_SA_P Parameter: Treatment Value: 5mM SA vs. No Treatment
  misc_feature: MA Experiment ID: 20000480 Result: Up-regulated in Transcription
  misc_feature: MA Experiment 20000480 PARAMETER Experiment Name: Zm_Drought_P Parameter: Age (day) Value: 11
  misc_feature: MA Experiment 20000480 PARAMETER Experiment Name: Zm_Drought_P Parameter: Organism Value: Zea mays
  misc_feature: MA Experiment 20000480 PARAMETER Experiment Name: Zm_Drought_P Parameter: Plant Line Value: 35A19
  misc_feature: MA Experiment 20000480 PARAMETER Experiment Name: Zm_Drought_P Parameter: Timepoint (hr) Value: 72
  misc_feature: MA Experiment 20000480 PARAMETER Experiment Name: Zm_Drought_P Parameter: Tissue Value: Aerial
  misc_feature: MA Experiment 20000480 PARAMETER Experiment Name: Zm_Drought_P Parameter: Treatment Value: Drought vs. No Drought
aggagagcacaacgttacaaggacgcatcgaggagactacctacggccatggcgaggagaaggcttctcgcgctcgcctcccggctctacgggaggcctcaggcgacgcagccgtggcggcgacccccgccccggtttctctcctcagctgcgtccggcaccctcgatcacctgaagtcgccgcctttcgcgcgtccggctgcccggaaccccgcctcctatccatgggatcgattcggaggagggcagaagaggaccatgttcatccagacacagtcgaccccgaacccgcagtcactcatgttctatcctggaaagccagttatggagattgggagctctgatttccctaatgctcggactgcgatgacatcccctttggctaagtcgctttttgctattgatggagtaaccagggtattctttggatctgattttgtaactgttacaaaatcagaagaaacttcatgggattgcctcaaacctgaggtttttgctgcaataatggacttctactcatctgggcaaccactttttctggactcaaatgctgcagcttctatggacacagcaattcacgaggatgattctgaaatagttgccatgataaaagaattattggagactcgtattcgaccagctgttcaagatgacggcggtgacattgaataccgaggattcgacccagaaacaggaacagttaagcttaaaatgcaaggtgcctgcagcggctgtccaagttcgtcagtcacattgaagtctgggatagaaaacatgcttatgcactatgtgcctgaggtgaaaggagtagaacaggagttcgatggtgatgaggaagctgaagtggctggatagatcgagagagtttttacaggttttgagggtcaacacagcctgatgttatagcaacttcgcacgtacggtattgccgatcctgatgtatgcaggaggcaggcttagatagcagaggcgtcaatagtctnaaataacatccgttgcnctagt

SEQ ID NO: 2043 - protein, 284 aa, Zea mays subsp. mays
  peptide (1)..(284): Ceres Seq. ID no. 13492806
  misc_feature (203)..(273): Pfam Name: NifU-like domain Pfam Description: NifU-like domain
  misc_feature (203)..(273): Pfam Name: NifU-like domain Pfam Description: NifU-like domain
  misc_feature (85)..(281): Homolog of NCBI NO: 34856373 NR Description: similar to HIRA-interacting protein 5 (mHIRIP5)
  misc_feature (87)..(281): Homolog of NCBI NO: 9910264 NR Description: histone cell cycle regulation defective
  misc_feature (85)..(281): Homolog of NCBI NO: 34500321 NR Description: NifU-like protein HIRIP5 [Mus musculus]
  misc_feature (85)..(281): Homolog of NCBI NO: 12834577 NR Description: unnamed protein product [Mus musculus]
  misc_feature (85)..(283): Homolog of NCBI NO: 37681825 NR Description: HIRA interacting protein 5 [Danio rerio]
  misc_feature (85)..(281): Homolog of NCBI NO: 34856373 NR Description: similar to HIRA-interacting protein 5 (mHIRIP5)
  misc_feature (85)..(281): Homolog of NCBI NO: 34500321 NR Description: NifU-like protein HIRIP5 [Mus musculus]
  misc_feature (85)..(283): Homolog of NCBI NO: 37681825 NR Description: HIRA interacting protein 5 [Danio rerio]
  misc_feature (17)..(284): Homolog of NCBI NO: 34897632 NR Description: hypothetical protein [Oryza sativa]
  misc_feature (76)..(284): Homolog of NCBI NO: 18402817 NR Description: expressed protein [Arabidopsis thaliana]
  misc_feature (46)..(284): Homolog of NCBI NO: 25405462 NR Description: unknown protein, 90320-88994 [imported] -
  misc_feature (70)..(284): Homolog of NCBI NO: 15223842 NR Description: expressed protein [Arabidopsis thaliana]
  misc_feature (87)..(281): Homolog of NCBI NO: 26324295 NR Description: unnamed protein product [Mus musculus]
  misc_feature (85)..(281): Homolog of NCBI NO: 12834577 NR Description: unnamed protein product [Mus musculus]
  misc_feature (87)..(281): Homolog of NCBI NO: 9910264 NR Description: histone cell cycle regulation defective
  misc_feature (87)..(281): Homolog of NCBI NO: 26324295 NR Description: unnamed protein product [Mus musculus]
  misc_feature (70)..(284): Homolog of NCBI NO: 15223842 NR Description: expressed protein [Arabidopsis thaliana]
  misc_feature (46)..(284): Homolog of NCBI NO: 25405462 NR Description: unknown protein, 90320-88994 [imported] -
  misc_feature (76)..(284): Homolog of NCBI NO: 18402817 NR Description: expressed protein [Arabidopsis thaliana]
  misc_feature (17)..(284): Homolog of NCBI NO: 34897632 NR Description: hypothetical protein [Oryza sativa]
RRAQRYKDASRRLPTAMARRRLLALASRLYGRPQATQPWRRPPPRFLSSAASGTLDHLKSPPFARPAARNPASYPWDRFGGGQKRTMFIQTQSTPNPQSLMFYPGKPVMEIGSSDFPNARTAMTSPLAKSLFAIDGVTRVFFGSDFVTVTKSEETSWDCLKPEVFAAIMDFYSSGQPLFLDSNAAASMDTAIHEDDSEIVAMIKELLETRIRPAVQDDGGDIEYRGFDPETGTVKLKMQGACSGCPSSSVTLKSGIENMLMHYVPEVKGVEQEFDGDEEAEVAG

SEQ ID NO: 2044 - protein, 268 aa, Zea mays subsp. mays
  peptide (1)..(268): Ceres Seq. ID no. 13492807
  misc_feature (187)..(257): Pfam Name: NifU-like domain Pfam Description: NifU-like domain
  misc_feature (187)..(257): Pfam Name: NifU-like domain Pfam Description: NifU-like domain
  misc_feature (69)..(265): Homolog of NCBI NO: 34856373 NR Description: similar to HIRA-interacting protein 5 (mHIRIP5)
  misc_feature (71)..(265): Homolog of NCBI NO: 9910264 NR Description: histone cell cycle regulation defective
  misc_feature (69)..(265): Homolog of NCBI NO: 34500321 NR Description: NifU-like protein HIRIP5 [Mus musculus]
  misc_feature (69)..(265): Homolog of NCBI NO: 12834577 NR Description: unnamed protein product [Mus musculus]
  misc_feature (69)..(267): Homolog of NCBI NO: 37681825 NR Description: HIRA interacting protein 5 [Danio rerio]
  misc_feature (69)..(265): Homolog of NCBI NO: 34856373 NR Description: similar to HIRA-interacting protein 5 (mHIRIP5)
  misc_feature (69)..(265): Homolog of NCBI NO: 34500321 NR Description: NifU-like protein HIRIP5 [Mus musculus]
  misc_feature (69)..(267): Homolog of NCBI NO: 37681825 NR Description: HIRA interacting protein 5 [Danio rerio]
  misc_feature (1)..(268): Homolog of NCBI NO: 34897632 NR Description: hypothetical protein [Oryza sativa]
  misc_feature (60)..(268): Homolog of NCBI NO: 18402817 NR Description: expressed protein [Arabidopsis thaliana]
  misc_feature (30)..(268): Homolog of NCBI NO: 25405462 NR Description: unknown protein, 90320-88994 [imported] -
  misc_feature (54)..(268): Homolog of NCBI NO: 15223842 NR Description: expressed protein [Arabidopsis thaliana]
  misc_feature (71)..(265): Homolog of NCBI NO: 26324295 NR Description: unnamed protein product [Mus musculus]
  misc_feature (69)..(265): Homolog of NCBI NO: 12834577 NR Description: unnamed protein product [Mus musculus]
  misc_feature (71)..(265): Homolog of NCBI NO: 9910264 NR Description: histone cell cycle regulation defective
  misc_feature (71)..(265): Homolog of NCBI NO: 26324295 NR Description: unnamed protein product [Mus musculus]
  misc_feature (54)..(268): Homolog of NCBI NO: 15223842 NR Description: expressed protein [Arabidopsis thaliana]
  misc_feature (30)..(268): Homolog of NCBI NO: 25405462 NR Description: unknown protein, 90320-88994 [imported] -
  misc_feature (60)..(268): Homolog of NCBI NO: 18402817 NR Description: expressed protein [Arabidopsis thaliana]
  misc_feature (1)..(268): Homolog of NCBI NO: 34897632 NR Description: hypothetical protein [Oryza sativa]
MARRRLLALASRLYGRPQATQPWRRPPPRFLSSAASGTLDHLKSPPFARPAARNPASYPWDRFGGGQKRTMFIQTQSTPNPQSLMFYPGKPVMEIGSSDFPNARTAMTSPLAKSLFAIDGVTRVFFGSDFVTVTKSEETSWDCLKPEVFAAIMDFYSSGQPLFLDSNAAASMDTAIHEDDSEIVAMIKELLETRIRPAVQDDGGDIEYRGFDPETGTVKLKMQGACSGCPSSSVTLKSGIENMLMHYVPEVKGVEQEFDGDEEAEVAG

SEQ ID NO: 2045 - protein, 198 aa, Zea mays subsp. mays
  peptide (1)..(198): Ceres Seq. ID no. 13492808
  misc_feature (117)..(187): Pfam Name: NifU-like domain Pfam Description: NifU-like domain
  misc_feature (117)..(187): Pfam Name: NifU-like domain Pfam Description: NifU-like domain
  misc_feature (1)..(195): Homolog of NCBI NO: 34856373 NR Description: similar to HIRA-interacting protein 5 (mHIRIP5)
  misc_feature (1)..(195): Homolog of NCBI NO: 9910264 NR Description: histone cell cycle regulation defective
  misc_feature (1)..(195): Homolog of NCBI NO: 34500321 NR Description: NifU-like protein HIRIP5 [Mus musculus]
  misc_feature (1)..(195): Homolog of NCBI NO: 12834577 NR Description: unnamed protein product [Mus musculus]
  misc_feature (1)..(197): Homolog of NCBI NO: 37681825 NR Description: HIRA interacting protein 5 [Danio rerio]
  misc_feature (1)..(195): Homolog of NCBI NO: 34856373 NR Description: similar to HIRA-interacting protein 5 (mHIRIP5)
  misc_feature (1)..(195): Homolog of NCBI NO: 34500321 NR Description: NifU-like protein HIRIP5 [Mus musculus]
  misc_feature (1)..(197): Homolog of NCBI NO: 37681825 NR Description: HIRA interacting protein 5 [Danio rerio]
  misc_feature (1)..(198): Homolog of NCBI NO: 34897632 NR Description: hypothetical protein [Oryza sativa]
  misc_feature (1)..(198): Homolog of NCBI NO: 18402817 NR Description: expressed protein [Arabidopsis thaliana]
  misc_feature (1)..(198): Homolog of NCBI NO: 25405462 NR Description: unknown protein, 90320-88994 [imported] -
  misc_feature (1)..(198): Homolog of NCBI NO: 15223842 NR Description: expressed protein [Arabidopsis thaliana]
  misc_feature (1)..(195): Homolog of NCBI NO: 26324295 NR Description: unnamed protein product [Mus musculus]
  misc_feature (1)..(195): Homolog of NCBI NO: 12834577 NR Description: unnamed protein product [Mus musculus]
  misc_feature (1)..(195): Homolog of NCBI NO: 9910264 NR Description: histone cell cycle regulation defective
  misc_feature (1)..(195): Homolog of NCBI NO: 26324295 NR Description: unnamed protein product [Mus musculus]
  misc_feature (1)..(198): Homolog of NCBI NO: 15223842 NR Description: expressed protein [Arabidopsis thaliana]
  misc_feature (1)..(198): Homolog of NCBI NO: 25405462 NR Description: unknown protein, 90320-88994 [imported] -
  misc_feature (1)..(198): Homolog of NCBI NO: 18402817 NR Description: expressed protein [Arabidopsis thaliana]
  misc_feature (1)..(198): Homolog of NCBI NO: 34897632 NR Description: hypothetical protein [Oryza sativa]
MFIQTQSTPNPQSLMFYPGKPVMEIGSSDFPNARTAMTSPLAKSLFAIDGVTRVFFGSDFVTVTKSEETSWDCLKPEVFAAIMDFYSSGQPLFLDSNAAASMDTAIHEDDSEIVAMIKELLETRIRPAVQDDGGDIEYRGFDPETGTVKLKMQGACSGCPSSSVTLKSGIENMLMHYVPEVKGVEQEFDGDEEAEVAG

SEQ ID NO: 2046 - DNA, 1157 bp, Zea mays subsp. mays; identical to SEQ ID NO: 1745
  misc_feature (1)..(1157): Ceres Seq. ID no. 12373468
  misc_feature: MA Experiment ID: 108544 Result: Up-regulated in Transcription

SEQ ID NO: 2047 - protein, 189 aa, Zea mays subsp. mays; identical to SEQ ID NO: 1746
  peptide (1)..(189): Ceres Seq. ID no. 12373469
  misc_feature (57)..(185): Homolog of NCBI NO: 27705170 NR Description: similar to ubiqutin carboxyl-terminal hydrolase
  misc_feature (57)..(185): Homolog of NCBI NO: 7710106 NR Description: ubiquitin carboxyl-terminal esterase L3
  misc_feature (57)..(185): Homolog of NCBI NO: 7522621 NR Description: ubiquitin carboxy-terminal hydrolase-6 (EC
  misc_feature (54)..(185): Homolog of NCBI NO: 5805326 NR Description: ubiquitin carboxyl-terminal hydrolase-6 [Gallus
  misc_feature (57)..(185): Homolog of NCBI NO: 17380334 NR Description: Ubiquitin carboxyl-terminal hydrolase isozyme L3
  misc_feature (57)..(185): Homolog of NCBI NO: 5174741 NR Description: ubiquitin carboxyl-terminal esterase L3
  misc_feature (51)..(129): Homolog of NCBI NO: 7488069 NR Description: probable carboxyl-terminal proteinase -
  misc_feature (51)..(185): Homolog of NCBI NO: 15236549 NR Description: carboxyl-terminal proteinase like protein
  misc_feature (42)..(185): Homolog of NCBI NO: 14140139 NR Description: putative protein [Oryza sativa]
  misc_feature (51)..(185): Homolog of NCBI NO: 38346164 NR Description: OSJNBa0079A21.11 [Oryza sativa (japonica
  misc_feature (57)..(185): Homolog of NCBI NO: 27705170 NR Description: similar to ubiqutin carboxyl-terminal hydrolase
  misc_feature (57)..(185): Homolog of NCBI NO: 7710106 NR Description: ubiquitin carboxyl-terminal esterase L3
  misc_feature (57)..(185): Homolog of NCBI NO: 7522621 NR Description: ubiquitin carboxy-terminal hydrolase-6 (EC
  misc_feature (54)..(185): Homolog of NCBI NO: 5805326 NR Description: ubiquitin carboxyl-terminal hydrolase-6 [Gallus
  misc_feature (57)..(185): Homolog of NCBI NO: 17380334 NR Description: Ubiquitin carboxyl-terminal hydrolase isozyme L3
  misc_feature (57)..(185): Homolog of NCBI NO: 5174741 NR Description: ubiquitin carboxyl-terminal esterase L3
  misc_feature (51)..(129): Homolog of NCBI NO: 7488069 NR Description: probable carboxyl-terminal proteinase -
  misc_feature (51)..(185): Homolog of NCBI NO: 15236549 NR Description: carboxyl-terminal proteinase like protein
  misc_feature (42)..(185): Homolog of NCBI NO: 14140139 NR Description: putative protein [Oryza sativa]
  misc_feature (51)..(185): Homolog of NCBI NO: 38346164 NR Description: OSJNBa0079A21.11 [Oryza sativa (japonica

SEQ ID NO: 2048 - protein, 137 aa, Zea mays subsp. mays; identical to SEQ ID NO: 1747
  peptide (1)..(137): Ceres Seq. ID no. 12373470
  misc_feature (1)..(133): Homolog of NCBI NO: 15236549 NR Description: carboxyl-terminal proteinase like protein
  misc_feature (1)..(133): Homolog of NCBI NO: 14140139 NR Description: putative protein [Oryza sativa]
  misc_feature (1)..(133): Homolog of NCBI NO: 38346164 NR Description: OSJNBa0079A21.11 [Oryza sativa (japonica
  misc_feature (5)..(133): Homolog of NCBI NO: 27705170 NR Description: similar to ubiqutin carboxyl-terminal hydrolase
  misc_feature (5)..(133): Homolog of NCBI NO: 7710106 NR Description: ubiquitin carboxyl-terminal esterase L3
  misc_feature (5)..(133): Homolog of NCBI NO: 7522621 NR Description: ubiquitin carboxy-terminal hydrolase-6 (EC
  misc_feature (2)..(133): Homolog of NCBI NO: 5805326 NR Description: ubiquitin carboxyl-terminal hydrolase-6 [Gallus
  misc_feature (5)..(133): Homolog of NCBI NO: 17380334 NR Description: Ubiquitin carboxyl-terminal hydrolase isozyme L3
  misc_feature (5)..(133): Homolog of NCBI NO: 5174741 NR Description: ubiquitin carboxyl-terminal esterase L3
  misc_feature (1)..(77): Homolog of NCBI NO: 7488069 NR Description: probable carboxyl-terminal proteinase -
  misc_feature (5)..(133): Homolog of NCBI NO: 27705170 NR Description: similar to ubiqutin carboxyl-terminal hydrolase
  misc_feature (5)..(133): Homolog of NCBI NO: 7710106 NR Description: ubiquitin carboxyl-terminal esterase L3
  misc_feature (5)..(133): Homolog of NCBI NO: 7522621 NR Description: ubiquitin carboxy-terminal hydrolase-6 (EC
  misc_feature (2)..(133): Homolog of NCBI NO: 5805326 NR Description: ubiquitin carboxyl-terminal hydrolase-6 [Gallus
  misc_feature (5)..(133): Homolog of NCBI NO: 17380334 NR Description: Ubiquitin carboxyl-terminal hydrolase isozyme L3
  misc_feature (5)..(133): Homolog of NCBI NO: 5174741 NR Description: ubiquitin carboxyl-terminal esterase L3
  misc_feature (1)..(77): Homolog of NCBI NO: 7488069 NR Description: probable carboxyl-terminal proteinase -
  misc_feature (1)..(133): Homolog of NCBI NO: 15236549 NR Description: carboxyl-terminal proteinase like protein
  misc_feature (1)..(133): Homolog of NCBI NO: 14140139 NR Description: putative protein [Oryza sativa]
  misc_feature (1)..(133): Homolog of NCBI NO: 38346164 NR Description: OSJNBa0079A21.11 [Oryza sativa (japonica

SEQ ID NO: 2049 - protein, 101 aa, Zea mays subsp. mays; identical to SEQ ID NO: 1748
  peptide (1)..(101): Ceres Seq. ID no. 12373471
  misc_feature (1)..(97): Homolog of NCBI NO: 27705170 NR Description: similar to ubiqutin carboxyl-terminal hydrolase
  misc_feature (1)..(97): Homolog of NCBI NO: 7710106 NR Description: ubiquitin carboxyl-terminal esterase L3
  misc_feature (1)..(97): Homolog of NCBI NO: 7522621 NR Description: ubiquitin carboxy-terminal hydrolase-6 (EC
  misc_feature (1)..(97): Homolog of NCBI NO: 5805326 NR Description: ubiquitin carboxyl-terminal hydrolase-6 [Gallus
  misc_feature (1)..(97): Homolog of NCBI NO: 17380334 NR Description: Ubiquitin carboxyl-terminal hydrolase isozyme L3
  misc_feature (1)..(97): Homolog of NCBI NO: 5174741 NR Description: ubiquitin carboxyl-terminal esterase L3
  misc_feature (1)..(41): Homolog of NCBI NO: 7488069 NR Description: probable carboxyl-terminal proteinase -
  misc_feature (1)..(97): Homolog of NCBI NO: 15236549 NR Description: carboxyl-terminal proteinase like protein
  misc_feature (1)..(97): Homolog of NCBI NO: 14140139 NR Description: putative protein [Oryza sativa]
  misc_feature (1)..(97): Homolog of NCBI NO: 38346164 NR Description: OSJNBa0079A21.11 [Oryza sativa (japonica
  misc_feature (1)..(97): Homolog of NCBI NO: 27705170 NR Description: similar to ubiqutin carboxyl-terminal hydrolase
  misc_feature (1)..(97): Homolog of NCBI NO: 7710106 NR Description: ubiquitin carboxyl-terminal esterase L3
  misc_feature (1)..(97): Homolog of NCBI NO: 7522621 NR Description: ubiquitin carboxy-terminal hydrolase-6 (EC
  misc_feature (1)..(97): Homolog of NCBI NO: 5805326 NR Description: ubiquitin carboxyl-terminal hydrolase-6 [Gallus
  misc_feature (1)..(97): Homolog of NCBI NO: 17380334 NR Description: Ubiquitin carboxyl-terminal hydrolase isozyme L3
  misc_feature (1)..(97): Homolog of NCBI NO: 5174741 NR Description: ubiquitin carboxyl-terminal esterase L3
  misc_feature (1)..(41): Homolog of NCBI NO: 7488069 NR Description: probable carboxyl-terminal proteinase -
  misc_feature (1)..(97): Homolog of NCBI NO: 15236549 NR Description: carboxyl-terminal proteinase like protein
  misc_feature (1)..(97): Homolog of NCBI NO: 14140139 NR Description: putative protein [Oryza sativa]
  misc_feature (1)..(97): Homolog of NCBI NO: 38346164 NR Description: OSJNBa0079A21.11 [Oryza sativa (japonica

SEQ ID NO: 2050 - DNA, 1168 bp, Zea mays subsp. mays
  misc_feature (1)..(1168): Ceres Seq. ID no. 13493084
  misc_feature: MA Experiment ID: 20000535 Result: Down-regulated in Transcription
  misc_feature: MA Experiment 20000535 PARAMETER Experiment Name: Zm_Hybrid_Seed_Dev_P Parameter: DAP Value: 30 vs. 12
  misc_feature: MA Experiment 20000535 PARAMETER Experiment Name: Zm_Hybrid_Seed_Dev_P Parameter: Organism Value: Zea mays
  misc_feature: MA Experiment 20000535 PARAMETER Experiment Name: Zm_Hybrid_Seed_Dev_P Parameter: Plant Line Value: 35A19
  misc_feature: MA Experiment 20000535 PARAMETER Experiment Name: Zm_Hybrid_Seed_Dev_P Parameter: Tissue Value: Embryo vs. Unfert Floret
atcgaaaacttcaatgtgcacaatataaactagctgggatcaaatacaggagcacctcgagtctgagagaatggctaacactgctaagggtaaggtctgtgtcactggggcgtctggtttcatcgcctcctggctcgtcaagcggcttcttgagtctgggtaccatgtcctgggaacagtcagagacccagggaatggcaagaaagtagggcacctctggggcctggaaggcgcaaaggaaaggctgcagctcgtgagagctgatctcttggaggaagggagcttcgacgacgctgtgatggcttgcgagggcgtcttccacaccgcatcgcccgtcgtcaccggatctaattccaaggaggagatgcttgattcagcaataaacggcacgatgaacgtgctacgctcgtgcaagaagaacccatcgctcangagggttgtcctgacatcctcgtcgtcgacagtgaggatcaaggacgaagccgacctgccccctaacgtgctgctggacgaatcgtcgtggagctccatcgagttctgcgaaagtctccagatatggtacgccgtcgcaaagatcctcgccgagaaggcagcctgggagttcgccggagagcacaggatcgacctcgtcaccgttcttccgaccttcgttgtcggacctactctgtctcctgagctcggccccaccgcttctgatgtcctcggcctgttccaaggagagacggggaagttcacgacgtacgggaggatggggtacgtccacatcgacgacgtggcgaggtgccacatgctggcgtacgaggccgcgggcgcccgagggaggtacatctgcagcgcggcggtgctggactgcggcgacctcgccgccctgctcgcgcggcggttcccagcgtaccccgtcccgaggagcctgccccgcgcctacggcgagcagtcgtacggcttcgacacgtccaaggcccgcgcgctggggctggcggaattcaagggcgtcgaggagatgttcgacgacgccgtcgcctcgttcataggccatggccatctccccgccgccgaggaacgccggcacgcgtagcctcttggtctgaaactacatgaatgaacgtatcatgtactaattaaattatttaatacttttaactagcatctaatcatgccgtttagtctc

SEQ ID NO: 2051 - protein, 334 aa, Zea mays subsp. mays
  peptide (1)..(334): Ceres Seq. ID no. 13493085
  misc_feature (8)..(265): Pfam Name: 3-beta hydroxysteroid dehydrogenase/isomerase family Pfam Description: 3-beta hydroxysteroid dehydrogenase/isomerase
  misc_feature (6)..(334): Homolog of NCBI NO: 30230341 NR Description: putative dihydroflavonol 4-reductase [Anthurium
  misc_feature (11)..(325): Homolog of NCBI NO: 15221433 NR Description: oxidoreductase family [Arabidopsis thaliana]
  misc_feature (3)..(325): Homolog of NCBI NO: 7431406 NR Description: probable cinnamyl-alcohol dehydrogenase (EC
  misc_feature (3)..(318): Homolog of NCBI NO: 5852203 NR Description: aldehyde reductase [Vigna radiata]
  misc_feature (7)..(326): Homolog of NCBI NO: 25140434 NR Description: cinnamoyl CoA reductase [Solanum tuberosum]
  misc_feature (9)..(330): Homolog of NCBI NO: 9998901 NR Description: cinnamoyl-CoA reductase [Populus balsamifera
  misc_feature (5)..(325): Homolog of NCBI NO: 30690351 NR Description: dihydroflavonol 4-reductase (dihydrokaempferol
  misc_feature (1)..(325): Homolog of NCBI NO: 14030554 NR Description: dihydro-flavanoid reductase-like protein [Zea
  misc_feature (1)..(325): Homolog of NCBI NO: 4581047 NR Description: putative dihydroflavonol reductase [Oryza sativa]
  misc_feature (1)..(325): Homolog of NCBI NO: 34905082 NR Description: putative dihydroflavonol 4-reductase
  misc_feature (121)..(121): Xaa is any aa, unknown or other
MANTAKGKVCVTGASGFIASWLVKRLLESGYHVLGTVRDPGNGKKVGHLWGLEGAKERLQLVRADLLEEGSFDDAVMACEGVFHTASPVVTGSNSKEEMLDSAINGTMNVLRSCKKNPSLXRVVLTSSSSTVRIKDEADLPPNVLLDESSWSSIEFCESLQIWYAVAKILAEKAAWEFAGEHRIDLVTVLPTFVVGPTLSPELGPTASDVLGLFQGETGKFTTYGRMGYVHIDDVARCHMLAYEAAGARGRYICSAAVLDCGDLAALLARRFPAYPVPRSLPRAYGEQSYGFDTSKARALGLAEFKGVEEMFDDAVASFIGHGHLPAAEERRHA

SEQ ID NO: 2052 - protein, 258 aa, Zea mays subsp. mays
  peptide (1)..(258): Ceres Seq. ID no. 13493086
  misc_feature (1)..(189): Pfam Name: 3-beta hydroxysteroid dehydrogenase/isomerase family Pfam Description: 3-beta hydroxysteroid dehydrogenase/isomerase
  misc_feature (1)..(250): Homolog of NCBI NO: 25140434 NR Description: cinnamoyl CoA reductase [Solanum tuberosum]
  misc_feature (1)..(254): Homolog of NCBI NO: 9998901 NR Description: cinnamoyl-CoA reductase [Populus balsamifera
  misc_feature (1)..(258): Homolog of NCBI NO: 30230341 NR Description: putative dihydroflavonol 4-reductase [Anthurium
  misc_feature (1)..(249): Homolog of NCBI NO: 15221433 NR Description: oxidoreductase family [Arabidopsis thaliana]
  misc_feature (1)..(249): Homolog of NCBI NO: 7431406 NR Description: probable cinnamyl-alcohol dehydrogenase (EC
  misc_feature (1)..(242): Homolog of NCBI NO: 5852203 NR Description: aldehyde reductase [Vigna radiata]
  misc_feature (1)..(249): Homolog of NCBI NO: 30690351 NR Description: dihydroflavonol 4-reductase (dihydrokaempferol
  misc_feature (1)..(249): Homolog of NCBI NO: 14030554 NR Description: dihydro-flavanoid reductase-like protein [Zea
  misc_feature (1)..(249): Homolog of NCBI NO: 4581047 NR Description: putative dihydroflavonol reductase [Oryza sativa]
  misc_feature (1)..(249): Homolog of NCBI NO: 34905082 NR Description: putative dihydroflavonol 4-reductase
  misc_feature (45)..(45): Xaa is any aa, unknown or other
MACEGVFHTASPVVTGSNSKEEMLDSAINGTMNVLRSCKKNPSLXRVVLTSSSSTVRIKDEADLPPNVLLDESSWSSIEFCESLQIWYAVAKILAEKAAWEFAGEHRIDLVTVLPTFVVGPTLSPELGPTASDVLGLFQGETGKFTTYGRMGYVHIDDVARCHMLAYEAAGARGRYICSAAVLDCGDLAALLARRFPAYPVPRSLPRAYGEQSYGFDTSKARALGLAEFKGVEEMFDDAVASFIGHGHLPAAEERRHA

SEQ ID NO: 2053 - protein, 236 aa, Zea mays subsp. mays
  peptide (1)..(236): Ceres Seq. ID no. 13493087
  misc_feature (1)..(167): Pfam Name: 3-beta hydroxysteroid dehydrogenase/isomerase family Pfam Description: 3-beta hydroxysteroid dehydrogenase/isomerase
  misc_feature (1)..(228): Homolog of NCBI NO: 25140434 NR Description: cinnamoyl CoA reductase [Solanum tuberosum]
  misc_feature (1)..(232): Homolog of NCBI NO: 9998901 NR Description: cinnamoyl-CoA reductase [Populus balsamifera
  misc_feature (1)..(236): Homolog of NCBI NO: 30230341 NR Description: putative dihydroflavonol 4-reductase [Anthurium
  misc_feature (1)..(227): Homolog of NCBI NO: 15221433 NR Description: oxidoreductase family [Arabidopsis thaliana]
  misc_feature (1)..(227): Homolog of NCBI NO: 7431406 NR Description: probable cinnamyl-alcohol dehydrogenase (EC
  misc_feature (1)..(220): Homolog of NCBI NO: 5852203 NR Description: aldehyde reductase [Vigna radiata]
  misc_feature (1)..(227): Homolog of NCBI NO: 30690351 NR Description: dihydroflavonol 4-reductase (dihydrokaempferol
  misc_feature (1)..(227): Homolog of NCBI NO: 14030554 NR Description: dihydro-flavanoid reductase-like protein [Zea
  misc_feature (1)..(227): Homolog of NCBI NO: 4581047 NR Description: putative dihydroflavonol reductase [Oryza sativa]
  misc_feature (1)..(227): Homolog of NCBI NO: 34905082 NR Description: putative dihydroflavonol 4-reductase
  misc_feature (23)..(23): Xaa is any aa, unknown or other
MLDSAINGTMNVLRSCKKNPSLXRVVLTSSSSTVRIKDEADLPPNVLLDESSWSSIEFCESLQIWYAVAKILAEKAAWEFAGEHRIDLVTVLPTFVVGPTLSPELGPTASDVLGLFQGETGKFTTYGRMGYVHIDDVARCHMLAYEAAGARGRYICSAAVLDCGDLAALLARRFPAYPVPRSLPRAYGEQSYGFDTSKARALGLAEFKGVEEMFDDAVASFIGHGHLPAAEERRHA

SEQ ID NO: 2054 - DNA, 1514 bp, Zea mays subsp. mays
  misc_feature (1)..(1514): Ceres Seq. ID no. 12340715
  misc_feature: MA Experiment ID: 108535 Result: Up-regulated in Transcription
  misc_feature: MA Experiment 108535 PARAMETER Experiment Name: Zm_Meristem_P Parameter: Age (day) Value: 8
  misc_feature: MA Experiment 108535 PARAMETER Experiment Name: Zm_Meristem_P Parameter: Organism Value: Zea mays
  misc_feature: MA Experiment 108535 PARAMETER Experiment Name: Zm_Meristem_P Parameter: Plant Line Value: 35A19
  misc_feature: MA Experiment 108535 PARAMETER Experiment Name: Zm_Meristem_P Parameter: Tissue Value: Root Meristem vs. Above Root Meristem
  misc_feature: MA Experiment ID: 108544 Result: Down-regulated in Transcription
aaaacagccgcatccctctctccctactacctctccctagcagcgganagcttctctcccagccgcagctcctccctctgtcccctctcccaaaacccctctctctccacgcttctccctcactctcccagccgctgcagccgcgctgncctccgccccggcgcccgtcgcgctgccctcccatctccctccggtgttgngtngtcatttgtcaggtagccgcctcccccccccccccccccctnttnagcttgttctccncggcggcggcggcggcggcttggatcggagcggagggagaagatggtggcatcaatcagggtgcccaagacccaacgcgccaggagggagcttctcaagcacgcgcccaagcttgttgagaccagcaagaagacactgatcctccatggtaccaagactagtgctgtgttgaactctgtgctgtcagatatttaccacctaaagcgtgataatgctgtgaaatataccaagaagaatgacaacattaggccttttgaaagtggtggagaatcttctctggaatttttctccctcaaggcagactgtagccttatagtgtatggttctcattcaaagaagaggcccaacaatctgattttggctagaacgtatgaccaccacatatatgaccttgttgaagtaggagttgagaactacaagtcaatggaatcttatgtttatgataagaagctagcaccattacttggatcgaagcctttctttgctttcataggggaacactttgagagttctgaagagctgaaacatttgaaagaagtgctgcttgatcttttcagaggagaggtcgtagagaatctgaaccttgccggtgtggatcggatctatgtgtgcactgcaatctctcccaccactgtttacatgatgcactgtgctctccgtctaaaaaggtcaggtacatctattcctaggatggagctggtcgaagttggaccttcaatggatctggttgtaaggaggcacagacttccagctgaaagtttgaagaaagaagctatgaagaccgctgaacatgctaagaagatgaaaaatgtcaccaaggatccagtgcagggcaagctgggcaaggtctacatgccagaccagcaggttggaaagttgaccttatcaaacgacgtaaagggactaaagagggagcgccgcgaagccaagaaaaatcaggactcaaagaagcaaaaggtcaaccctgagtaaagagcactgaagtttacctttgtattggatacaggtcaggttaagaaaccctggcttgtatctgtttccaactgctgtgttatccaagtagaagttgctcgctgtcagattagtgccatcttgttaggctaaagatctctgtacgactttcacatcagtattgtgtaccaatccatgttatgacataagcatggaattttgagaatgtgttatcctatcaaatatcaaacgtcttctgaggtctcaagccctgttaaaggaggattgtggtaggcttggcg

SEQ ID NO: 2055 - protein, 309 aa, Zea mays subsp. mays
  peptide (1)..(309): Ceres Seq. ID no. 12340716
  misc_feature (1)..(309): Homolog of NCBI NO: 34914658 NR Description: P0504D03.20 [Oryza sativa (japonica >gi|18202717|sp|Q9AWM9|BXD1_ORYSA Brix domain containing protein
  misc_feature (5)..(309): Homolog of NCBI NO: 18403828 NR Description: expressed protein; protein id: At3g23620.1, by cDNA: 25758., supported by cDNA: gi_17979360 [Arabidopsis >gi|18203245|sp|Q9LUG5|U170_ARATH Hypothetical protein At3g23620
  misc_feature (5)..(309): Homolog of NCBI NO: 21554561 NR Description: unknown [Arabidopsis thaliana]
  misc_feature (5)..(305): Homolog of NCBI NO: 7670547 NR Description: unnamed protein product [Mus musculus]
  misc_feature (8)..(305): Homolog of NCBI NO: 27705690 NR Description: similar to RIKEN cDNA 2810470K21 gene [Mus
  misc_feature (8)..(305): Homolog of NCBI NO: 18203123 NR Description: Brix domain containing protein 1 unnamed protein product [Mus musculus] unnamed protein product [Mus musculus]
  misc_feature (8)..(305): Homolog of NCBI NO: 39930469 NR Description: brix domain containing 1 [Homo sapiens] Brix domain containing protein 1 >gi|22268137|gb|AAH35314.1|
  misc_feature (8)..(305): Homolog of NCBI NO: 31982662 NR Description: RIKEN cDNA 2810470K21 [Mus musculus]
  misc_feature (8)..(305): Homolog of NCBI NO: 12850727 NR Description: unnamed protein product [Mus musculus]
  misc_feature (8)..(307): Homolog of NCBI NO: 28461332 NR Description: Similar to RIKEN cDNA 2810470K21 gene [Xenopus
MVASIRVPKTQRARRELLKHAPKLVETSKKTLILHGTKTSAVLNSVLSDIYHLKRDNAVKYTKKNDNIRPFESGGESSLEFFSLKADCSLIVYGSHSKKRPNNLILARTYDHHIYDLVEVGVENYKSMESYVYDKKLAPLLGSKPFFAFIGEHFESSEELKHLKEVLLDLFRGEVVENLNLAGVDRIYVCTAISPTTVYMMHCALRLKRSGTSIPRMELVEVGPSMDLVVRRHRLPAESLKKEAMKTAEHAKKMKNVTKDPVQGKLGKVYMPDQQVGKLTLSNDVKGLKRERREAKKNQDSKKQKVNPE

SEQ ID NO: 2056 - protein, 182 aa, Zea mays subsp. mays
  peptide (1)..(182): Ceres Seq. ID no. 12340717
  misc_feature (1)..(182): Homolog of NCBI NO: 34914658 NR Description: P0504D03.20 [Oryza sativa (japonica >gi|18202717|sp|Q9AWM9|BXD1_ORYSA Brix domain containing protein
  misc_feature (1)..(182): Homolog of NCBI NO: 18403828 NR Description: expressed protein; protein id: At3g23620.1, by cDNA: 25758., supported by cDNA: gi_17979360 [Arabidopsis >gi|18203245|sp|Q9LUG5|U170_ARATH Hypothetical protein At3g23620
  misc_feature (1)..(182): Homolog of NCBI NO: 21554561 NR Description: unknown [Arabidopsis thaliana]
  misc_feature (1)..(178): Homolog of NCBI NO: 7670547 NR Description: unnamed protein product [Mus musculus]
  misc_feature (1)..(178): Homolog of NCBI NO: 27705690 NR Description: similar to RIKEN cDNA 2810470K21 gene [Mus
  misc_feature (1)..(178): Homolog of NCBI NO: 18203123 NR Description: Brix domain containing protein 1 unnamed protein product [Mus musculus] unnamed protein product [Mus musculus]
  misc_feature (1)..(178): Homolog of NCBI NO: 39930469 NR Description: brix domain containing 1 [Homo sapiens] Brix domain containing protein 1 >gi|22268137|gb|AAH35314.1|
  misc_feature (1)..(178): Homolog of NCBI NO: 31982662 NR Description: RIKEN cDNA 2810470K21 [Mus musculus]
  misc_feature (1)..(178): Homolog of NCBI NO: 12850727 NR Description: unnamed protein product [Mus musculus]
  misc_feature (1)..(180): Homolog of NCBI NO: 28461332 NR Description: Similar to RIKEN cDNA 2810470K21 gene [Xenopus
MESYVYDKKLAPLLGSKPFFAFIGEHFESSEELKHLKEVLLDLFRGEVVENLNLAGVDRIYVCTAISPTTVYMMHCALRLKRSGTSIPRMELVEVGPSMDLVVRRHRLPAESLKKEAMKTAEHAKKMKNVTKDPVQGKLGKVYMPDQQVGKLTLSNDVKGLKRERREAKKNQDSKKQKVNPE

SEQ ID NO: 2057 - DNA, 1370 bp, Zea mays subsp. mays
  misc_feature (1)..(1370): Ceres Seq. ID no. 12377688
  misc_feature: MA Experiment ID: 108515 Result: Down-regulated in Transcription
  misc_feature: MA Experiment 108515 PARAMETER Experiment Name: Zm_2mM_SA_P Parameter: Age (day) Value: 8
  misc_feature: MA Experiment 108515 PARAMETER Experiment Name: Zm_2mM_SA_P Parameter: Organism Value: Zea mays
  misc_feature: MA Experiment 108515 PARAMETER Experiment Name: Zm_2mM_SA_P Parameter: Plant Line Value: 35A19
  misc_feature: MA Experiment 108515 PARAMETER Experiment Name: Zm_2mM_SA_P Parameter: Timepoint (hr) Value: 12
  misc_feature: MA Experiment 108515 PARAMETER Experiment Name: Zm_2mM_SA_P Parameter: Tissue Value: Aerial
  misc_feature: MA Experiment 108515 PARAMETER Experiment Name: Zm_2mM_SA_P Parameter: Treatment Value: 2mM SA vs. No Treatment
  misc_feature: MA Experiment ID: 108523 Result: Down-regulated in Transcription
  misc_feature: MA Experiment 108523 PARAMETER Experiment Name: Zm_42deg_Heat_P Parameter: Age (day) Value: 8
  misc_feature: MA Experiment 108523 PARAMETER Experiment Name: Zm_42deg_Heat_P Parameter: Organism Value: Zea mays
  misc_feature: MA Experiment 108523 PARAMETER Experiment Name: Zm_42deg_Heat_P Parameter: Plant Line Value: 35A19
  misc_feature: MA Experiment 108523 PARAMETER Experiment Name: Zm_42deg_Heat_P Parameter: Temperature (deg C) Value: 42 vs. 22
  misc_feature: MA Experiment 108523 PARAMETER Experiment Name: Zm_42deg_Heat_P Parameter: Timepoint (hr) Value: 6
  misc_feature: MA Experiment 108523 PARAMETER Experiment Name: Zm_42deg_Heat_P Parameter: Tissue Value: Aerial
  misc_feature: MA Experiment ID: 108528 Result: Up-regulated in Transcription
  misc_feature: MA Experiment 108528 PARAMETER Experiment Name: Zm_Imbibed_Seeds_P Parameter: Age (day) Value: 5 vs. 2
  misc_feature: MA Experiment 108528 PARAMETER Experiment Name: Zm_Imbibed_Seeds_P Parameter: Organism Value: Zea mays
  misc_feature: MA Experiment 108528 PARAMETER Experiment Name: Zm_Imbibed_Seeds_P Parameter: Plant Line Value: 35A19
  misc_feature: MA Experiment 108528 PARAMETER Experiment Name: Zm_Imbibed_Seeds_P Parameter: Tissue Value: Aerial vs. Embryo
  misc_feature: MA Experiment ID: 108530 Result: Up-regulated in Transcription
  misc_feature: MA Experiment 108530 PARAMETER Experiment Name: Zm_Imbibed_Seeds_P Parameter: Age (day) Value: 6 vs. 2
  misc_feature: MA Experiment 108530 PARAMETER Experiment Name: Zm_Imbibed_Seeds_P Parameter: Organism Value: Zea mays
  misc_feature: MA Experiment 108530 PARAMETER Experiment Name: Zm_Imbibed_Seeds_P Parameter: Plant Line Value: 35A19
  misc_feature: MA Experiment 108530 PARAMETER Experiment Name: Zm_Imbibed_Seeds_P Parameter: Tissue Value: Aerial vs. Embryo
  misc_feature: MA Experiment ID: 108536 Result: Down-regulated in Transcription
  misc_feature: MA Experiment 108536 PARAMETER Experiment Name: Zm_Meristem_P Parameter: Age (day) Value: 8
  misc_feature: MA Experiment 108536 PARAMETER Experiment Name: Zm_Meristem_P Parameter: Organism Value: Zea mays
  misc_feature: MA Experiment 108536 PARAMETER Experiment Name: Zm_Meristem_P Parameter: Plant Line Value: 35A19
  misc_feature: MA Experiment 108536 PARAMETER Experiment Name: Zm_Meristem_P Parameter: Tissue Value: Shoot Meristem vs. Above Shoot Meristem
  misc_feature: MA Experiment ID: 108543 Result: Up-regulated in Transcription
  misc_feature: MA Experiment ID: 108545 Result: Up-regulated in Transcription
  misc_feature: MA Experiment 108545 PARAMETER Experiment Name: Zm_Imbibed_Seeds_P Parameter: Age (day) Value: 3 vs. 2
  misc_feature: MA Experiment 108545 PARAMETER Experiment Name: Zm_Imbibed_Seeds_P Parameter: Organism Value: Zea mays
  misc_feature: MA Experiment 108545 PARAMETER Experiment Name: Zm_Imbibed_Seeds_P Parameter: Plant Line Value: 35A19
  misc_feature: MA Experiment 108545 PARAMETER Experiment Name: Zm_Imbibed_Seeds_P Parameter: Tissue Value: Aerial vs. Embryo
  misc_feature: MA Experiment ID: 108546 Result: Down-regulated in Transcription
  misc_feature: MA Experiment 108546 PARAMETER Experiment Name: Zm_Imbibed_Seeds_P Parameter: Age (day) Value: 3 vs. 2
  misc_feature: MA Experiment 108546 PARAMETER Experiment Name: Zm_Imbibed_Seeds_P Parameter: Organism Value: Zea mays
  misc_feature: MA Experiment 108546 PARAMETER Experiment Name: Zm_Imbibed_Seeds_P Parameter: Plant Line Value: 35A19
  misc_feature: MA Experiment 108546 PARAMETER Experiment Name: Zm_Imbibed_Seeds_P Parameter: Tissue Value: Roots vs. Embryo
  misc_feature: MA Experiment ID: 108547 Result: Up-regulated in Transcription
  misc_feature: MA Experiment 108547 PARAMETER Experiment Name: Zm_Imbibed_Seeds_P Parameter: Age (day) Value: 4 vs. 2
  misc_feature: MA Experiment 108547 PARAMETER Experiment Name: Zm_Imbibed_Seeds_P Parameter: Organism Value: Zea mays
  misc_feature: MA Experiment 108547 PARAMETER Experiment Name: Zm_Imbibed_Seeds_P Parameter: Plant Line Value: 35A19
  misc_feature: MA Experiment 108547 PARAMETER Experiment Name: Zm_Imbibed_Seeds_P Parameter: Tissue Value: Aerial vs. Embryo
  misc_feature: MA Experiment ID: 108556 Result: Down-regulated in Transcription
  misc_feature: MA Experiment 108556 PARAMETER Experiment Name: Zm_Drought_P Parameter: Age (day) Value: 9
  misc_feature: MA Experiment 108556 PARAMETER Experiment Name: Zm_Drought_P Parameter: Organism Value: Zea mays
  misc_feature: MA Experiment 108556 PARAMETER Experiment Name: Zm_Drought_P Parameter: Plant Line Value: 35A19
  misc_feature: MA Experiment 108556 PARAMETER Experiment Name: Zm_Drought_P Parameter: Timepoint (hr) Value: 24
  misc_feature: MA Experiment 108556 PARAMETER Experiment Name: Zm_Drought_P Parameter: Tissue Value: Aerial
  misc_feature: MA Experiment 108556 PARAMETER Experiment Name: Zm_Drought_P Parameter: Treatment Value: Drought vs. No Drought
  misc_feature: MA Experiment ID: 108597 Result: Down-regulated in Transcription
  misc_feature: MA Experiment 108597 PARAMETER Experiment Name: Zm_100uM_ABA_P Parameter: Age (day) Value: 9
  misc_feature: MA Experiment 108597 PARAMETER Experiment Name: Zm_100uM_ABA_P Parameter: Organism Value: Zea mays
  misc_feature: MA Experiment 108597 PARAMETER Experiment Name: Zm_100uM_ABA_P Parameter: Plant Line Value: 35A19
  misc_feature: MA Experiment 108597 PARAMETER Experiment Name: Zm_100uM_ABA_P Parameter: Timepoint (hr) Value: 24
  misc_feature: MA Experiment 108597 PARAMETER Experiment Name: Zm_100uM_ABA_P Parameter: Tissue Value: Aerial
  misc_feature: MA Experiment 108597 PARAMETER Experiment Name: Zm_100uM_ABA_P Parameter: Treatment Value: 100uM ABA vs. No Treatment
  misc_feature: MA Experiment ID: 108687 Result: Down-regulated in Transcription
  misc_feature: MA Experiment 108687 PARAMETER Experiment Name: Zm_Embryos-Flowers__P Parameter: Tissue Value: Embryo vs. Aerial+
  misc_feature: MA Experiment ID: 108688 Result: Down-regulated in Transcription
  misc_feature: MA Experiment 108688 PARAMETER Experiment Name: Zm_Embryos-Flowers__P Parameter: Tissue Value: Immature Flowers vs. Aerial+
  misc_feature: MA Experiment ID: 20000478 Result: Down-regulated in Transcription
  misc_feature: MA Experiment 20000478 PARAMETER Experiment Name: Zm_5mM_SA_P Parameter: Age (day) Value: 11
  misc_feature: MA Experiment 20000478 PARAMETER Experiment Name: Zm_5mM_SA_P Parameter: Organism Value: Zea mays
  misc_feature: MA Experiment 20000478 PARAMETER Experiment Name: Zm_5mM_SA_P Parameter: Plant Line Value: 35A19
  misc_feature: MA Experiment 20000478 PARAMETER Experiment Name: Zm_5mM_SA_P Parameter: Timepoint (hr) Value: 72
  misc_feature: MA Experiment 20000478 PARAMETER Experiment Name: Zm_5mM_SA_P Parameter: Tissue Value: Aerial
  misc_feature: MA Experiment 20000478 PARAMETER Experiment Name: Zm_5mM_SA_P Parameter: Treatment Value: 5mM SA vs. No Treatment
  misc_feature: MA Experiment ID: 20000480 Result: Down-regulated in Transcription
  misc_feature: MA Experiment 20000480 PARAMETER Experiment Name: Zm_Drought_P Parameter: Age (day) Value: 11
  misc_feature: MA Experiment 20000480 PARAMETER Experiment Name: Zm_Drought_P Parameter: Organism Value: Zea mays
  misc_feature: MA Experiment 20000480 PARAMETER Experiment Name: Zm_Drought_P Parameter: Plant Line Value: 35A19
  misc_feature: MA Experiment 20000480 PARAMETER Experiment Name: Zm_Drought_P Parameter: Timepoint (hr) Value: 72
  misc_feature: MA Experiment 20000480 PARAMETER Experiment Name: Zm_Drought_P Parameter: Tissue Value: Aerial
  misc_feature: MA Experiment 20000480 PARAMETER Experiment Name: Zm_Drought_P Parameter: Treatment Value: Drought vs. No Drought
  misc_feature: MA Experiment ID: 20000532 Result: Down-regulated in Transcription
  misc_feature: MA Experiment 20000532 PARAMETER Experiment Name: Zm_0.001percent_MeJA_P Parameter: Age (day) Value: 10
  misc_feature: MA Experiment 20000532 PARAMETER Experiment Name: Zm_0.001percent_MeJA_P Parameter: Organism Value: Zea mays
  misc_feature: MA Experiment 20000532 PARAMETER Experiment Name: Zm_0.001percent_MeJA_P Parameter: Plant Line Value: 35A19
  misc_feature: MA Experiment 20000532 PARAMETER Experiment Name: Zm_0.001percent_MeJA_P Parameter: Timepoint (hr) Value: 48
  misc_feature: MA Experiment 20000532 PARAMETER Experiment Name: Zm_0.001percent_MeJA_P Parameter: Tissue Value: Aerial
  misc_feature: MA Experiment 20000532 PARAMETER Experiment Name: Zm_0.001percent_MeJA_P Parameter: Treatment Value: 0.001percent MeJA vs. No Treatment
  misc_feature: MA Experiment ID: 20000626 Result: Down-regulated in Transcription
  misc_feature: MA Experiment 20000626 PARAMETER Experiment Name: Zm_Herbicide-Treatments_P Parameter: Timepoint (hr) Value: 12
  misc_feature: MA Experiment 20000626 PARAMETER Experiment Name: Zm_Herbicide-Treatments_P Parameter: Tissue Value: Aerial
  misc_feature: MA Experiment 20000626 PARAMETER Experiment Name: Zm_Herbicide-Treatments_P Parameter: Treatment Value: Roundup vs. No Treatment
  misc_feature: MA Experiment ID: 20001608 Result: Up-regulated in Transcription
  misc_feature: MA Experiment 20001608 PARAMETER Experiment Name: Zm_50ppm_KNO3_L-to-H_P Parameter: Age (day) Value: 21
  misc_feature: MA Experiment 20001608 PARAMETER Experiment Name: Zm_50ppm_KNO3_L-to-H_P Parameter: Organism Value: Zea mays
  misc_feature: MA Experiment 20001608 PARAMETER Experiment Name: Zm_50ppm_KNO3_L-to-H_P Parameter: Plant Line Value: 35A19
  misc_feature: MA Experiment 20001608 PARAMETER Experiment Name: Zm_50ppm_KNO3_L-to-H_P Parameter: Timepoint (hr) Value: 48
  misc_feature: MA Experiment 20001608 PARAMETER Experiment Name: Zm_50ppm_KNO3_L-to-H_P Parameter: Tissue Value: Shoots
  misc_feature: MA Experiment 20001608 PARAMETER Experiment Name: Zm_50ppm_KNO3_L-to-H_P Parameter: Treatment Value: 50ppm KNO3 vs. 50ppm KCl
acacacatacactcactcgtacgccgtcgcttcctgcggtacgtactctctgtccgcagcgttcctccagctagtagcagtagcagctagctagctagctagcaactggccatcggggctgctagcagcgtacgtacgtggcgcgatggctcctccagctcatgataggctccgccgcctggtgctgctcctcgtcgttgccaccgccgcggcggctttgcttctggcgccgacgacggcggatgctgcgctgccgcgggtgcagcacacgcccaccaaggccgacgggtcgctcgccatcctcgtcgtcggcgactggggccgccgtggacagttcaaccagaccttggttgcccagcagatgggcgtggtggggcagaagctggacatcgacttcgtcatctccaccggcgacaacatctacgacgacggcatcgccaacactagcgaccccctcttcaaggaatcgttctccaatatctacactgccaacagccttcagaagccttggtacctggtccttggtaaccatgactacacgggaaacgcgctcgcgcagctcgaccctgccattcgcaaagtggatagccggtacaccgccattgccaagtccttcattgtcaactcagggattgcggattttttcctcgtcgacacaacgccgttcattgtccactactggaacaacaccaagttcgattggagaggcgtcgctcctcgagacacctacatcgcgaatctcctcaaggacttgaagtgtgcactgacagcgtccaaggctccctggaagatcgtcgtgggtcaccaccccatcagcagcgcctgcgggcatgggaacaacactgagctggaggagttgcttctcccggtcctcaggacacacggggttgacatgtacttgaatggccatgaccactgccttcagcgcgtcagcagcagagacagtcgtcttcagctactaaccagcggcggcgggtccaaggcatgggctggcaagttcaagcccaccctcgacaaagtggagttcctctacgacggccaggggttcatgtcgatgcgcctgagcaggacggaagcccgcctcgcgttcttcgacgtcgctggcagcgtcctgcactgctggaccatgcatgcccaaaaattaaagacgacgacgacgacgaccgctgctgctgctgggcactaaattaagctttgctgggtacgatgagttgatgatgcaattaattatttggttttgtcgtcttttcgtgcgtgagagggaagcaataataattaattgctgctgcttctgttgttgtgtgcacatgcatgtgagggtgtcaagtatgttcagcctcttgcaagataaaatctctcgtcttctgtgg

SEQ ID NO: 2058 - protein, 346 aa, Zea mays subsp. mays
  peptide (1)..(346): Ceres Seq. ID no. 12377689
  misc_feature (50)..(259): Pfam Name: Calcineurin-like phosphoesterase Pfam Description: Calcineurin-like phosphoesterase
  misc_feature (7)..(327): Homolog of NCBI NO: 22325419 NR Description: putative purple acid phosphatase
  misc_feature (25)..(326): Homolog of NCBI NO: 25752249 NR Description: probable acid phosphatase (EC 3.1.3.2) F10B6.10
  misc_feature (16)..(336): Homolog of NCBI NO: 18401643 NR Description: acid phosphatase type 5
  misc_feature (12)..(326): Homolog of NCBI NO: 22329781 NR Description: hypothetical protein
  misc_feature (25)..(326): Homolog of NCBI NO: 30911094 NR Description: putative purple acid phosphatase [Arabidopsis
  misc_feature (25)..(326): Homolog of NCBI NO: 30683951 NR Description: calcineurin-like phosphoesterase family
  misc_feature (12)..(340): Homolog of NCBI NO: 37530584 NR Description: putative purple acid phosphatase
MAPPAHDRLRRLVLLLVVATAAAALLLAPTTADAALPRVQHTPTKADGSLAILVVGDWGRRGQFNQTLVAQQMGVVGQKLDIDFVISTGDNIYDDGIANTSDPLFKESFSNIYTANSLQKPWYLVLGNHDYTGNALAQLDPAIRKVDSRYTAIAKSFIVNSGIADFFLVDTTPFIVHYWNNTKFDWRGVAPRDTYIANLLKDLKCALTASKAPWKIVVGHHPISSACGHGNNTELEELLLPVLRTHGVDMYLNGHDHCLQRVSSRDSRLQLLTSGGGSKAWAGKFKPTLDKVEFLYDGQGFMSMRLSRTEARLAFFDVAGSVLHCWTMHAQKLKTTTTTTAAAAGH

SEQ ID NO: 2059 - protein, 274 aa, Zea mays subsp. mays
  peptide (1)..(274): Ceres Seq. ID no. 12377690
  misc_feature (1)..(187): Pfam Name: Calcineurin-like phosphoesterase Pfam Description: Calcineurin-like phosphoesterase
  misc_feature (1)..(255): Homolog of NCBI NO: 22325419 NR Description: putative purple acid phosphatase
  misc_feature (1)..(254): Homolog of NCBI NO: 25752249 NR Description: probable acid phosphatase (EC 3.1.3.2) F10B6.10
  misc_feature (1)..(264): Homolog of NCBI NO: 18401643 NR Description: acid phosphatase type 5
  misc_feature (1)..(254): Homolog of NCBI NO: 22329781 NR Description: hypothetical protein
  misc_feature (1)..(254): Homolog of NCBI NO: 30911094 NR Description: putative purple acid phosphatase [Arabidopsis
  misc_feature (1)..(254): Homolog of NCBI NO: 30683951 NR Description: calcineurin-like phosphoesterase family
  misc_feature (1)..(268): Homolog of NCBI NO: 37530584 NR Description: putative purple acid phosphatase
MGVVGQKLDIDFVISTGDNIYDDGIANTSDPLFKESFSNIYTANSLQKPWYLVLGNHDYTGNALAQLDPAIRKVDSRYTAIAKSFIVNSGIADFFLVDTTPFIVHYWNNTKFDWRGVAPRDTYIANLLKDLKCALTASKAPWKIVVGHHPISSACGHGNNTELEELLLPVLRTHGVDMYLNGHDHCLQRVSSRDSRLQLLTSGGGSKAWAGKFKPTLDKVEFLYDGQGFMSMRLSRTEARLAFFDVAGSVLHCWTMHAQKLKTTTTTTAAAAGH

SEQ ID NO: 2060 - protein, 197 aa, Zea mays subsp. mays
  peptide (1)..(197): Ceres Seq. ID no. 12377691
  misc_feature (33)..(197): Pfam Name: Equine herpesvirus glycoprotein gp2 Pfam Description: Equine herpesvirus glycoprotein gp2
  misc_feature (35)..(197): Homolog of NCBI NO: 25011571 NR Description: Unknown [Streptococcus agalactiae NEM316]
  misc_feature (35)..(197): Homolog of NCBI NO: 13592175 NR Description: ppg3 [Leishmania major]
  misc_feature (42)..(197): Homolog of NCBI NO: 9626808 NR Description: membrane glycoprotein [Equine herpesvirus 1]
  misc_feature (42)..(197): Homolog of NCBI NO: 17221116 NR Description: glycoprotein gp2 [Equine herpesvirus 1]
  misc_feature (35)..(197): Homolog of NCBI NO: 17384256 NR Description: mucin 5 [Homo sapiens]
  misc_feature (33)..(197): Homolog of NCBI NO: 17221116 NR Description: glycoprotein gp2 [Equine herpesvirus 1]
  misc_feature (42)..(197): Homolog of NCBI NO: 6322611 NR Description: Delayed Anaerobic Gene; Dan4p [Saccharomyces
  misc_feature (35)..(197): Homolog of NCBI NO: 13592175 NR Description: ppg3 [Leishmania major]
  misc_feature (9)..(197): Homolog of NCBI NO: 28574039 NR Description: Salivary gland secretion 1 CG3047-PA
  misc_feature (35)..(197): Homolog of NCBI NO: 25406831 NR Description: hypothetical protein [imported] - Arabidopsis
MIGSAAWCCSSSLPPPRRLCFWRRRRRMLRCRGCSTRPPRPTGRSPSSSSATGAAVDSSTRPWLPSRWAWWGRSWTSTSSSPPATTSTTTASPTLATPSSRNRSPISTLPTAFRSLGTWSLVTMTTRETRSRSSTLPFAKWIAGTPPLPSPSLSTQGLRIFSSSTQRRSLSTTGTTPSSIGEASLLETPTSRISSRT

SEQ ID NO: 2061 - DNA, 1543 bp, Zea mays subsp. mays
  misc_feature (1)..(1543): Ceres Seq. ID no. 12405173
  misc_feature: MA Experiment ID: 108522 Result: Up-regulated in Transcription
  misc_feature: MA Experiment 108522 PARAMETER Experiment Name: Zm_42deg_Heat_P Parameter: Age (day) Value: 8
  misc_feature: MA Experiment 108522 PARAMETER Experiment Name: Zm_42deg_Heat_P Parameter: Organism Value: Zea mays
  misc_feature: MA Experiment 108522 PARAMETER Experiment Name: Zm_42deg_Heat_P Parameter: Plant Line Value: 35A19
  misc_feature: MA Experiment 108522 PARAMETER Experiment Name: Zm_42deg_Heat_P Parameter: Temperature (deg C) Value: 42 vs. 22
  misc_feature: MA Experiment 108522 PARAMETER Experiment Name: Zm_42deg_Heat_P Parameter: Timepoint (hr) Value: 1
  misc_feature: MA Experiment 108522 PARAMETER Experiment Name: Zm_42deg_Heat_P Parameter: Tissue Value: Aerial
  misc_feature: MA Experiment ID: 108523 Result: Up-regulated in Transcription
  misc_feature: MA Experiment 108523 PARAMETER Experiment Name: Zm_42deg_Heat_P Parameter: Age (day) Value: 8
  misc_feature: MA Experiment 108523 PARAMETER Experiment Name: Zm_42deg_Heat_P Parameter: Organism Value: Zea mays
  misc_feature: MA Experiment 108523 PARAMETER Experiment Name: Zm_42deg_Heat_P Parameter: Plant Line Value: 35A19
  misc_feature: MA Experiment 108523 PARAMETER Experiment Name: Zm_42deg_Heat_P Parameter: Temperature (deg C) Value: 42 vs. 22
  misc_feature: MA Experiment 108523 PARAMETER Experiment Name: Zm_42deg_Heat_P Parameter: Timepoint (hr) Value: 6
  misc_feature: MA Experiment 108523 PARAMETER Experiment Name: Zm_42deg_Heat_P Parameter: Tissue Value: Aerial
  misc_feature: MA Experiment ID: 108527 Result: Up-regulated in Transcription
  misc_feature: MA Experiment 108527 PARAMETER Experiment Name: Zm_5mM_NO_P Parameter: Age (day) Value: 8
  misc_feature: MA Experiment 108527 PARAMETER Experiment Name: Zm_5mM_NO_P Parameter: Organism Value: Zea mays
  misc_feature: MA Experiment 108527 PARAMETER Experiment Name: Zm_5mM_NO_P Parameter: Plant Line Value: 35A19
  misc_feature: MA Experiment 108527 PARAMETER Experiment Name: Zm_5mM_NO_P Parameter: Timepoint (hr) Value: 6
  misc_feature: MA Experiment 108527 PARAMETER Experiment Name: Zm_5mM_NO_P Parameter: Tissue Value: Aerial
  misc_feature: MA Experiment 108527 PARAMETER Experiment Name: Zm_5mM_NO_P Parameter: Treatment Value: 5mM NO vs. No Treatment
  misc_feature: MA Experiment ID: 108543 Result: Down-regulated in Transcription
  misc_feature: MA Experiment ID: 108689 Result: Down-regulated in Transcription
  misc_feature: MA Experiment 108689 PARAMETER Experiment Name: Zm_Drought_Roots_P Parameter: Age (day) Value: 9
  misc_feature: MA Experiment 108689 PARAMETER Experiment Name: Zm_Drought_Roots_P Parameter: Organism Value: Zea mays
  misc_feature: MA Experiment 108689 PARAMETER Experiment Name: Zm_Drought_Roots_P Parameter: Plant Line Value: 35A19
  misc_feature: MA Experiment 108689 PARAMETER Experiment Name: Zm_Drought_Roots_P Parameter: Timepoint (hr) Value: 24
  misc_feature: MA Experiment 108689 PARAMETER Experiment Name: Zm_Drought_Roots_P Parameter: Tissue Value: Roots
  misc_feature: MA Experiment 108689 PARAMETER Experiment Name: Zm_Drought_Roots_P Parameter: Treatment Value: Drought vs. No Drought
acggacgtacagaagggacgccgccggccacacaaaccgcaggttcgggagtgctccggaacccgccgccgcatccgcaccgcacgacgccacggctgacgactgggagccccgttcccctccaccgccacctccccgcgtagaagcagagagggaagcttagcagcgagaagccgagaaccctgtcgatctctcctgaagcaatccgctcatgtcgtgagctgaaccctacagttcgtatcacctcctctcgcagcagctgcagaaagagcaagggggatggccaaggacggaggccccgactggaacggcctgttcaagtggagcatcgcccacggagacggcaccaacccgccgcgtgctctcagtgaagaagacagaaaatggtttatggaggctatgcaagccaacacgatagatgttgtgaagaggatgaaggagatcactcgggtgatgagaactccacaagatgtcttgcagtctcagggtgtgaccccagagaacattgaagatatgttggatgagctacacgagcatgttgaatccattgacatggcaaatgatttacattctattggtggcctggatcccctgttcggttacttgaaaaattcaaatgctggcatccgcgcaaaggcagcagaagttgttagtacagtcgcgcagaataatcccaagagtcagcaacttgtcatggaatccaatggtctcgagccactgttgagaaacttcaaatcagatccaagtacaaatgcacgcacaaaagctttaggagccatatcttctataatacgtcataaccagcctggagtttccgcatttcgcctgggaaatggctatgctggattgaaggatgctcctggttctgatgatgccaaacttcaaaggaaagctctcaatctcatacaatacctgctacacaacaacaaggcagacaggagttttgctacagagcttggtcttccaaagctgatgatgcaccttgcggctagcgatgatcccttggtgcgtgaagctgctctaagcggcctccttgagttgtcacaggaccagacatctggtaatgcgctacctgaccaagacaagctgaaaagagatcctgaacctgaagagccgaatcgaaggggtcagtgcgatggactctgacgatctccatgccgcacgcgaggagcggcagctggtggactcactgtggaaggagtgctacagcgagcctcctctcagggagaagagcctcgtcgtgcttcctggagaggatgctccccaacagccgccaccagacgatacagtgaagatgtttgagccaccgctgggtgccctgggcggctgtaagacctgctgaggaaggagattctgattctggctgtggaaagaaggatccaccattgctgctaaagttttgacggtattcaaataccaattccaccactttggcttggtgttgggtgtggaagaaggctgtaagagcagagctgatggatggatggcttttgtcatatattgtatggcgcagtagcgtttctgataatgtgctctgcatttt

SEQ ID NO: 2062 - protein, 288 aa, Zea mays subsp. mays
  peptide (1)..(288): Ceres Seq. ID no. 12405174
  misc_feature (131)..(172): Pfam Name: Armadillo/beta-catenin-like repeat Pfam Description: Armadillo/beta-catenin-like repeat
  misc_feature (11)..(261): Homolog of NCBI NO: 29436427 NR Description: Similar to RIKEN cDNA 1500019G21 gene [Danio
  misc_feature (4)..(256): Homolog of NCBI NO: 15231095 NR Description: hypothetical protein
  misc_feature (1)..(272): Homolog of NCBI NO: 15241689 NR Description: putative protein; protein id: At5g02150.1
  misc_feature (4)..(282): Homolog of NCBI NO: 26449490 NR Description: unknown protein [Arabidopsis thaliana]
  misc_feature (4)..(282): Homolog of NCBI NO: 15232329 NR Description: putative protein
  misc_feature (1)..(30): Homolog of NCBI NO: 6478927 NR Description: hypothetical protein [Arabidopsis thaliana]
  misc_feature (31)..(272): Homolog of NCBI NO: 6478927 NR Description: hypothetical protein [Arabidopsis thaliana]
  misc_feature (1)..(272): Homolog of NCBI NO: 18398480 NR Description: expressed protein
  misc_feature (1)..(272): Homolog of NCBI NO: 21553998 NR Description: unknown [Arabidopsis thaliana]
  misc_feature (1)..(271): Homolog of NCBI NO: 34897412 NR Description: putative Hsp70 binding protein
MAKDGGPDWNGLFKWSIAHGDGTNPPRALSEEDRKWFMEAMQANTIDVVKRMKEITRVMRTPQDVLQSQGVTPENIEDMLDELHEHVESIDMANDLHSIGGLDPLFGYLKNSNAGIRAKAAEVVSTVAQNNPKSQQLVMESNGLEPLLRNFKSDPSTNARTKALGAISSIIRHNQPGVSAFRLGNGYAGLKDAPGSDDAKLQRKALNLIQYLLHNNKADRSFATELGLPKLMMHLAASDDPLVREAALSGLLELSQDQTSGNALPDQDKLKRDPEPEEPNRRGQCDGL

SEQ ID NO: 2063 - protein, 251 aa, Zea mays subsp. mays
  peptide (1)..(251): Ceres Seq. ID no. 12405175
  misc_feature (94)..(135): Pfam Name: Armadillo/beta-catenin-like repeat Pfam Description: Armadillo/beta-catenin-like repeat
  misc_feature (1)..(224): Homolog of NCBI NO: 12850523 NR Description: unnamed protein product [Mus musculus]
  misc_feature (1)..(224): Homolog of NCBI NO: 29436427 NR Description: Similar to RIKEN cDNA 1500019G21 gene [Danio
  misc_feature (1)..(219): Homolog of NCBI NO: 15231095 NR Description: hypothetical protein
  misc_feature (1)..(235): Homolog of NCBI NO: 15241689 NR Description: putative protein; protein id: At5g02150.1
  misc_feature (1)..(245): Homolog of NCBI NO: 26449490 NR Description: unknown protein [Arabidopsis thaliana]
  misc_feature (1)..(245): Homolog of NCBI NO: 15232329 NR Description: putative protein
  misc_feature (1)..(235): Homolog of NCBI NO: 6478927 NR Description: hypothetical protein [Arabidopsis thaliana]
  misc_feature (1)..(235): Homolog of NCBI NO: 18398480 NR Description: expressed protein
  misc_feature (1)..(235): Homolog of NCBI NO: 21553998 NR Description: unknown [Arabidopsis thaliana]
  misc_feature (1)..(234): Homolog of NCBI NO: 34897412 NR Description: putative Hsp70 binding protein
MEAMQANTIDVVKRMKEITRVMRTPQDVLQSQGVTPENIEDMLDELHEHVESIDMANDLHSIGGLDPLFGYLKNSNAGIRAKAAEVVSTVAQNNPKSQQLVMESNGLEPLLRNFKSDPSTNARTKALGAISSIIRHNQPGVSAFRLGNGYAGLKDAPGSDDAKLQRKALNLIQYLLHNNKADRSFATELGLPKLMMHLAASDDPLVREAALSGLLELSQDQTSGNALPDQDKLKRDPEPEEPNRRGQCDGL

SEQ ID NO: 2064 - protein, 248 aa, Zea mays subsp. mays
  peptide (1)..(248): Ceres Seq. ID no. 12405176
  misc_feature (91)..(132): Pfam Name: Armadillo/beta-catenin-like repeat Pfam Description: Armadillo/beta-catenin-like repeat
  misc_feature (1)..(221): Homolog of NCBI NO: 12850523 NR Description: unnamed protein product [Mus musculus]
  misc_feature (1)..(221): Homolog of NCBI NO: 29436427 NR Description: Similar to RIKEN cDNA 1500019G21 gene [Danio
  misc_feature (1)..(216): Homolog of NCBI NO: 15231095 NR Description: hypothetical protein
  misc_feature (1)..(232): Homolog of NCBI NO: 15241689 NR Description: putative protein; protein id: At5g02150.1
  misc_feature (1)..(242): Homolog of NCBI NO: 26449490 NR Description: unknown protein [Arabidopsis thaliana]
  misc_feature (1)..(242): Homolog of NCBI NO: 15232329 NR Description: putative protein
  misc_feature (1)..(232): Homolog of NCBI NO: 6478927 NR Description: hypothetical protein [Arabidopsis thaliana]
  misc_feature (1)..(232): Homolog of NCBI NO: 18398480 NR Description: expressed protein
  misc_feature (1)..(232): Homolog of NCBI NO: 21553998 NR Description: unknown [Arabidopsis thaliana]
  misc_feature (1)..(231): Homolog of NCBI NO: 34897412 NR Description: putative Hsp70 binding protein
MQANTIDVVKRMKEITRVMRTPQDVLQSQGVTPENIEDMLDELHEHVESIDMANDLHSIGGLDPLFGYLKNSNAGIRAKAAEVVSTVAQNNPKSQQLVMESNGLEPLLRNFKSDPSTNARTKALGAISSIIRHNQPGVSAFRLGNGYAGLKDAPGSDDAKLQRKALNLIQYLLHNNKADRSFATELGLPKLMMHLAASDDPLVREAALSGLLELSQDQTSGNALPDQDKLKRDPEPEEPNRRGQCDGL

SEQ ID NO: 2065 - DNA, 1611 bp, Zea mays subsp. mays
  misc_feature (1)..(1611): Ceres Seq. ID no. 12423958
  misc_feature: MA Experiment ID: 108522 Result: Down-regulated in Transcription
  misc_feature: MA Experiment 108522 PARAMETER Experiment Name: Zm_42deg_Heat_P Parameter: Age (day) Value: 8
  misc_feature: MA Experiment 108522 PARAMETER Experiment Name: Zm_42deg_Heat_P Parameter: Organism Value: Zea mays
  misc_feature: MA Experiment 108522 PARAMETER Experiment Name: Zm_42deg_Heat_P Parameter: Plant Line Value: 35A19
  misc_feature: MA Experiment 108522 PARAMETER Experiment Name: Zm_42deg_Heat_P Parameter: Temperature (deg C) Value: 42 vs. 22
  misc_feature: MA Experiment 108522 PARAMETER Experiment Name: Zm_42deg_Heat_P Parameter: Timepoint (hr) Value: 1
  misc_feature: MA Experiment 108522 PARAMETER Experiment Name: Zm_42deg_Heat_P Parameter: Tissue Value: Aerial
  misc_feature: MA Experiment ID: 108535 Result: Up-regulated in Transcription
  misc_feature: MA Experiment 108535 PARAMETER Experiment Name: Zm_Meristem_P Parameter: Age (day) Value: 8
  misc_feature: MA Experiment 108535 PARAMETER Experiment Name: Zm_Meristem_P Parameter: Organism Value: Zea mays
  misc_feature: MA Experiment 108535 PARAMETER Experiment Name: Zm_Meristem_P Parameter: Plant Line Value: 35A19
  misc_feature: MA Experiment 108535 PARAMETER Experiment Name: Zm_Meristem_P Parameter: Tissue Value: Root Meristem vs. Above Root Meristem
  misc_feature: MA Experiment ID: 20000487 Result: Up-regulated in Transcription
  misc_feature: MA Experiment 20000487 PARAMETER Experiment Name: Zm_50mM_NH4NO3_L_to_H_P Parameter: Organism Value: Zea mays
  misc_feature: MA Experiment 20000487 PARAMETER Experiment Name: Zm_50mM_NH4NO3_L_to_H_P Parameter: Timepoint (hr) Value: 4
  misc_feature: MA Experiment 20000487 PARAMETER Experiment Name: Zm_50mM_NH4NO3_L_to_H_P Parameter: Tissue Value: Leaves
  misc_feature: MA Experiment 20000487 PARAMETER Experiment Name: Zm_50mM_NH4NO3_L_to_H_P Parameter: Treatment Value: 50mM NH4NO3 vs. 100mM Mannitol
gcacgagaccattacctagaacatcctaatcgaaaaaacaaagcccccaaaaccctacggccacctcgccacccccaacgaaaacccagaccacgagatggcccccggtggagagggcaagccaagcacgggcggcggcggcggcggcgtcaagggtgggaggaagcgcaagttccttccccacgggaagccggtgcggaagggggcctacccgctgcgccccggcgtgcagggcttcttcatcacctgcgacggcggccgcgagcaccaggccacccgcgaggcgctctccctcctcgactccttctatgaagacctggtggatgggaaaggatcggatgagaagcctaaaaacattccagacaagccactgaacaaaaagataaattttgaggactctgattcctcagatgatgaggatgaagacaactctggtgaggaagccgacaatgggaatgtgaatgatgtggagaaaggtgaaaccgctccatctgagaagcaacaggaggtgcttgatacctctaataccgcaagcaaggacaatactgctctatctgagaagaaagaggaggtgcttgatacctctgataccgtgagtaaggacaatgaggaacaagcagtcactgctgatgaaccaagagaaaagaagcaacgagtgnaagatcctccagtttttgagcaggccgtgcaaaaagagnntgntgatgaaccaaaggagtccnctgataaaccaaaggagtccagtgaaaaaaatattgacgatttaattgatgaggacctgaaagaaataggggacaggaaaaagaggctctttgcaagcctcgagacaggctgcaatggatgcatattcattcaaatgcataaaagagcaggagaccctggtccagttgagattgtacaaaacatgatgtcatctgctgcattgactcgtaaacatatgtcaagatttattctgcgagttttgcctgttgaggtggcatgctatgcatctgaagaggaaataacaaaggcaattagtccccttattgaaaagtacttcccaaaagaatgctcctcaggtcataagtttgcagtgttatatgaagcaaggtcaaacacaggaattgatagaatgaaaatcataaacgcagcagcgaaatctgtaccacaacctcataaagttgacctgaagaacccagacaagactattgttgtccagattgcaaagaccatatgcatgattggagttgtggaaaggtacaaagagctctcgaagttcaacctaaggcagctgacctcaccggagtcggagaagtaagcctatgagtgacaaaatcttccaggcaaaacgtggaccaacttaaatcagcagcagcgtcaggtggttaggcgctagcgaattaaattaaggccggccgaacctcactgtcttgaaagattcagatgttctaatgtttaatgctttaccaccagtggttagtggttgctggttcatgcttcccaggttagagtcacgatttttttttttttgaggctgtagaaagatctgacgatacttcatgtgtgctttctctctgacgatggttccatacaggggcttaccaaagacgtagaatctatcgttgcagctcc

SEQ ID NO: 2066 - protein, 399 aa, Zea mays subsp. mays
  peptide (1)..(399): Ceres Seq. ID no. 12423959
  misc_feature (287)..(379): Pfam Name: THUMP domain Pfam Description: THUMP domain
  misc_feature (263)..(399): Homolog of NCBI NO: 3287940 NR Description: Very hypothetical protein C25H2.10c in chromosome
  misc_feature (237)..(396): Homolog of NCBI NO: 2988398 NR Description: Unknown gene product [Homo sapiens]
  misc_feature (205)..(396): Homolog of NCBI NO: 34365206 NR Description: hypothetical protein [Homo sapiens]
  misc_feature (205)..(396): Homolog of NCBI NO: 8923247 NR Description: hypothetical protein FLJ20274 [Homo sapiens]
  misc_feature (205)..(396): Homolog of NCBI NO: 12653357 NR Description: hypothetical protein FLJ20274 [Homo sapiens]
  misc_feature (205)..(392): Homolog of NCBI NO: 34859071 NR Description: similar to RIKEN cDNA 6330575P11 [Rattus
  misc_feature (205)..(392): Homolog of NCBI NO: 21704176 NR Description: RIKEN cDNA 6330575P11; similar to hypothetical
  misc_feature (194)..(399): Homolog of NCBI NO: 38174056 NR Description: Unknown (protein for MGC:75804) [Silurana
  misc_feature (210)..(399): Homolog of NCBI NO: 24657540 NR Description: CG15014-PA [Drosophila melanogaster]
  misc_feature (22)..(394): Homolog of NCBI NO: 18416857 NR Description: putative protein; protein id: At5g12410.1
  misc_feature (188)..(188): Xaa is any aa, unknown or other
  misc_feature (201)..(201): Xaa is any aa, unknown or other
  misc_feature (202)..(202): Xaa is any aa, unknown or other
  misc_feature (209)..(209): Xaa is any aa, unknown or other
MAPGGEGKPSTGGGGGGVKGGRKRKFLPHGKPVRKGAYPLRPGVQGFFITCDGGREHQATREALSLLDSFYEDLVDGKGSDEKPKNIPDKPLNKKINFEDSDSSDDEDEDNSGEEADNGNVNDVEKGETAPSEKQQEVLDTSNTASKDNTALSEKKEEVLDTSDTVSKDNEEQAVTADEPREKKQRVXDPPVFEQAVQKEXXDEPKESXDKPKESSEKNIDDLIDEDLKEIGDRKKRLFASLETGCNGCIFIQMHKRAGDPGPVEIVQNMMSSAALTRKHMSRFILRVLPVEVACYASEEEITKAISPLIEKYFPKECSSGHKFAVLYEARSNTGIDRMKIINAAAKSVPQPHKVDLKNPDKTIVVQIAKTICMIGVVERYKELSKFNLRQLTSPESEK

SEQ ID NO: 2067 - DNA, 1418 bp, Zea mays subsp. mays
  misc_feature (1)..(1418): Ceres Seq. ID no. 12410901
  misc_feature: MA Experiment ID: 108546 Result: Down-regulated in Transcription
  misc_feature: MA Experiment 108546 PARAMETER Experiment Name: Zm_Imbibed_Seeds_P Parameter: Age (day) Value: 3 vs. 2
  misc_feature: MA Experiment 108546 PARAMETER Experiment Name: Zm_Imbibed_Seeds_P Parameter: Organism Value: Zea mays
  misc_feature: MA Experiment 108546 PARAMETER Experiment Name: Zm_Imbibed_Seeds_P Parameter: Plant Line Value: 35A19
  misc_feature: MA Experiment 108546 PARAMETER Experiment Name: Zm_Imbibed_Seeds_P Parameter: Tissue Value: Roots vs. Embryo
  misc_feature: MA Experiment ID: 20000535 Result: Up-regulated in Transcription
  misc_feature: MA Experiment 20000535 PARAMETER Experiment Name: Zm_Hybrid_Seed_Dev_P Parameter: DAP Value: 30 vs. 12
  misc_feature: MA Experiment 20000535 PARAMETER Experiment Name: Zm_Hybrid_Seed_Dev_P Parameter: Organism Value: Zea mays
  misc_feature: MA Experiment 20000535 PARAMETER Experiment Name: Zm_Hybrid_Seed_Dev_P Parameter: Plant Line Value: 35A19
  misc_feature: MA Experiment 20000535 PARAMETER Experiment Name: Zm_Hybrid_Seed_Dev_P Parameter: Tissue Value: Embryo vs. Unfert Floret
aggcacacacacttagacttagctatagtagctactactgtagtagatatatatgggtatggctgcaacaaggaggacgagagcaagctcaggtaataatgtcctcctcctgctggccatcggccttgtgttctccgcggcatcgacgacgacaccggctgtagcagctgcggcgttgaacggcagcgacgacgacattggtgctgctgccagggcggcgggcctgtccgtggacttccacgcggcgtcgtgcccggacctggacggcatcgtgcgctccgccgttgaggaggcgcggcggtgggacgcccaggtcacggcgggcctcctccgcatcttcttccacgactgcttcccgcagggctgcgacgcgtcgatcctgctgggcaggaaccagggcggcagcgagcaggacgcaccccagaacacgggcctgcagcaggcggcgctggacctcgtcgagaggatccgcggcagggtgcactcccgctgcggcgcctccgtctcctgcgccgacatcctggcgctcgccaccagccacgccgtcaaccaggccggcggccccttcatccctatggagctgggccgcagcgacagcaggggccccgctccaggatgggccgtcaacaggctcccgccccccaccgatggcgtctccgagctcctcggcaacttcggtaacaggggcctcgatggctccgacgtcgtggtgctctccggcgcgcacaccgtgggcgtggcgcgttgctcctcgttccaggaccgtatcgacaagaagaccggcaaggataacttcgagtgggggctcaccggctactgcaacggagacaaggagaagaagcacgcgctggaccgtacgcccttcaacttcgacaacagctacttcgtggagctgcagaacggcagaggggtgctcacctccgaccaggcgctctacagggacggccgcaccaggtggctcgtcgaccgctgcgcctccagccaggacgaattcttcaagcgcttcgtggaatccatgctcaagctcagcaggctcaggggggccgatccgggcccagtgcgcaacaactgcttcgtccgcgccagcttcggcgctagtagcgctaccaaagacgaccttgtcattgacaccaccgccggagacggagacggagacgaggaccttattcttgcagcagctgcatgatcgctgctgctacagtgtacttacatccgatccggccgctatcatatcgtcgtcgtcgtcgaataattaagcagatcaacatgtttgtttatttgcttattagtttctattccgcagtccgcactagctagctagctgctgtagtacctctcgtaatacaatgcatgcatgtaccttgcgtgttttagcgtggcacgcctccttaattcactcggtatttctttgatcatgc

SEQ ID NO: 2068 - protein, 377 aa, Zea mays subsp. mays
  peptide (1)..(377): Ceres Seq. ID no. 12410902
  misc_feature (74)..(310): Pfam Name: Peroxidase Pfam Description: Peroxidase
  misc_feature (56)..(355): Homolog of NCBI NO: 38345506 NR Description: OSJNBa0039K24.4 [Oryza sativa (japonica
  misc_feature (55)..(343): Homolog of NCBI NO: 2624498 NR Description: Crystal Structure Of Barley Grain Peroxidase 1
  misc_feature (29)..(363): Homolog of NCBI NO: 82410 NR Description: peroxidase (EC 1.11.1.7) BP1 precursor - barley
  misc_feature (37)..(348): Homolog of NCBI NO: 38345507 NR Description: OSJNBa0039K24.8 [Oryza sativa (japonica
  misc_feature (37)..(348): Homolog of NCBI NO: 5777627 NR Description: CAA303715.1 protein [Oryza sativa]
  misc_feature (36)..(364): Homolog of NCBI NO: 7433075 NR Description: probable peroxidase (EC 1.11.1.-) 1 precursor,
  misc_feature (52)..(355): Homolog of NCBI NO: 5777624 NR Description: CAA303712.1 protein [Oryza sativa]
  misc_feature (49)..(355): Homolog of NCBI NO: 38345511 NR Description: OSJNBa0039K24.14 [Oryza sativa (japonica
  misc_feature (53)..(341): Homolog of NCBI NO: 38345508 NR Description: OSJNBa0039K24.10 [Oryza sativa (japonica
  misc_feature (17)..(355): Homolog of NCBI NO: 5777628 NR Description: CAA303716.1 protein [Oryza sativa]
MGMAATRRTRASSGNNVLLLLAIGLVFSAASTTTPAVAAAALNGSDDDIGAAARAAGLSVDFHAASCPDLDGIVRSAVEEARRWDAQVTAGLLRIFFHDCFPQGCDASILLGRNQGGSEQDAPQNTGLQQAALDLVERIRGRVHSRCGASVSCADILALATSHAVNQAGGPFIPMELGRSDSRGPAPGWAVNRLPPPTDGVSELLGNFGNRGLDGSDVVVLSGAHTVGVARCSSFQDRIDKKTGKDNFEWGLTGYCNGDKEKKHALDRTPFNFDNSYFVELQNGRGVLTSDQALYRDGRTRWLVDRCASSQDEFFKRFVESMLKLSRLRGADPGPVRNNCFVRASFGASSATKDDLVIDTTAGDGDGDEDLILAAAA

SEQ ID NO: 2069 - protein, 375 aa, Zea mays subsp. mays
  peptide (1)..(375): Ceres Seq. ID no. 12410903
  misc_feature (72)..(308): Pfam Name: Peroxidase Pfam Description: Peroxidase
  misc_feature (54)..(353): Homolog of NCBI NO: 38345506 NR Description: OSJNBa0039K24.4 [Oryza sativa (japonica
  misc_feature (53)..(341): Homolog of NCBI NO: 2624498 NR Description: Crystal Structure Of Barley Grain Peroxidase 1
  misc_feature (27)..(361): Homolog of NCBI NO: 82410 NR Description: peroxidase (EC 1.11.1.7) BP1 precursor - barley
  misc_feature (35)..(346): Homolog of NCBI NO: 38345507 NR Description: OSJNBa0039K24.8 [Oryza sativa (japonica
  misc_feature (35)..(346): Homolog of NCBI NO: 5777627 NR Description: CAA303715.1 protein [Oryza sativa]
  misc_feature (34)..(362): Homolog of NCBI NO: 7433075 NR Description: probable peroxidase (EC 1.11.1.-) 1 precursor,
  misc_feature (50)..(353): Homolog of NCBI NO: 5777624 NR Description: CAA303712.1 protein [Oryza sativa]
  misc_feature (47)..(353): Homolog of NCBI NO: 38345511 NR Description: OSJNBa0039K24.14 [Oryza sativa (japonica
  misc_feature (51)..(339): Homolog of NCBI NO: 38345508 NR Description: OSJNBa0039K24.10 [Oryza sativa (japonica
  misc_feature (15)..(353): Homolog of NCBI NO: 5777628 NR Description: CAA303716.1 protein [Oryza sativa]
MAATRRTRASSGNNVLLLLAIGLVFSAASTTTPAVAAAALNGSDDDIGAAARAAGLSVDFHAASCPDLDGIVRSAVEEARRWDAQVTAGLLRIFFHDCFPQGCDASILLGRNQGGSEQDAPQNTGLQQAALDLVERIRGRVHSRCGASVSCADILALATSHAVNQAGGPFIPMELGRSDSRGPAPGWAVNRLPPPTDGVSELLGNFGNRGLDGSDVVVLSGAHTVGVARCSSFQDRIDKKTGKDNFEWGLTGYCNGDKEKKHALDRTPFNFDNSYFVELQNGRGVLTSDQALYRDGRTRWLVDRCASSQDEFFKRFVESMLKLSRLRGADPGPVRNNCFVRASFGASSATKDDLVIDTTAGDGDGDEDLILAAAA

SEQ ID NO: 2070 - protein, 203 aa, Zea mays subsp. mays
  peptide (1)..(203): Ceres Seq. ID no. 12410904
  misc_feature (1)..(136): Pfam Name: Peroxidase Pfam Description: Peroxidase
  misc_feature (1)..(181): Homolog of NCBI NO: 38345506 NR Description: OSJNBa0039K24.4 [Oryza sativa (japonica
  misc_feature (1)..(169): Homolog of NCBI NO: 2624498 NR Description: Crystal Structure Of Barley Grain Peroxidase 1
  misc_feature (1)..(189): Homolog of NCBI NO: 82410 NR Description: peroxidase (EC 1.11.1.7) BP1 precursor - barley
  misc_feature (1)..(174): Homolog of NCBI NO: 38345507 NR Description: OSJNBa0039K24.8 [Oryza sativa (japonica
  misc_feature (1)..(174): Homolog of NCBI NO: 5777627 NR Description: CAA303715.1 protein [Oryza sativa]
  misc_feature (1)..(190): Homolog of NCBI NO: 7433075 NR Description: probable peroxidase (EC 1.11.1.-) 1 precursor,
  misc_feature (1)..(181): Homolog of NCBI NO: 5777624 NR Description: CAA303712.1 protein [Oryza sativa]
  misc_feature (1)..(181): Homolog of NCBI NO: 38345511 NR Description: OSJNBa0039K24.14 [Oryza sativa (japonica
  misc_feature (1)..(167): Homolog of NCBI NO: 38345508 NR Description: OSJNBa0039K24.10 [Oryza sativa (japonica
  misc_feature (1)..(181): Homolog of NCBI NO: 5777628 NR Description: CAA303716.1 protein [Oryza sativa]
MELGRSDSRGPAPGWAVNRLPPPTDGVSELLGNFGNRGLDGSDVVVLSGAHTVGVARCSSFQDRIDKKTGKDNFEWGLTGYCNGDKEKKHALDRTPFNFDNSYFVELQNGRGVLTSDQALYRDGRTRWLVDRCASSQDEFFKRFVESMLKLSRLRGADPGPVRNNCFVRASFGASSATKDDLVIDTTAGDGDGDEDLILAAAA

SEQ ID NO: 2071 - DNA, 1056 bp, Zea mays subsp. mays
  misc_feature (1)..(1056): Ceres Seq. ID no. 13493663
  misc_feature: MA Experiment ID: 20000477 Result: Down-regulated in Transcription
  misc_feature: MA Experiment 20000477 PARAMETER Experiment Name: Zm_5mM_SA_P Parameter: Age (day) Value: 10
  misc_feature: MA Experiment 20000477 PARAMETER Experiment Name: Zm_5mM_SA_P Parameter: Organism Value: Zea mays
  misc_feature: MA Experiment 20000477 PARAMETER Experiment Name: Zm_5mM_SA_P Parameter: Plant Line Value: 35A19
  misc_feature: MA Experiment 20000477 PARAMETER Experiment Name: Zm_5mM_SA_P Parameter: Timepoint (hr) Value: 48
  misc_feature: MA Experiment 20000477 PARAMETER Experiment Name: Zm_5mM_SA_P Parameter: Tissue Value: Aerial
  misc_feature: MA Experiment 20000477 PARAMETER Experiment Name: Zm_5mM_SA_P Parameter: Treatment Value: 5mM SA vs. No Treatment
  misc_feature: MA Experiment ID: 20000492 Result: Up-regulated in Transcription
  misc_feature: MA Experiment 20000492 PARAMETER Experiment Name: Zm_Hybrid_Seed_Dev_P Parameter: DAP Value: 12
  misc_feature: MA Experiment 20000492 PARAMETER Experiment Name: Zm_Hybrid_Seed_Dev_P Parameter: Organism Value: Zea mays
  misc_feature: MA Experiment 20000492 PARAMETER Experiment Name: Zm_Hybrid_Seed_Dev_P Parameter: Plant Line Value: 35A19
  misc_feature: MA Experiment 20000492 PARAMETER Experiment Name: Zm_Hybrid_Seed_Dev_P Parameter: Tissue Value: Fert Kernel vs. Unfert Floret
  misc_feature: MA Experiment ID: 20001610 Result: Down-regulated in Transcription
  misc_feature: MA Experiment 20001610 PARAMETER Experiment Name: Zm_50ppm_KNO3_L-to-H_P Parameter: Age (day) Value: 19
  misc_feature: MA Experiment 20001610 PARAMETER Experiment Name: Zm_50ppm_KNO3_L-to-H_P Parameter: Organism Value: Zea mays
  misc_feature: MA Experiment 20001610 PARAMETER Experiment Name: Zm_50ppm_KNO3_L-to-H_P Parameter: Plant Line Value: 35A19
  misc_feature: MA Experiment 20001610 PARAMETER Experiment Name: Zm_50ppm_KNO3_L-to-H_P Parameter: Timepoint (hr) Value: 2
  misc_feature: MA Experiment 20001610 PARAMETER Experiment Name: Zm_50ppm_KNO3_L-to-H_P Parameter: Tissue Value: Roots
  misc_feature: MA Experiment 20001610 PARAMETER Experiment Name: Zm_50ppm_KNO3_L-to-H_P Parameter: Treatment Value: 50ppm KNO3 vs. 50ppm KCl
ctcttattctcattcgattacacacacacacggagagatcaaattgatacactgcgatctcgatcaaacaaatcaaaaaaaaaaaaaaatcttgcgagacattactgaccgatgaagttcggcaagcgcctcaagaagcagatcgaggagagcctgccggagtggcggagccagttcctcaactacaaggagctgaagcggcgcgtgaatgccgtgtcctcccgcgggtcggcggcggatccgtcgtcgtccagcgccgcggaggccgacttcctgacgctcctggacgccgagatcgacaagttcaacgccttcttcctggagcgggaggaggagttcgtgatccggcagagggagctccaggagcgcatcgggcgtgcgggcgggcccgaggccacgctggcgcgcgtccggcgcgaggtggtggacttgcacggcgagatggtgctgctgctcaactacagcagcgtcaactacacgggcctcgccaagatcctcaagaagttcgacaagcgcaccggcggcgtgctccgcctccccgtcatcgcgcgggtgctgcggcagcccttcttcaccaccgacctcatctccgagctggtcagggactgcgaggccgcgatggaggccgtcttcccgcccgccgccagcagggacctccacgggcgccaggcgctggccgtcgccgggcagggcatcttccgcaacaccgtcgccgctctgctcaccatgcaggaggtgcgcagcgggagctccaccgtcggccatttctcgctgccgcccatgcagccgctgccggagtcggactggctcgtccagtccgttgacagcacgccgacggcgtcgcccctcatccccacccagtgactgacgacaccatggtccacttccagttccatggcactacagtgctacaccacagcggcgtattatatagtatgcaatatatataatctacatactgtagtagtggtgctcggtatgcggctgatgtgtacagtagtagtatttttttctctccttttgttgatgagacttgagaggtgtcctttttgctct

SEQ ID NO: 2072 - protein, 250 aa, Zea mays subsp. mays
  peptide (1)..(250): Ceres Seq. ID no. 13493664
  misc_feature (1)..(149): Pfam Name: SPX domain Pfam Description: SPX domain
  misc_feature (33)..(178): Homolog of NCBI NO: 11358467 NR Description: ids-4 protein-like - Arabidopsis thaliana
  misc_feature (199)..(247): Homolog of NCBI NO: 16506648 NR Description: IDS-4-like protein [Castanea sativa]
  misc_feature (53)..(174): Homolog of NCBI NO: 16506648 NR Description: IDS-4-like protein [Castanea sativa]
  misc_feature (1)..(225): Homolog of NCBI NO: 15241275 NR Description: ids4-related protein [Arabidopsis thaliana]
  misc_feature (1)..(225): Homolog of NCBI NO: 21592813 NR Description: ids4-like protein [Arabidopsis thaliana]
  misc_feature (197)..(232): Homolog of NCBI NO: 15225770 NR Description: expressed protein [Arabidopsis thaliana]
  misc_feature (1)..(182): Homolog of NCBI NO: 15225770 NR Description: expressed protein [Arabidopsis thaliana]
  misc_feature (1)..(233): Homolog of NCBI NO: 23237928 NR Description: ids4-like protein [Oryza sativa (japonica
  misc_feature (1)..(245): Homolog of NCBI NO: 15225414 NR Description: hypothetical protein [Arabidopsis thaliana]
  misc_feature (1)..(241): Homolog of NCBI NO: 37533962 NR Description: hypothetical protein [Oryza sativa (japonica
MKFGKRLKKQIEESLPEWRSQFLNYKELKRRVNAVSSRGSAADPSSSSAAEADFLTLLDAEIDKFNAFFLEREEEFVIRQRELQERIGRAGGPEATLARVRREVVDLHGEMVLLLNYSSVNYTGLAKILKKFDKRTGGVLRLPVIARVLRQPFFTTDLISELVRDCEAAMEAVFPPAASRDLHGRQALAVAGQGIFRNTVAALLTMQEVRSGSSTVGHFSLPPMQPLPESDWLVQSVDSTPTASPLIPTQ

SEQ ID NO: 2073 - protein, 140 aa, Zea mays subsp. mays
  peptide (1)..(140): Ceres Seq. ID no. 13493665
  misc_feature (1)..(68): Homolog of NCBI NO: 11358467 NR Description: ids-4 protein-like - Arabidopsis thaliana
  misc_feature (89)..(137): Homolog of NCBI NO: 16506648 NR Description: IDS-4-like protein [Castanea sativa]
  misc_feature (1)..(64): Homolog of NCBI NO: 16506648 NR Description: IDS-4-like protein [Castanea sativa]
  misc_feature (1)..(115): Homolog of NCBI NO: 15241275 NR Description: ids4-related protein [Arabidopsis thaliana]
  misc_feature (1)..(115): Homolog of NCBI NO: 21592813 NR Description: ids4-like protein [Arabidopsis thaliana]
  misc_feature (87)..(122): Homolog of NCBI NO: 15225770 NR Description: expressed protein [Arabidopsis thaliana]
  misc_feature (1)..(72): Homolog of NCBI NO: 15225770 NR Description: expressed protein [Arabidopsis thaliana]
  misc_feature (1)..(123): Homolog of NCBI NO: 23237928 NR Description: ids4-like protein [Oryza sativa (japonica
  misc_feature (1)..(135): Homolog of NCBI NO: 15225414 NR Description: hypothetical protein [Arabidopsis thaliana]
  misc_feature (1)..(131): Homolog of NCBI NO: 37533962 NR Description: hypothetical protein [Oryza sativa (japonica
MVLLLNYSSVNYTGLAKILKKFDKRTGGVLRLPVIARVLRQPFFTTDLISELVRDCEAAMEAVFPPAASRDLHGRQALAVAGQGIFRNTVAALLTMQEVRSGSSTVGHFSLPPMQPLPESDWLVQSVDSTPTASPLIPTQ

SEQ ID NO: 2074 - DNA, 1589 bp, Zea mays subsp. mays
  misc_feature (1)..(1589): Ceres Seq. ID no. 12373920
  misc_feature: MA Experiment ID: 108515 Result: Up-regulated in Transcription
  misc_feature: MA Experiment 108515 PARAMETER Experiment Name: Zm_2mM_SA_P Parameter: Age (day) Value: 8
  misc_feature: MA Experiment 108515 PARAMETER Experiment Name: Zm_2mM_SA_P Parameter: Organism Value: Zea mays
  misc_feature: MA Experiment 108515 PARAMETER Experiment Name: Zm_2mM_SA_P Parameter: Plant Line Value: 35A19
  misc_feature: MA Experiment 108515 PARAMETER Experiment Name: Zm_2mM_SA_P Parameter: Timepoint (hr) Value: 12
  misc_feature: MA Experiment 108515 PARAMETER Experiment Name: Zm_2mM_SA_P Parameter: Tissue Value: Aerial
  misc_feature: MA Experiment 108515 PARAMETER Experiment Name: Zm_2mM_SA_P Parameter: Treatment Value: 2mM SA vs. No Treatment
  misc_feature: MA Experiment ID: 108527 Result: Up-regulated in Transcription
  misc_feature: MA Experiment 108527 PARAMETER Experiment Name: Zm_5mM_NO_P Parameter: Age (day) Value: 8
  misc_feature: MA Experiment 108527 PARAMETER Experiment Name: Zm_5mM_NO_P Parameter: Organism Value: Zea mays
  misc_feature: MA Experiment 108527 PARAMETER Experiment Name: Zm_5mM_NO_P Parameter: Plant Line Value: 35A19
  misc_feature: MA Experiment 108527 PARAMETER Experiment Name: Zm_5mM_NO_P Parameter: Timepoint (hr) Value: 6
  misc_feature: MA Experiment 108527 PARAMETER Experiment Name: Zm_5mM_NO_P Parameter: Tissue Value: Aerial
  misc_feature: MA Experiment 108527 PARAMETER Experiment Name: Zm_5mM_NO_P Parameter: Treatment Value: 5mM NO vs. No Treatment
  misc_feature: MA Experiment ID: 108528 Result: Down-regulated in Transcription
  misc_feature: MA Experiment 108528 PARAMETER Experiment Name: Zm_Imbibed_Seeds_P Parameter: Age (day) Value: 5 vs. 2
  misc_feature: MA Experiment 108528 PARAMETER Experiment Name: Zm_Imbibed_Seeds_P Parameter: Organism Value: Zea mays
  misc_feature: MA Experiment 108528 PARAMETER Experiment Name: Zm_Imbibed_Seeds_P Parameter: Plant Line Value: 35A19
  misc_feature: MA Experiment 108528 PARAMETER Experiment Name: Zm_Imbibed_Seeds_P Parameter: Tissue Value: Aerial vs. Embryo
  misc_feature: MA Experiment ID: 108529 Result: Up-regulated in Transcription
  misc_feature: MA Experiment 108529 PARAMETER Experiment Name: Zm_Imbibed_Seeds_P Parameter: Age (day) Value: 5 vs. 2
  misc_feature: MA Experiment 108529 PARAMETER Experiment Name: Zm_Imbibed_Seeds_P Parameter: Organism Value: Zea mays
  misc_feature: MA Experiment 108529 PARAMETER Experiment Name: Zm_Imbibed_Seeds_P Parameter: Plant Line Value: 35A19
  misc_feature: MA Experiment 108529 PARAMETER Experiment Name: Zm_Imbibed_Seeds_P Parameter: Tissue Value: Roots vs. Embryo
  misc_feature: MA Experiment ID: 108530 Result: Down-regulated in Transcription
  misc_feature: MA Experiment 108530 PARAMETER Experiment Name: Zm_Imbibed_Seeds_P Parameter: Age (day) Value: 6 vs. 2
  misc_feature: MA Experiment 108530 PARAMETER Experiment Name: Zm_Imbibed_Seeds_P Parameter: Organism Value: Zea mays
  misc_feature: MA Experiment 108530 PARAMETER Experiment Name: Zm_Imbibed_Seeds_P Parameter: Plant Line Value: 35A19
  misc_feature: MA Experiment 108530 PARAMETER Experiment Name: Zm_Imbibed_Seeds_P Parameter: Tissue Value: Aerial vs. Embryo
  misc_feature: MA Experiment ID: 108543 Result: Up-regulated in Transcription
  misc_feature: MA Experiment ID: 108547 Result: Down-regulated in Transcription
  misc_feature: MA Experiment 108547 PARAMETER Experiment Name: Zm_Imbibed_Seeds_P Parameter: Age (day) Value: 4 vs. 2
  misc_feature: MA Experiment 108547 PARAMETER Experiment Name: Zm_Imbibed_Seeds_P Parameter: Organism Value: Zea mays
  misc_feature: MA Experiment 108547 PARAMETER Experiment Name: Zm_Imbibed_Seeds_P Parameter: Plant Line Value: 35A19
  misc_feature: MA Experiment 108547 PARAMETER Experiment Name: Zm_Imbibed_Seeds_P Parameter: Tissue Value: Aerial vs. Embryo
  misc_feature: MA Experiment ID: 108559 Result: Up-regulated in Transcription
  misc_feature: MA Experiment 108559 PARAMETER Experiment Name: Zm_5mM_NO_P Parameter: Age (day) Value: 8
  misc_feature: MA Experiment 108559 PARAMETER Experiment Name: Zm_5mM_NO_P Parameter: Organism Value: Zea mays
  misc_feature: MA Experiment 108559 PARAMETER Experiment Name: Zm_5mM_NO_P Parameter: Plant Line Value: 35A19
  misc_feature: MA Experiment 108559 PARAMETER Experiment Name: Zm_5mM_NO_P Parameter: Timepoint (hr) Value: 12
  misc_feature: MA Experiment 108559 PARAMETER Experiment Name: Zm_5mM_NO_P Parameter: Tissue Value: Aerial
  misc_feature: MA Experiment 108559 PARAMETER Experiment Name: Zm_5mM_NO_P Parameter: Treatment Value: 5mM NO vs. No Treatment
  misc_feature: MA Experiment ID: 20000478 Result: Up-regulated in Transcription
  misc_feature: MA Experiment 20000478 PARAMETER Experiment Name: Zm_5mM_SA_P Parameter: Age (day) Value: 11
  misc_feature: MA Experiment 20000478 PARAMETER Experiment Name: Zm_5mM_SA_P Parameter: Organism Value: Zea mays
  misc_feature: MA Experiment 20000478 PARAMETER Experiment Name: Zm_5mM_SA_P Parameter: Plant Line Value: 35A19
  misc_feature: MA Experiment 20000478 PARAMETER Experiment Name: Zm_5mM_SA_P Parameter: Timepoint (hr) Value: 72
  misc_feature: MA Experiment 20000478 PARAMETER Experiment Name: Zm_5mM_SA_P Parameter: Tissue Value: Aerial
  misc_feature: MA Experiment 20000478 PARAMETER Experiment Name: Zm_5mM_SA_P Parameter: Treatment Value: 5mM SA vs. No Treatment
  misc_feature: MA Experiment ID: 20000534 Result: Up-regulated in Transcription
  misc_feature: MA Experiment 20000534 PARAMETER Experiment Name: Zm_Hybrid_Pollen_P Parameter: Age (day) Value: 8
  misc_feature: MA Experiment 20000534 PARAMETER Experiment Name: Zm_Hybrid_Pollen_P Parameter: Organism Value: Zea mays
  misc_feature: MA Experiment 20000534 PARAMETER Experiment Name: Zm_Hybrid_Pollen_P Parameter: Plant Line Value: 35A19
  misc_feature: MA Experiment 20000534 PARAMETER Experiment Name: Zm_Hybrid_Pollen_P Parameter: Tissue Value: Pollen vs. Aerial
  misc_feature: MA Experiment ID: 20000535 Result: Down-regulated in Transcription
  misc_feature: MA Experiment 20000535 PARAMETER Experiment Name: Zm_Hybrid_Seed_Dev_P Parameter: DAP Value: 30 vs. 12
  misc_feature: MA Experiment 20000535 PARAMETER Experiment Name: Zm_Hybrid_Seed_Dev_P Parameter: Organism Value: Zea mays
  misc_feature: MA Experiment 20000535 PARAMETER Experiment Name: Zm_Hybrid_Seed_Dev_P Parameter: Plant Line Value: 35A19
  misc_feature: MA Experiment 20000535 PARAMETER Experiment Name: Zm_Hybrid_Seed_Dev_P Parameter: Tissue Value: Embryo vs. Unfert Floret
  misc_feature: MA Experiment ID: 20000626 Result: Up-regulated in Transcription
  misc_feature: MA Experiment 20000626 PARAMETER Experiment Name: Zm_Herbicide-Treatments_P Parameter: Timepoint (hr) Value: 12
  misc_feature: MA Experiment 20000626 PARAMETER Experiment Name: Zm_Herbicide-Treatments_P Parameter: Tissue Value: Aerial
  misc_feature: MA Experiment 20000626 PARAMETER Experiment Name: Zm_Herbicide-Treatments_P Parameter: Treatment Value: Roundup vs. No Treatment
  misc_feature: MA Experiment ID: 20001608 Result: Down-regulated in Transcription
  misc_feature: MA Experiment 20001608 PARAMETER Experiment Name: Zm_50ppm_KNO3_L-to-H_P Parameter: Age (day) Value: 21
  misc_feature: MA Experiment 20001608 PARAMETER Experiment Name: Zm_50ppm_KNO3_L-to-H_P Parameter: Organism Value: Zea mays
  misc_feature: MA Experiment 20001608 PARAMETER Experiment Name: Zm_50ppm_KNO3_L-to-H_P Parameter: Plant Line Value: 35A19
  misc_feature: MA Experiment 20001608 PARAMETER Experiment Name: Zm_50ppm_KNO3_L-to-H_P Parameter: Timepoint (hr) Value: 48
  misc_feature: MA Experiment 20001608 PARAMETER Experiment Name: Zm_50ppm_KNO3_L-to-H_P Parameter: Tissue Value: Shoots
  misc_feature: MA Experiment 20001608 PARAMETER Experiment Name: Zm_50ppm_KNO3_L-to-H_P Parameter: Treatment Value: 50ppm KNO3 vs. 50ppm KCl
gcacgagaccattacctagaacatcctaatcgaaaaaatccaattcacaaacacacacgggcaatcaattagcagaacccgcgccaccccccttcctcggagtcggagcgagtcgaggaacggctcgtctgcctctcccgttctccttcctctcctccccagaagatccgatccatcatcgaggactcgccgggaagaatcaaggatatatagataatatacaaacaaaggttcctccagagcccagaggagggaagtcaccggccgtcggcggggaggagatgtcggacggcgcgggctcccggacgggcgtcgctggcgcgctgggcctctcggtcacctcgtcggtggccatcgtcatctgcaacaagtacctcatcagcactctaggcttcttcttcggtcacgacgacgctgacgagctggcacctcatggtgaccttcttcacgctgtacgttcgcgcagcggctgcgcttcttcgagccaaagccgatcgacgcgcgcaccgtcatctccttcggcctgctcaacggcatctccattggcctcctcaacctctgcctcgggttcaactctgttggcttctaccagatgaccaagctggccatcatacccttcaccatagtcttggaaaccctctttctgagcaagaagttcagagcatcaaggcctccctcatggttctgctgctgggagtcgggatcgcgtcggtcacggatctccagctcaacctcctcggctcgatcatcgccgtgctcaccatcgctgcgacatgcgtcgggcagattctgaccaaccaaatccagaggaggctgaaggtttcgtcgacgcagctgctgtaccagtcgtcgccgtaccagtccgcggtgctgctcgtcaccgggcctttcgtggacaagctcctcaccaagcgtgacgtcttcgcgttcagctacaccacccaagtcgtggtgttcatcctgctgtcgtgctcgatcgcggtgtgcgtaaacttcagcacgttcctggtgatcggcacgacgtcgcccgtgacgtaccaggtgctgggccacctcaagacgtgtttggtgctctccttcggctacatcatcctcaaagaccccttcagcgcgcgcaacgtggtgggcatcctcatcgccatcttcggcatgggcctctactcctactactccgtcgtcgagagcaggaagaagaccgaggacgctagctcgctgccggtcgccgcgcagatgagcgagaaggactcggcgccactcctcggcgccaagagctcgccgcggacagagaacaaggccgaggaaaccttcgactacatgccgaggacggccaagagcgcgttcaccggccggtgagcgcgtagcttgtaaggagtacgtatctttctagagttgtgggtagacgacgagcaacaaggcgggaatgtgttagtgaaagatgtaacggcggcaagtgacattccaattatcatttttgcgatttctcctctagggtggtctgcgtggtcatggtttaccagagcataaacagcagaatgtgtggtctactggtcttgaccgagcttgaaatagtagattggattggtgataat

SEQ ID NO: 2075 - protein, 306 aa, Zea mays subsp. mays
  peptide (1)..(306): Ceres Seq. ID no. 12373921
  misc_feature (76)..(286): Homolog of NCBI NO: 13699188 NR Description: putative glucose-6-phosphate/phosphate-tranlocat
  misc_feature (76)..(280): Homolog of NCBI NO: 22329373 NR Description: unknown protein
  misc_feature (76)..(280): Homolog of NCBI NO: 27311731 NR Description: putative integral membrane protein [Arabidopsis
  misc_feature (70)..(287): Homolog of NCBI NO: 30683853 NR Description: transporter-related [Arabidopsis thaliana]
  misc_feature (1)..(19): Homolog of NCBI NO: 34896140 NR Description: P0701D05.25 [Oryza sativa (japonica
  misc_feature (76)..(286): Homolog of NCBI NO: 34896140 NR Description: P0701D05.25 [Oryza sativa (japonica
  misc_feature (1)..(19): Homolog of NCBI NO: 13384378 NR Description: putative phosphate translocator
  misc_feature (1)..(19): Homolog of NCBI NO: 37535412 NR Description: putative
  misc_feature (70)..(304): Homolog of NCBI NO: 37535412 NR Description: putative
  misc_feature (70)..(304): Homolog of NCBI NO: 13384378 NR Description: putative phosphate translocator
MVTFFTLYVRAAAALLRAKADRRAHRHLLRPAQRHLHWPPQPLPRVQLCWLLPDDQAGHHTLHHSLGNPLSEQEVQSIKASLMVLLLGVGIASVTDLQLNLLGSIIAVLTIAATCVGQILTNQIQRRLKVSSTQLLYQSSPYQSAVLLVTGPFVDKLLTKRDVFAFSYTTQVVVFILLSCSIAVCVNFSTFLVIGTTSPVTYQVLGHLKTCLVLSFGYIILKDPFSARNVVGILIAIFGMGLYSYYSVVESRKKTEDASSLPVAAQMSEKDSAPLLGAKSSPRTENKAEETFDYMPRTAKSAFTGR

SEQ ID NO: 2076 - protein, 224 aa, Zea mays subsp. mays
  peptide (1)..(224): Ceres Seq. ID no. 12373922
  misc_feature (1)..(174): Homolog of NCBI NO: 18394949 NR Description: expressed protein
  misc_feature (1)..(194): Homolog of NCBI NO: 18411172 NR Description: expressed protein
  misc_feature (1)..(198): Homolog of NCBI NO: 25406945 NR Description: hypothetical protein [imported] - Arabidopsis
  misc_feature (1)..(204): Homolog of NCBI NO: 13699188 NR Description: putative glucose-6-phosphate/phosphate-tranlocat
  misc_feature (1)..(198): Homolog of NCBI NO: 22329373 NR Description: unknown protein
  misc_feature (1)..(198): Homolog of NCBI NO: 27311731 NR Description: putative integral membrane protein [Arabidopsis
  misc_feature (1)..(205): Homolog of NCBI NO: 30683853 NR Description: transporter-related [Arabidopsis thaliana]
  misc_feature (1)..(204): Homolog of NCBI NO: 34896140 NR Description: P0701D05.25 [Oryza sativa (japonica
  misc_feature (1)..(222): Homolog of NCBI NO: 37535412 NR Description: putative
  misc_feature (1)..(222): Homolog of NCBI NO: 13384378 NR Description: putative phosphate translocator
MVLLLGVGIASVTDLQLNLLGSIIAVLTIAATCVGQILTNQIQRRLKVSSTQLLYQSSPYQSAVLLVTGPFVDKLLTKRDVFAFSYTTQVVVFILLSCSIAVCVNFSTFLVIGTTSPVTYQVLGHLKTCLVLSFGYIILKDPFSARNVVGILIAIFGMGLYSYYSVVESRKKTEDASSLPVAAQMSEKDSAPLLGAKSSPRTENKAEETFDYMPRTAKSAFTGR

SEQ ID NO: 2077 - DNA, 1732 bp, Zea mays subsp. mays
  misc_feature (1)..(1732): Ceres Seq. ID no. 12341485
  misc_feature: MA Experiment ID: 108523 Result: Up-regulated in Transcription
  misc_feature: MA Experiment 108523 PARAMETER Experiment Name: Zm_42deg_Heat_P Parameter: Age (day) Value: 8
  misc_feature: MA Experiment 108523 PARAMETER Experiment Name: Zm_42deg_Heat_P Parameter: Organism Value: Zea mays
  misc_feature: MA Experiment 108523 PARAMETER Experiment Name: Zm_42deg_Heat_P Parameter: Plant Line Value: 35A19
  misc_feature: MA Experiment 108523 PARAMETER Experiment Name: Zm_42deg_Heat_P Parameter: Temperature (deg C) Value: 42 vs. 22
  misc_feature: MA Experiment 108523 PARAMETER Experiment Name: Zm_42deg_Heat_P Parameter: Timepoint (hr) Value: 6
  misc_feature: MA Experiment 108523 PARAMETER Experiment Name: Zm_42deg_Heat_P Parameter: Tissue Value: Aerial
  misc_feature: MA Experiment ID: 108535 Result: Down-regulated in Transcription
  misc_feature: MA Experiment 108535 PARAMETER Experiment Name: Zm_Meristem_P Parameter: Age (day) Value: 8
  misc_feature: MA Experiment 108535 PARAMETER Experiment Name: Zm_Meristem_P Parameter: Organism Value: Zea mays
  misc_feature: MA Experiment 108535 PARAMETER Experiment Name: Zm_Meristem_P Parameter: Plant Line Value: 35A19
  misc_feature: MA Experiment 108535 PARAMETER Experiment Name: Zm_Meristem_P Parameter: Tissue Value: Root Meristem vs. Above Root Meristem
  misc_feature: MA Experiment ID: 20000492 Result: Down-regulated in Transcription
  misc_feature: MA Experiment 20000492 PARAMETER Experiment Name: Zm_Hybrid_Seed_Dev_P Parameter: DAP Value: 12
  misc_feature: MA Experiment 20000492 PARAMETER Experiment Name: Zm_Hybrid_Seed_Dev_P Parameter: Organism Value: Zea mays
  misc_feature: MA Experiment 20000492 PARAMETER Experiment Name: Zm_Hybrid_Seed_Dev_P Parameter: Plant Line Value: 35A19
  misc_feature: MA Experiment 20000492 PARAMETER Experiment Name: Zm_Hybrid_Seed_Dev_P Parameter: Tissue Value: Fert Kernel vs. Unfert Floret
  misc_feature: MA Experiment ID: 20000535 Result: Down-regulated in Transcription
  misc_feature: MA Experiment 20000535 PARAMETER Experiment Name: Zm_Hybrid_Seed_Dev_P Parameter: DAP Value: 30 vs. 12
  misc_feature: MA Experiment 20000535 PARAMETER Experiment Name: Zm_Hybrid_Seed_Dev_P Parameter: Organism Value: Zea mays
  misc_feature: MA Experiment 20000535 PARAMETER Experiment Name: Zm_Hybrid_Seed_Dev_P Parameter: Plant Line Value: 35A19
  misc_feature: MA Experiment 20000535 PARAMETER Experiment Name: Zm_Hybrid_Seed_Dev_P Parameter: Tissue Value: Embryo vs. Unfert Floret
aacttcgacccggccggccctatcaaaagctggccccttccacagcgcactccctcaccttcctccacggctccaccatcccctcccctgccctgcccccaccgccccgcttccttccgccttgctccgttgcttcctcccaccacagtccactccactcgccggccctgcagctcagtatttgactgagactggtggtggagctgctagcagcgagcctgctacttcctggtcctgacggtgcgttcagacctcagaccagtgccgacgacgagctgtgaggagagggcaaggaagcaagcctgtgaggaaggcggcgatggagaggtacgaggtgatcaaggacataggatcgggcaacttcggggtggccaagctggtccgggacgtcaggaccaaggagctcttcgccgtcaagttcatcgagcgggggatgaagattgatgagaatgtccaaagggagatcatgaaccacaggtcactgaggcatccaaacatagttaaatttaaggaggttgtgctaactcccacacatttggccatagttatggaatatgctgctggtggtgagctatttgaaaggatctgtaatgctggaagatttagtgaggatgaggcgagatttttcttccaacaactgatttcaggagttagttattgccactcaatgcaaatatgccatagagatttgaaactagaaaacactctcctggatgatagtatagcacctcggctaaagatatgtgattttggttactccaagtcctctgtgttgcactctcaaccaaaatcaactgtcgggacaccagcttacattgctcctgaggtccttgctagaaaggaatatgatggaaaggtcgccgatgtttggtcatgtggagttactctgtatgtgatgcttgttggtgcctatccctttgaggaccccgacgaaccgaagaatttccgcaagacgcttactcggattatcagcgtccagtacgcggttcctgattttgtccgagtttcaatggagtgcaggcatctgctgtctcggatctttgtggcgaaacctgagcaacggataaccatcccagagatcaagaaccacccatggttcttgaagaacctgcccatcgagatgaccgacgagtaccagatgaacctacagctagtcgacatgaatgtcccctcgcaaagcctggaggagatcatgtccatcatactggaggcccggaagcccggcgacgggctgaagcatgcgggacagctccccggccttgggagcatggagctggatgacattgatgttgacgacatagacgttgaggacagtggcgactttgtatgtgccttgtgacgcggttcaggctgtccggcaccgttgctgcggtggactctcccccactctcctggtctttgtgtcttgctgttattccatgttgtttgtttcagcgagctccgagctcccattttgttgttgtaatatcacatgttttgtgtaaccaaggtagtgacgctgtggataaataatagacgttatgtgttgtattcttgctgaattgttgttcagctccttctgtttgccctgtatgaactgggcagtttcatgagtaccacaatgtgtatgttgatggctctgtcttcccttgtctcagcctgatattttgacctgctgcatgtagccaatgtgttttttcttgtatttttgctagaagcaatcttatgagttacgagtactattaccaccctg

SEQ ID NO: 2078 - protein, 339 aa, Zea mays subsp. mays
  peptide (1)..(339): Ceres Seq. ID no. 12341486
  misc_feature (4)..(260): Pfam Name: Protein kinase domain Pfam Description: Protein kinase domain
  misc_feature (1)..(339): Homolog of NCBI NO: 481002 NR Description: protein kinase MCPK9 (EC 2.7.1.-) - common ice
  misc_feature (2)..(339): Homolog of NCBI NO: 7446439 NR Description: probable serine/threonine-specific protein kinase
  misc_feature (11)..(339): Homolog of NCBI NO: 11138330 NR Description: putative serine/threonine kinase GDBrPK [Vitis
  misc_feature (1)..(328): Homolog of NCBI NO: 2055374 NR Description: serine-threonine protein kinase [Triticum
  misc_feature (1)..(331): Homolog of NCBI NO: 15218270 NR Description: serine-threonine protein kinase, putative
  misc_feature (2)..(339): Homolog of NCBI NO: 18418337 NR Description: protein kinase - like protein
  misc_feature (1)..(339): Homolog of NCBI NO: 15240124 NR Description: protein kinase, 41K (EC 2.7.1.-) (pir||S71172)
  misc_feature (11)..(339): Homolog of NCBI NO: 416564 NR Description: Abcisic acid-inducible protein kinase
  misc_feature (1)..(339): Homolog of NCBI NO: 14588571 NR Description: protein kinase HvPKABA1 [Hordeum vulgare subsp.
  misc_feature (1)..(339): Homolog of NCBI NO: 29164823 NR Description: abcisic acid-inducible protein kinanase
MERYEVIKDIGSGNFGVAKLVRDVRTKELFAVKFIERGMKIDENVQREIMNHRSLRHPNIVKFKEVVLTPTHLAIVMEYAAGGELFERICNAGRFSEDEARFFFQQLISGVSYCHSMQICHRDLKLENTLLDDSIAPRLKICDFGYSKSSVLHSQPKSTVGTPAYIAPEVLARKEYDGKVADVWSCGVTLYVMLVGAYPFEDPDEPKNFRKTLTRIISVQYAVPDFVRVSMECRHLLSRIFVAKPEQRITIPEIKNHPWFLKNLPIEMTDEYQMNLQLVDMNVPSQSLEEIMSIILEARKPGDGLKHAGQLPGLGSMELDDIDVDDIDVEDSGDFVCAL

SEQ ID NO: 2079 - protein, 301 aa, Zea mays subsp. mays
  peptide (1)..(301): Ceres Seq. ID no. 12341487
  misc_feature (1)..(222): Pfam Name: Protein kinase domain Pfam Description: Protein kinase domain
  misc_feature (1)..(301): Homolog of NCBI NO: 15240124 NR Description: protein kinase, 41K (EC 2.7.1.-) (pir||S71172)
  misc_feature (1)..(293): Homolog of NCBI NO: 15218270 NR Description: serine-threonine protein kinase, putative
  misc_feature (1)..(301): Homolog of NCBI NO: 18418337 NR Description: protein kinase - like protein
  misc_feature (1)..(301): Homolog of NCBI NO: 481002 NR Description: protein kinase MCPK9 (EC 2.7.1.-) - common ice
  misc_feature (1)..(301): Homolog of NCBI NO: 7446439 NR Description: probable serine/threonine-specific protein kinase
  misc_feature (1)..(301): Homolog of NCBI NO: 11138330 NR Description: putative serine/threonine kinase GDBrPK [Vitis
  misc_feature (1)..(290): Homolog of NCBI NO: 2055374 NR Description: serine-threonine protein kinase [Triticum
  misc_feature (1)..(301): Homolog of NCBI NO: 416564 NR Description: Abcisic acid-inducible protein kinase
  misc_feature (1)..(301): Homolog of NCBI NO: 14588571 NR Description: protein kinase HvPKABA1 [Hordeum vulgare subsp.
  misc_feature (1)..(301): Homolog of NCBI NO: 29164823 NR Description: abcisic acid-inducible protein kinanase
MKIDENVQREIMNHRSLRHPNIVKFKEVVLTPTHLAIVMEYAAGGELFERICNAGRFSEDEARFFFQQLISGVSYCHSMQICHRDLKLENTLLDDSIAPRLKICDFGYSKSSVLHSQPKSTVGTPAYIAPEVLARKEYDGKVADVWSCGVTLYVMLVGAYPFEDPDEPKNFRKTLTRIISVQYAVPDFVRVSMECRHLLSRIFVAKPEQRITIPEIKNHPWFLKNLPIEMTDEYQMNLQLVDMNVPSQSLEEIMSIILEARKPGDGLKHAGQLPGLGSMELDDIDVDDIDVEDSGDFVCAL

SEQ ID NO: 2080 - protein, 290 aa, Zea mays subsp. mays
  peptide (1)..(290): Ceres Seq. ID no. 12341488
  misc_feature (1)..(211): Pfam Name: Protein kinase domain Pfam Description: Protein kinase domain
  misc_feature (1)..(290): Homolog of NCBI NO: 15240124 NR Description: protein kinase, 41K (EC 2.7.1.-) (pir||S71172)
  misc_feature (1)..(282): Homolog of NCBI NO: 15218270 NR Description: serine-threonine protein kinase, putative
  misc_feature (1)..(290): Homolog of NCBI NO: 18418337 NR Description: protein kinase - like protein
  misc_feature (1)..(290): Homolog of NCBI NO: 481002 NR Description: protein kinase MCPK9 (EC 2.7.1.-) - common ice
  misc_feature (1)..(290): Homolog of NCBI NO: 7446439 NR Description: probable serine/threonine-specific protein kinase
  misc_feature (1)..(290): Homolog of NCBI NO: 11138330 NR Description: putative serine/threonine kinase GDBrPK [Vitis
  misc_feature (1)..(279): Homolog of NCBI NO: 2055374 NR Description: serine-threonine protein kinase [Triticum
  misc_feature (1)..(290): Homolog of NCBI NO: 416564 NR Description: Abcisic acid-inducible protein kinase
  misc_feature (1)..(290): Homolog of NCBI NO: 14588571 NR Description: protein kinase HvPKABA1 [Hordeum vulgare subsp.
  misc_feature (1)..(290): Homolog of NCBI NO: 29164823 NR Description: abcisic acid-inducible protein kinanase
MNHRSLRHPNIVKFKEVVLTPTHLAIVMEYAAGGELFERICNAGRFSEDEARFFFQQLISGVSYCHSMQICHRDLKLENTLLDDSIAPRLKICDFGYSKSSVLHSQPKSTVGTPAYIAPEVLARKEYDGKVADVWSCGVTLYVMLVGAYPFEDPDEPKNFRKTLTRIISVQYAVPDFVRVSMECRHLLSRIFVAKPEQRITIPEIKNHPWFLKNLPIEMTDEYQMNLQLVDMNVPSQSLEEIMSIILEARKPGDGLKHAGQLPGLGSMELDDIDVDDIDVEDSGDFVCAL

SEQ ID NO: 2081 - DNA, 878 bp, Zea mays subsp. mays
  misc_feature (1)..(878): Ceres Seq. ID no. 12367342
  misc_feature: MA Experiment ID: 108527 Result: Up-regulated in Transcription
  misc_feature: MA Experiment 108527 PARAMETER Experiment Name: Zm_5mM_NO_P Parameter: Age (day) Value: 8
  misc_feature: MA Experiment 108527 PARAMETER Experiment Name: Zm_5mM_NO_P Parameter: Organism Value: Zea mays
  misc_feature: MA Experiment 108527 PARAMETER Experiment Name: Zm_5mM_NO_P Parameter: Plant Line Value: 35A19
  misc_feature: MA Experiment 108527 PARAMETER Experiment Name: Zm_5mM_NO_P Parameter: Timepoint (hr) Value: 6
  misc_feature: MA Experiment 108527 PARAMETER Experiment Name: Zm_5mM_NO_P Parameter: Tissue Value: Aerial
  misc_feature: MA Experiment 108527 PARAMETER Experiment Name: Zm_5mM_NO_P Parameter: Treatment Value: 5mM NO vs. No Treatment
  misc_feature: MA Experiment ID: 108528 Result: Down-regulated in Transcription
  misc_feature: MA Experiment 108528 PARAMETER Experiment Name: Zm_Imbibed_Seeds_P Parameter: Age (day) Value: 5 vs. 2
  misc_feature: MA Experiment 108528 PARAMETER Experiment Name: Zm_Imbibed_Seeds_P Parameter: Organism Value: Zea mays
  misc_feature: MA Experiment 108528 PARAMETER Experiment Name: Zm_Imbibed_Seeds_P Parameter: Plant Line Value: 35A19
  misc_feature: MA Experiment 108528 PARAMETER Experiment Name: Zm_Imbibed_Seeds_P Parameter: Tissue Value: Aerial vs. Embryo
  misc_feature: MA Experiment ID: 108529 Result: Down-regulated in Transcription
  misc_feature: MA Experiment 108529 PARAMETER Experiment Name: Zm_Imbibed_Seeds_P Parameter: Age (day) Value: 5 vs. 2
  misc_feature: MA Experiment 108529 PARAMETER Experiment Name: Zm_Imbibed_Seeds_P Parameter: Organism Value: Zea mays
  misc_feature: MA Experiment 108529 PARAMETER Experiment Name: Zm_Imbibed_Seeds_P Parameter: Plant Line Value: 35A19
  misc_feature: MA Experiment 108529 PARAMETER Experiment Name: Zm_Imbibed_Seeds_P Parameter: Tissue Value: Roots vs. Embryo
  misc_feature: MA Experiment ID: 108530 Result: Down-regulated in Transcription
  misc_feature: MA Experiment 108530 PARAMETER Experiment Name: Zm_Imbibed_Seeds_P Parameter: Age (day) Value: 6 vs. 2
  misc_feature: MA Experiment 108530 PARAMETER Experiment Name: Zm_Imbibed_Seeds_P Parameter: Organism Value: Zea mays
  misc_feature: MA Experiment 108530 PARAMETER Experiment Name: Zm_Imbibed_Seeds_P Parameter: Plant Line Value: 35A19
  misc_feature: MA Experiment 108530 PARAMETER Experiment Name: Zm_Imbibed_Seeds_P Parameter: Tissue Value: Aerial vs. Embryo
  misc_feature: MA Experiment ID: 108543 Result: Down-regulated in Transcription
  misc_feature: MA Experiment ID: 108545 Result: Down-regulated in Transcription
  misc_feature: MA Experiment 108545 PARAMETER Experiment Name: Zm_Imbibed_Seeds_P Parameter: Age (day) Value: 3 vs. 2
  misc_feature: MA Experiment 108545 PARAMETER Experiment Name: Zm_Imbibed_Seeds_P Parameter: Organism Value: Zea mays
  misc_feature: MA Experiment 108545 PARAMETER Experiment Name: Zm_Imbibed_Seeds_P Parameter: Plant Line Value: 35A19
  misc_feature: MA Experiment 108545 PARAMETER Experiment Name: Zm_Imbibed_Seeds_P Parameter: Tissue Value: Aerial vs. Embryo
  misc_feature: MA Experiment ID: 108546 Result: Down-regulated in Transcription
  misc_feature: MA Experiment 108546 PARAMETER Experiment Name: Zm_Imbibed_Seeds_P Parameter: Age (day) Value: 3 vs. 2
  misc_feature: MA Experiment 108546 PARAMETER Experiment Name: Zm_Imbibed_Seeds_P Parameter: Organism Value: Zea mays
  misc_feature: MA Experiment 108546 PARAMETER Experiment Name: Zm_Imbibed_Seeds_P Parameter: Plant Line Value: 35A19
  misc_feature: MA Experiment 108546 PARAMETER Experiment Name: Zm_Imbibed_Seeds_P Parameter: Tissue Value: Roots vs. Embryo
  misc_feature: MA Experiment ID: 108547 Result: Down-regulated in Transcription
  misc_feature: MA Experiment 108547 PARAMETER Experiment Name: Zm_Imbibed_Seeds_P Parameter: Age (day) Value: 4 vs. 2
  misc_feature: MA Experiment 108547 PARAMETER Experiment Name: Zm_Imbibed_Seeds_P Parameter: Organism Value: Zea mays
  misc_feature: MA Experiment 108547 PARAMETER Experiment Name: Zm_Imbibed_Seeds_P Parameter: Plant Line Value: 35A19
  misc_feature: MA Experiment 108547 PARAMETER Experiment Name: Zm_Imbibed_Seeds_P Parameter: Tissue Value: Aerial vs. Embryo
  misc_feature: MA Experiment ID: 108548 Result: Up-regulated in Transcription
  misc_feature: MA Experiment 108548 PARAMETER Experiment Name: Zm_20uM_KNO3_H-to-L_P Parameter: Age (day) Value: 11
  misc_feature: MA Experiment 108548 PARAMETER Experiment Name: Zm_20uM_KNO3_H-to-L_P Parameter: Organism Value: Zea mays
  misc_feature: MA Experiment 108548 PARAMETER Experiment Name: Zm_20uM_KNO3_H-to-L_P Parameter: Plant Line Value: 35A19
  misc_feature: MA Experiment 108548 PARAMETER Experiment Name: Zm_20uM_KNO3_H-to-L_P Parameter: Timepoint (hr) Value: 4
  misc_feature: MA Experiment 108548 PARAMETER Experiment Name: Zm_20uM_KNO3_H-to-L_P Parameter: Tissue Value: Roots
  misc_feature: MA Experiment 108548 PARAMETER Experiment Name: Zm_20uM_KNO3_H-to-L_P Parameter: Treatment Value: 20uM KNO3 vs. 60mM KNO3
  misc_feature: MA Experiment ID: 108688 Result: Down-regulated in Transcription
  misc_feature: MA Experiment 108688 PARAMETER Experiment Name: Zm_Embryos-Flowers__P Parameter: Tissue Value: Immature Flowers vs. Aerial+
  misc_feature: MA Experiment ID: 20000535 Result: Up-regulated in Transcription
  misc_feature: MA Experiment 20000535 PARAMETER Experiment Name: Zm_Hybrid_Seed_Dev_P Parameter: DAP Value: 30 vs. 12
  misc_feature: MA Experiment 20000535 PARAMETER Experiment Name: Zm_Hybrid_Seed_Dev_P Parameter: Organism Value: Zea mays
  misc_feature: MA Experiment 20000535 PARAMETER Experiment Name: Zm_Hybrid_Seed_Dev_P Parameter: Plant Line Value: 35A19
  misc_feature: MA Experiment 20000535 PARAMETER Experiment Name: Zm_Hybrid_Seed_Dev_P Parameter: Tissue Value: Embryo vs. Unfert Floret
  misc_feature: MA Experiment ID: 20001610 Result: Down-regulated in Transcription
  misc_feature: MA Experiment 20001610 PARAMETER Experiment Name: Zm_50ppm_KNO3_L-to-H_P Parameter: Age (day) Value: 19
  misc_feature: MA Experiment 20001610 PARAMETER Experiment Name: Zm_50ppm_KNO3_L-to-H_P Parameter: Organism Value: Zea mays
  misc_feature: MA Experiment 20001610 PARAMETER Experiment Name: Zm_50ppm_KNO3_L-to-H_P Parameter: Plant Line Value: 35A19
  misc_feature: MA Experiment 20001610 PARAMETER Experiment Name: Zm_50ppm_KNO3_L-to-H_P Parameter: Timepoint (hr) Value: 2
  misc_feature: MA Experiment 20001610 PARAMETER Experiment Name: Zm_50ppm_KNO3_L-to-H_P Parameter: Tissue Value: Roots
  misc_feature: MA Experiment 20001610 PARAMETER Experiment Name: Zm_50ppm_KNO3_L-to-H_P Parameter: Treatment Value: 50ppm KNO3 vs. 50ppm KCl
  misc_feature: MA Experiment ID: 20001613 Result: Up-regulated in Transcription
  misc_feature: MA Experiment 20001613 PARAMETER Experiment Name: Zm_50ppm_KNO3_L-to-H_P Parameter: Age (day) Value: 20
  misc_feature: MA Experiment 20001613 PARAMETER Experiment Name: Zm_50ppm_KNO3_L-to-H_P Parameter: Organism Value: Zea mays
  misc_feature: MA Experiment 20001613 PARAMETER Experiment Name: Zm_50ppm_KNO3_L-to-H_P Parameter: Plant Line Value: 35A19
  misc_feature: MA Experiment 20001613 PARAMETER Experiment Name: Zm_50ppm_KNO3_L-to-H_P Parameter: Timepoint (hr) Value: 24
  misc_feature: MA Experiment 20001613 PARAMETER Experiment Name: Zm_50ppm_KNO3_L-to-H_P Parameter: Tissue Value: Roots
  misc_feature: MA Experiment 20001613 PARAMETER Experiment Name: Zm_50ppm_KNO3_L-to-H_P Parameter: Treatment Value: 50ppm KNO3 vs. 50ppm KCl
  misc_feature: MA Experiment ID: 20001614 Result: Up-regulated in Transcription
  misc_feature: MA Experiment 20001614 PARAMETER Experiment Name: Zm_50ppm_KNO3_L-to-H_P Parameter: Age (day) Value: 21
  misc_feature: MA Experiment 20001614 PARAMETER Experiment Name: Zm_50ppm_KNO3_L-to-H_P Parameter: Organism Value: Zea mays
  misc_feature: MA Experiment 20001614 PARAMETER Experiment Name: Zm_50ppm_KNO3_L-to-H_P Parameter: Plant Line Value: 35A19
  misc_feature: MA Experiment 20001614 PARAMETER Experiment Name: Zm_50ppm_KNO3_L-to-H_P Parameter: Timepoint (hr) Value: 48
  misc_feature: MA Experiment 20001614 PARAMETER Experiment Name: Zm_50ppm_KNO3_L-to-H_P Parameter: Tissue Value: Roots
  misc_feature: MA Experiment 20001614 PARAMETER Experiment Name: Zm_50ppm_KNO3_L-to-H_P Parameter: Treatment Value: 50ppm KNO3 vs. 50ppm KCl
aaaaaacacgcgaatcgtaccggcacgaacactgagcacgcacgcacgcaaactcaaaggagtgtgaccacggaactgaagccatggcggttacagttgagaagggcgctatgggcgagccggcgctgctgctggagcgcagccgggcgatcaccctgcacggccgtgaccggaagggccgtgccgtcgtcaggatcgtcggcaactattttccagcgcgcgcgctcggcggccgggcggaggaggcgctgcggtcgtacctgcgggagcgcgtcctcccggagatcggggacccgagttcgtggtcgtgtacatgcactcccgcgtggatcgcggccacaacttccccggcgtcggtgcgatccgcggcgcgtacgagacgctgccggccgcggccaaggagaggctgcgcgccgtctacttcgtgcacccggccctccaatccaggatcttcttcgccaccttcgggcgcttcctcttcagctcagggttgtatgagaagctgcgatacatgagccggcttgagtacgtttgggcccacatagacaaggagcagctggaggtccccgactgcgtgcgcgagcacgacgacgagctggagcgccgcccgctgatggactacggcatcgaggcgacggagacccgctgcatgtatgacgccgcgtccatggacacctcggcgtccctgcactcgctccgctgcgtctcctagtcgcctggacacttggacagtggcatcccgattcccgccgccggtacggcgtgctttctgtgttctggttggtaggaggtagctgcatggcttcatagcgcttcggtactgtagtttagctgtgtatttataatggataaagtttggagtaccgagatggcttctg

SEQ ID NO: 2082 - protein, 165 aa, Zea mays subsp. mays
  peptide (1)..(165): Ceres Seq. ID no. 12367343
KKHANRTGTNTEHARTQTQRSVTTELKPWRLQLRRALWASRRCCWSAAGRSPCTAVTGRAVPSSGSSATIFQRARSAAGRRRRCGRTCGSASSRRSGTRVRGRVHALPRGSRPQLPRRRCDPRRVRDAAGRGQGEAARRLLRAPGPPIQDLLRHLRALPLQLRVV

SEQ ID NO: 2083 - protein, 143 aa, Zea mays subsp. mays
  peptide (1)..(143): Ceres Seq. ID no. 12367344
  misc_feature (10)..(70): Homolog of NCBI NO: 38345848 NR Description: OSJNBa0084K11.12 [Oryza sativa (japonica
  misc_feature (9)..(44): Homolog of NCBI NO: 22830926 NR Description: P0466H10.24 [Oryza sativa (japonica
  misc_feature (17)..(64): Homolog of NCBI NO: 18398797 NR Description: expressed protein
  misc_feature (17)..(64): Homolog of NCBI NO: 21593697 NR Description: unknown [Arabidopsis thaliana]
  misc_feature (12)..(69): Homolog of NCBI NO: 21553817 NR Description: unknown [Arabidopsis thaliana]
  misc_feature (12)..(69): Homolog of NCBI NO: 15237117 NR Description: putative protein
MAVTVEKGAMGEPALLLERSRAITLHGRDRKGRAVVRIVGNYFPARALGGRAEEALRSYLRERVLPEIGDPSSWSCTCTPAWIAATTSPASVRSAARTRRCRPRPRRGCAPSTSCTRPSNPGSSSPPSGASSSAQGCMRSCDT

SEQ ID NO: 2084 - protein, 134 aa, Zea mays subsp. mays
  peptide (1)..(134): Ceres Seq. ID no. 12367345
  misc_feature (1)..(61): Homolog of NCBI NO: 38345848 NR Description: OSJNBa0084K11.12 [Oryza sativa (japonica
  misc_feature (1)..(35): Homolog of NCBI NO: 22830926 NR Description: P0466H10.24 [Oryza sativa (japonica
  misc_feature (8)..(55): Homolog of NCBI NO: 18398797 NR Description: expressed protein
  misc_feature (8)..(55): Homolog of NCBI NO: 21593697 NR Description: unknown [Arabidopsis thaliana]
  misc_feature (3)..(60): Homolog of NCBI NO: 21553817 NR Description: unknown [Arabidopsis thaliana]
  misc_feature (3)..(60): Homolog of NCBI NO: 15237117 NR Description: putative protein
MGEPALLLERSRAITLHGRDRKGRAVVRIVGNYFPARALGGRAEEALRSYLRERVLPEIGDPSSWSCTCTPAWIAATTSPASVRSAARTRRCRPRPRRGCAPSTSCTRPSNPGSSSPPSGASSSAQGCMRSCDT

SEQ ID NO: 2085 - protein, 132 aa, Zea mays subsp. mays
  peptide (1)..(132): Ceres Seq. ID no. 12367346
  misc_feature (1)..(106): Homolog of NCBI NO: 22830926 NR Description: P0466H10.24 [Oryza sativa (japonica
  misc_feature (1)..(132): Homolog of NCBI NO: 18398797 NR Description: expressed protein
  misc_feature (1)..(132): Homolog of NCBI NO: 21593697 NR Description: unknown [Arabidopsis thaliana]
  misc_feature (1)..(132): Homolog of NCBI NO: 21553817 NR Description: unknown [Arabidopsis thaliana]
  misc_feature (1)..(132): Homolog of NCBI NO: 15237117 NR Description: putative protein
  misc_feature (1)..(132): Homolog of NCBI NO: 38345848 NR Description: OSJNBa0084K11.12 [Oryza sativa (japonica
MHSRVDRGHNFPGVGAIRGAYETLPAAAKERLRAVYFVHPALQSRIFFATFGRFLFSSGLYEKLRYMSRLEYVWAHIDKEQLEVPDCVREHDDELERRPLMDYGIEATETRCMYDAASMDTSASLHSLRCVS

SEQ ID NO: 2086 - DNA, 1589 bp, Zea mays subsp. mays
  misc_feature (1)..(1589): Ceres Seq. ID no. 12408021
  misc_feature: MA Experiment ID: 108523 Result: Down-regulated in Transcription
  misc_feature: MA Experiment 108523 PARAMETER Experiment Name: Zm_42deg_Heat_P Parameter: Age (day) Value: 8
  misc_feature: MA Experiment 108523 PARAMETER Experiment Name: Zm_42deg_Heat_P Parameter: Organism Value: Zea mays
  misc_feature: MA Experiment 108523 PARAMETER Experiment Name: Zm_42deg_Heat_P Parameter: Plant Line Value: 35A19
  misc_feature: MA Experiment 108523 PARAMETER Experiment Name: Zm_42deg_Heat_P Parameter: Temperature (deg C) Value: 42 vs. 22
  misc_feature: MA Experiment 108523 PARAMETER Experiment Name: Zm_42deg_Heat_P Parameter: Timepoint (hr) Value: 6
  misc_feature: MA Experiment 108523 PARAMETER Experiment Name: Zm_42deg_Heat_P Parameter: Tissue Value: Aerial
  misc_feature: MA Experiment ID: 108527 Result: Down-regulated in Transcription
  misc_feature: MA Experiment 108527 PARAMETER Experiment Name: Zm_5mM_NO_P Parameter: Age (day) Value: 8
  misc_feature: MA Experiment 108527 PARAMETER Experiment Name: Zm_5mM_NO_P Parameter: Organism Value: Zea mays
  misc_feature: MA Experiment 108527 PARAMETER Experiment Name: Zm_5mM_NO_P Parameter: Plant Line Value: 35A19
  misc_feature: MA Experiment 108527 PARAMETER Experiment Name: Zm_5mM_NO_P Parameter: Timepoint (hr) Value: 6
  misc_feature: MA Experiment 108527 PARAMETER Experiment Name: Zm_5mM_NO_P Parameter: Tissue Value: Aerial
  misc_feature: MA Experiment 108527 PARAMETER Experiment Name: Zm_5mM_NO_P Parameter: Treatment Value: 5mM NO vs. No Treatment
  misc_feature: MA Experiment ID: 108536 Result: Down-regulated in Transcription
  misc_feature: MA Experiment 108536 PARAMETER Experiment Name: Zm_Meristem_P Parameter: Age (day) Value: 8
  misc_feature: MA Experiment 108536 PARAMETER Experiment Name: Zm_Meristem_P Parameter: Organism Value: Zea mays
  misc_feature: MA Experiment 108536 PARAMETER Experiment Name: Zm_Meristem_P Parameter: Plant Line Value: 35A19
  misc_feature: MA Experiment 108536 PARAMETER Experiment Name: Zm_Meristem_P Parameter: Tissue Value: Shoot Meristem vs. Above Shoot Meristem
  misc_feature: MA Experiment ID: 108556 Result: Down-regulated in Transcription
  misc_feature: MA Experiment 108556 PARAMETER Experiment Name: Zm_Drought_P Parameter: Age (day) Value: 9
  misc_feature: MA Experiment 108556 PARAMETER Experiment Name: Zm_Drought_P Parameter: Organism Value: Zea mays
  misc_feature: MA Experiment 108556 PARAMETER Experiment Name: Zm_Drought_P Parameter: Plant Line Value: 35A19
  misc_feature: MA Experiment 108556 PARAMETER Experiment Name: Zm_Drought_P Parameter: Timepoint (hr) Value: 24
  misc_feature: MA Experiment 108556 PARAMETER Experiment Name: Zm_Drought_P Parameter: Tissue Value: Aerial
  misc_feature: MA Experiment 108556 PARAMETER Experiment Name: Zm_Drought_P Parameter: Treatment Value: Drought vs. No Drought
  misc_feature: MA Experiment ID: 20000488 Result: Down-regulated in Transcription
  misc_feature: MA Experiment 20000488 PARAMETER Experiment Name: Zm_50mM_NH4NO3_L_to_H_P Parameter: Organism Value: Zea mays
  misc_feature: MA Experiment 20000488 PARAMETER Experiment Name: Zm_50mM_NH4NO3_L_to_H_P Parameter: Timepoint (hr) Value: 8
  misc_feature: MA Experiment 20000488 PARAMETER Experiment Name: Zm_50mM_NH4NO3_L_to_H_P Parameter: Tissue Value: Leaves
  misc_feature: MA Experiment 20000488 PARAMETER Experiment Name: Zm_50mM_NH4NO3_L_to_H_P Parameter: Treatment Value: 50mM NH4NO3 vs. 100mM Mannitol
  misc_feature: MA Experiment ID: 20000533 Result: Down-regulated in Transcription
  misc_feature: MA Experiment 20000533 PARAMETER Experiment Name: Zm_0.001percent_MeJA_P Parameter: Age (day) Value: 11
  misc_feature: MA Experiment 20000533 PARAMETER Experiment Name: Zm_0.001percent_MeJA_P Parameter: Organism Value: Zea mays
  misc_feature: MA Experiment 20000533 PARAMETER Experiment Name: Zm_0.001percent_MeJA_P Parameter: Plant Line Value: 35A19
  misc_feature: MA Experiment 20000533 PARAMETER Experiment Name: Zm_0.001percent_MeJA_P Parameter: Timepoint (hr) Value: 72
  misc_feature: MA Experiment 20000533 PARAMETER Experiment Name: Zm_0.001percent_MeJA_P Parameter: Tissue Value: Aerial
  misc_feature: MA Experiment 20000533 PARAMETER Experiment Name: Zm_0.001percent_MeJA_P Parameter: Treatment Value: 0.001percent MeJA vs. No Treatment
  misc_feature: MA Experiment ID: 20000626 Result: Down-regulated in Transcription
  misc_feature: MA Experiment 20000626 PARAMETER Experiment Name: Zm_Herbicide-Treatments_P Parameter: Timepoint (hr) Value: 12
  misc_feature: MA Experiment 20000626 PARAMETER Experiment Name: Zm_Herbicide-Treatments_P Parameter: Tissue Value: Aerial
  misc_feature: MA Experiment 20000626 PARAMETER Experiment Name: Zm_Herbicide-Treatments_P Parameter: Treatment Value: Roundup vs. No Treatment
  misc_feature: MA Experiment ID: 20000632 Result: Down-regulated in Transcription
  misc_feature: MA Experiment 20000632 PARAMETER Experiment Name: Zm_Herbicide-Treatments_P Parameter: Timepoint (hr) Value: 4
  misc_feature: MA Experiment 20000632 PARAMETER Experiment Name: Zm_Herbicide-Treatments_P Parameter: Tissue Value: Aerial
  misc_feature: MA Experiment 20000632 PARAMETER Experiment Name: Zm_Herbicide-Treatments_P Parameter: Treatment Value: Glean vs. No Treatment
actcacatcactcccagactgcttccacctacgttcattatttccgcaatgtacaaccgagtatgatatgcagtcgtagtatcatggataaccaccttatgtcgtccttcgccatcctactgctttcttcttttgctgcaatggttgcatatcctgctcgcagtgaattacagcctaaccagatgaaaaaccaccattctgtatcatcatacagcccacaaccgaaggattttccaactgagcaactctacagcgcctacctagtaatccagcgattcaagagcaccatcactagcgaccccaagaacgtcaccgccacctggattggtcatgatatctgcggagaaacgacctacgtggggttctactgcggatcgccggccggaggagataagaagttgacagtcacgggggttattttgaatggctatagtctacatgcaccaacgttggaaggtttcgtcaatcagctccctgatctagctcttttccatgctgcttccaacaattttggtggcgatataccccagctaaccgcccttgggtacatgtacgagctcagtgtcgccgctaaagatgtgccattacagactagggatgcggatgattttgtgggggggaggggcatcggtcgcgtgcaattaggtagatgcgtaactgctgattttgacttttcatttaatgtcggaattaataagggtcacaaatttcctggttttacgcatgccaaggctctccttctcaaccgcaacaatttgtccggtccacttccgtcaaacctcggtttctcaaaactgagctaccttgccctcgccaacaacaaactcaccgggccaatcccgccgtcaatcagtaagctggaagactctctcttcgaggtactccttctcaacaaccagctctccggctgcctcccccacgagctcggcatgctcaccaaggcggccgtgattgacgccggcatgaaccagctcaccggcccaatcccgtcatctttctcctgcctaagcagcgtcgagcagctcaacctggccggaaaccgcctctacggtcaggtacccgacgcgctctgcaagcttgctgggcccgctggccgcctcgccaacctcacgctgtccggcaactacttcacatccgccgggccggcatgcgcggcgctgatcaaagacggagtgctggacgtgaagaacaactgcattccggggctcaccaaccagaggcgccccgcggagtgcgcggcgttccagagccaaccaaagacttgcccggcagcgagcgctcaggtgacatgccccgccgccgcagcttccaggaacgcggcggcgccaggggagaggaaggtcaaggattactccagctacgtgacgtacgctactctgcatgactgagccacactggcatgcagtaggagacagaatgccttgctggctatgtgtctcttgtattcagcatgagtgtaccctagcgtgtgttgttgtgattgtgattgctgtctatttgcattattgtacgtgtgttgctgtcacatctagatcatcccattatttgtacgtccaaatccattttatggaaagtactgttggtgtttt

SEQ ID NO: 2087 - protein, 461 aa, Zea mays subsp. mays
  peptide (1)..(461): Ceres Seq. ID no. 12408022
  misc_feature (77)..(432): Homolog of NCBI NO: 34906174 NR Description: putative extensin-like protein
  misc_feature (77)..(421): Homolog of NCBI NO: 7484956 NR Description: extensin homolog F24O1.18 - Arabidopsis thaliana
  misc_feature (81)..(431): Homolog of NCBI NO: 15228861 NR Description: hypothetical protein; protein id: At3g22800.1
  misc_feature (77)..(418): Homolog of NCBI NO: 15230120 NR Description: disease resistance protein, putative; protein id:
  misc_feature (77)..(421): Homolog of NCBI NO: 15221178 NR Description: putative extensin
  misc_feature (76)..(437): Homolog of NCBI NO: 15235668 NR Description: extensin-like protein; protein id: At4g13340.1
  misc_feature (71)..(461): Homolog of NCBI NO: 15222811 NR Description: unknown protein; protein id: At1g49750.1
  misc_feature (72)..(422): Homolog of NCBI NO: 15230349 NR Description: unknown protein; protein id: At3g19320.1
  misc_feature (39)..(422): Homolog of NCBI NO: 30680322 NR Description: extensin-related protein [Arabidopsis thaliana]
  misc_feature (73)..(460): Homolog of NCBI NO: 32490271 NR Description: OSJNBb0116K07.13 [Oryza sativa (japonica
SHHSQTASTYVHYFRNVQPSMICSRSIMDNHLMSSFAILLLSSFAAMVAYPARSELQPNQMKNHHSVSSYSPQPKDFPTEQLYSAYLVIQRFKSTITSDPKNVTATWIGHDICGETTYVGFYCGSPAGGDKKLTVTGVILNGYSLHAPTLEGFVNQLPDLALFHAASNNFGGDIPQLTALGYMYELSVAAKDVPLQTRDADDFVGGRGIGRVQLGRCVTADFDFSFNVGINKGHKFPGFTHAKALLLNRNNLSGPLPSNLGFSKLSYLALANNKLTGPIPPSISKLEDSLFEVLLLNNQLSGCLPHELGMLTKAAVIDAGMNQLTGPIPSSFSCLSSVEQLNLAGNRLYGQVPDALCKLAGPAGRLANLTLSGNYFTSAGPACAALIKDGVLDVKNNCIPGLTNQRRPAECAAFQSQPKTCPAASAQVTCPAAAASRNAAAPGERKVKDYSSYVTYATLHD

SEQ ID NO: 2088 - protein, 441 aa, Zea mays subsp. mays
  peptide (1)..(441): Ceres Seq. ID no. 12408023
  misc_feature (57)..(412): Homolog of NCBI NO: 34906174 NR Description: putative extensin-like protein
  misc_feature (57)..(401): Homolog of NCBI NO: 7484956 NR Description: extensin homolog F24O1.18 - Arabidopsis thaliana
  misc_feature (61)..(411): Homolog of NCBI NO: 15228861 NR Description: hypothetical protein; protein id: At3g22800.1
  misc_feature (57)..(398): Homolog of NCBI NO: 15230120 NR Description: disease resistance protein, putative; protein id:
  misc_feature (57)..(401): Homolog of NCBI NO: 15221178 NR Description: putative extensin
  misc_feature (56)..(417): Homolog of NCBI NO: 15235668 NR Description: extensin-like protein; protein id: At4g13340.1
  misc_feature (51)..(441): Homolog of NCBI NO: 15222811 NR Description: unknown protein; protein id: At1g49750.1
  misc_feature (52)..(402): Homolog of NCBI NO: 15230349 NR Description: unknown protein; protein id: At3g19320.1
  misc_feature (19)..(402): Homolog of NCBI NO: 30680322 NR Description: extensin-related protein [Arabidopsis thaliana]
  misc_feature (53)..(440): Homolog of NCBI NO: 32490271 NR Description: OSJNBb0116K07.13 [Oryza sativa (japonica
MICSRSIMDNHLMSSFAILLLSSFAAMVAYPARSELQPNQMKNHHSVSSYSPQPKDFPTEQLYSAYLVIQRFKSTITSDPKNVTATWIGHDICGETTYVGFYCGSPAGGDKKLTVTGVILNGYSLHAPTLEGFVNQLPDLALFHAASNNFGGDIPQLTALGYMYELSVAAKDVPLQTRDADDFVGGRGIGRVQLGRCVTADFDFSFNVGINKGHKFPGFTHAKALLLNRNNLSGPLPSNLGFSKLSYLALANNKLTGPIPPSISKLEDSLFEVLLLNNQLSGCLPHELGMLTKAAVIDAGMNQLTGPIPSSFSCLSSVEQLNLAGNRLYGQVPDALCKLAGPAGRLANLTLSGNYFTSAGPACAALIKDGVLDVKNNCIPGLTNQRRPAECAAFQSQPKTCPAASAQVTCPAAAASRNAAAPGERKVKDYSSYVTYATLHD

SEQ ID NO: 2089 - protein, 434 aa, Zea mays subsp. mays
  peptide (1)..(434): Ceres Seq. ID no. 12408024
  misc_feature (50)..(405): Homolog of NCBI NO: 34906174 NR Description: putative extensin-like protein
  misc_feature (50)..(394): Homolog of NCBI NO: 7484956 NR Description: extensin homolog F24O1.18 - Arabidopsis thaliana
  misc_feature (54)..(404): Homolog of NCBI NO: 15228861 NR Description: hypothetical protein; protein id: At3g22800.1
  misc_feature (50)..(391): Homolog of NCBI NO: 15230120 NR Description: disease resistance protein, putative; protein id:
  misc_feature (50)..(394): Homolog of NCBI NO: 15221178 NR Description: putative extensin
  misc_feature (49)..(410): Homolog of NCBI NO: 15235668 NR Description: extensin-like protein; protein id: At4g13340.1
  misc_feature (44)..(434): Homolog of NCBI NO: 15222811 NR Description: unknown protein; protein id: At1g49750.1
  misc_feature (45)..(395): Homolog of NCBI NO: 15230349 NR Description: unknown protein; protein id: At3g19320.1
  misc_feature (12)..(395): Homolog of NCBI NO: 30680322 NR Description: extensin-related protein [Arabidopsis thaliana]
  misc_feature (46)..(433): Homolog of NCBI NO: 32490271 NR Description: OSJNBb0116K07.13 [Oryza sativa (japonica
MDNHLMSSFAILLLSSFAAMVAYPARSELQPNQMKNHHSVSSYSPQPKDFPTEQLYSAYLVIQRFKSTITSDPKNVTATWIGHDICGETTYVGFYCGSPAGGDKKLTVTGVILNGYSLHAPTLEGFVNQLPDLALFHAASNNFGGDIPQLTALGYMYELSVAAKDVPLQTRDADDFVGGRGIGRVQLGRCVTADFDFSFNVGINKGHKFPGFTHAKALLLNRNNLSGPLPSNLGFSKLSYLALANNKLTGPIPPSISKLEDSLFEVLLLNNQLSGCLPHELGMLTKAAVIDAGMNQLTGPIPSSFSCLSSVEQLNLAGNRLYGQVPDALCKLAGPAGRLANLTLSGNYFTSAGPACAALIKDGVLDVKNNCIPGLTNQRRPAECAAFQSQPKTCPAASAQVTCPAAAASRNAAAPGERKVKDYSSYVTYATLHD

SEQ ID NO: 2090 - DNA, 866 bp, Zea mays subsp. mays
  misc_feature (1)..(866): Ceres Seq. ID no. 12351502
  misc_feature: MA Experiment ID: 108522 Result: Up-regulated in Transcription
  misc_feature: MA Experiment 108522 PARAMETER Experiment Name: Zm_42deg_Heat_P Parameter: Age (day) Value: 8
  misc_feature: MA Experiment 108522 PARAMETER Experiment Name: Zm_42deg_Heat_P Parameter: Organism Value: Zea mays
  misc_feature: MA Experiment 108522 PARAMETER Experiment Name: Zm_42deg_Heat_P Parameter: Plant Line Value: 35A19
  misc_feature: MA Experiment 108522 PARAMETER Experiment Name: Zm_42deg_Heat_P Parameter: Temperature (deg C) Value: 42 vs. 22
  misc_feature: MA Experiment 108522 PARAMETER Experiment Name: Zm_42deg_Heat_P Parameter: Timepoint (hr) Value: 1
  misc_feature: MA Experiment 108522 PARAMETER Experiment Name: Zm_42deg_Heat_P Parameter: Tissue Value: Aerial
  misc_feature: MA Experiment ID: 108535 Result: Up-regulated in Transcription
  misc_feature: MA Experiment 108535 PARAMETER Experiment Name: Zm_Meristem_P Parameter: Age (day) Value: 8
  misc_feature: MA Experiment 108535 PARAMETER Experiment Name: Zm_Meristem_P Parameter: Organism Value: Zea mays
  misc_feature: MA Experiment 108535 PARAMETER Experiment Name: Zm_Meristem_P Parameter: Plant Line Value: 35A19
  misc_feature: MA Experiment 108535 PARAMETER Experiment Name: Zm_Meristem_P Parameter: Tissue Value: Root Meristem vs. Above Root Meristem
  misc_feature: MA Experiment ID: 108543 Result: Up-regulated in Transcription
aaaaaaatccagtcgcatctccctctccgaaatcaaggtagcgtacaccgctgcagtttctagagccctctctgccactcgtgatcccactagtcacaatgcctgccctcgccaagcccgcctcccgcaccgccaagcccgccgcggctccgaagccgaagcctgccgccgccaagccgaaggcggccaccgctggtgcctcccacccgccttacttcgagatgatcaaggaggctatcacggcgctcaaggagaggaccggctccagctcgcaagcgatcgccaagtatgtgggggacaagcacggcgcgtctctgccggccaacttcaagaagatgctttccatccagctccgtgggtccgcagccaagggcaagctcgtgaaggtcaaggcttcgtacaagctctcggacgccgccaagaaggcatcccccaagaccaaggctaagccggcaaaggccgccgctgccaagaccaccgcccccaagccggccaaggccgccgccgccaagtcaaagaaggcagcggctgccaagccaaagaaggccgctgctgctgggaccaagcgcaaagtgcccgagaagaaggtcgtggcgaagccgaagaagtcccccgccgccaaggccaaggccaagccgaagaccgtgaagtcccctgcctccaagaaggcacggaaggcctccgcatgagatgggttgctttaggtctaagctctgattgtggttggtgtcagttaggtactgtacaaactaagtgtgtgcccaaagtgtctcaggcggtgtgttatgtgcttagcaagttctatctatcagagtgttttagtttaacaatggttttacctctggcttttgtagtcaggtttctgg

SEQ ID NO: 2091 - protein, 196 aa, Zea mays subsp. mays
  peptide (1)..(196): Ceres Seq. ID no. 12351503
  misc_feature (35)..(105): Pfam Name: linker histone H1 and H5 family Pfam Description: linker histone H1 and H5 family
  misc_feature (1)..(196): Homolog of NCBI NO: 22135471 NR Description: histone H1-like protein HON101 [Zea mays]
  misc_feature (1)..(196): Homolog of NCBI NO: 5230785 NR Description: histone H1 WH1B.1 [Triticum aestivum]
  misc_feature (1)..(193): Homolog of NCBI NO: 729668 NR Description: Histone H1 >gi|2147479|pir||S65059 histone H1,
  misc_feature (1)..(193): Homolog of NCBI NO: 7439658 NR Description: histone H1, stress-inducible - tomato
  misc_feature (1)..(196): Homolog of NCBI NO: 121950 NR Description: HISTONE H1 >gi|7439629|pir||S26826 histone H1 -
  misc_feature (1)..(194): Homolog of NCBI NO: 2623960 NR Description: histone H1 [Apium graveolens]
  misc_feature (1)..(196): Homolog of NCBI NO: 5726575 NR Description: histone H1C [Nicotiana tabacum]
  misc_feature (8)..(193): Homolog of NCBI NO: 7595978 NR Description: histone H1 variant [Lycopersicon chilense]
  misc_feature (5)..(196): Homolog of NCBI NO: 7439660 NR Description: histone H1 (clone TH32) - wheat
  misc_feature (1)..(195): Homolog of NCBI NO: 21465093 NR Description: histone H1 [Lathyrus aphaca]
MPALAKPASRTAKPAAAPKPKPAAAKPKAATAGASHPPYFEMIKEAITALKERTGSSSQAIAKYVGDKHGASLPANFKKMLSIQLRGSAAKGKLVKVKASYKLSDAAKKASPKTKAKPAKAAAAKTTAPKPAKAAAAKSKKAAAAKPKKAAAAGTKRKVPEKKVVAKPKKSPAAKAKAKPKTVKSPASKKARKASA

SEQ ID NO: 2092 - protein, 155 aa, Zea mays subsp. mays
  peptide (1)..(155): Ceres Seq. ID no. 12351504
  misc_feature (1)..(64): Pfam Name: linker histone H1 and H5 family Pfam Description: linker histone H1 and H5 family
  misc_feature (1)..(155): Homolog of NCBI NO: 22135471 NR Description: histone H1-like protein HON101 [Zea mays]
  misc_feature (1)..(155): Homolog of NCBI NO: 5230785 NR Description: histone H1 WH1B.1 [Triticum aestivum]
  misc_feature (1)..(152): Homolog of NCBI NO: 729668 NR Description: Histone H1 >gi|2147479|pir||S65059 histone H1,
  misc_feature (1)..(152): Homolog of NCBI NO: 7439658 NR Description: histone H1, stress-inducible - tomato
  misc_feature (1)..(155): Homolog of NCBI NO: 121950 NR Description: HISTONE H1 >gi|7439629|pir||S26826 histone H1 -
  misc_feature (1)..(153): Homolog of NCBI NO: 2623960 NR Description: histone H1 [Apium graveolens]
  misc_feature (1)..(155): Homolog of NCBI NO: 5726575 NR Description: histone H1C [Nicotiana tabacum]
  misc_feature (1)..(152): Homolog of NCBI NO: 7595978 NR Description: histone H1 variant [Lycopersicon chilense]
  misc_feature (1)..(155): Homolog of NCBI NO: 7439660 NR Description: histone H1 (clone TH32) - wheat
  misc_feature (1)..(154): Homolog of NCBI NO: 21465093 NR Description: histone H1 [Lathyrus aphaca]
MIKEAITALKERTGSSSQAIAKYVGDKHGASLPANFKKMLSIQLRGSAAKGKLVKVKASYKLSDAAKKASPKTKAKPAKAAAAKTTAPKPAKAAAAKSKKAAAAKPKKAAAAGTKRKVPEKKVVAKPKKSPAAKAKAKPKTVKSPASKKARKASA

SEQ ID NO: 2093 - protein, 148 aa, Zea mays subsp. mays
  peptide (1)..(148): Ceres Seq. ID no. 12351505
KKSSRISLSEIKVAYTAAVSRALSATRDPTSHNACPRQARLPHRQARRGSEAEACRRQAEGGHRWCLPPALLRDDQGGYHGAQGEDRLQLASDRQVCGGQARRVSAGQLQEDAFHPAPWVRSQGQAREGQGFVQALGRRQEGIPQDQG

SEQ ID NO: 2094 - DNA, 1387 bp, Zea mays subsp. mays
  misc_feature (1)..(1387): Ceres Seq. ID no. 12374463
  misc_feature: MA Experiment ID: 108523 Result: Up-regulated in Transcription
  misc_feature: MA Experiment 108523 PARAMETER Experiment Name: Zm_42deg_Heat_P Parameter: Age (day) Value: 8
  misc_feature: MA Experiment 108523 PARAMETER Experiment Name: Zm_42deg_Heat_P Parameter: Organism Value: Zea mays
  misc_feature: MA Experiment 108523 PARAMETER Experiment Name: Zm_42deg_Heat_P Parameter: Plant Line Value: 35A19
  misc_feature: MA Experiment 108523 PARAMETER Experiment Name: Zm_42deg_Heat_P Parameter: Temperature (deg C) Value: 42 vs. 22
  misc_feature: MA Experiment 108523 PARAMETER Experiment Name: Zm_42deg_Heat_P Parameter: Timepoint (hr) Value: 6
  misc_feature: MA Experiment 108523 PARAMETER Experiment Name: Zm_42deg_Heat_P Parameter: Tissue Value: Aerial
  misc_feature: MA Experiment ID: 108543 Result: Up-regulated in Transcription
acccgtctggtggccggcctatctggtgcggtgcggcgcggctcgatccggcccgacgattccgatcccctcccgtcccgtccatcccgtctcgtctcgcctcgccctccacgccggcgaccggagaaggggccgtgcagcgcaggcgacgcccacaacgaatccgtccccccgcgccggcttcgcccagccccgcggcgacgcaccaggattgaaggaggcatgagaaggtggacatcattgctatagcgatttgattactggagatggtgttggtggtaaagcagcaccgctgcacacactctgcgagctgcgtttgcatcaagggccacctcagtgaggatgctctgttcctcgtcttccgccacatgaactggaacccgaggctgattgctatcttgtcgtgtgtgtgcaagtggtttgacgaggttgccaagcaggtgctgtggaaggagttctgtcatgcaagggctccaaagatgatgctggatttgcattcaggtggcagccacattgttgatgggaactggaaggcactggggaagctgctcatctattgcaatggctgcacaaaaggggggctgtttaataacattcacgttccaggccattttgtgttcaggacacgcttttctaggactgcgggcaggagtttcctgcctctgccatgtaagtcggatgtcctgtatgtgtcagatccatgcgagcatcttgatcagggggaagaaggcgacataggtttcttccgaggcatctttatgtcatttgccacttcaagggtaaagaagatgttgattgagaagcgggcgaggtttcatccaagggagttgtgcccttattgtaaggccaagctatggaacatgtttcaggaaaatatgatcccaaggagtgcttccgcaaggctgggtgcctatgatgactctgtggagtattttgtatgcctgaatggacatgttattggactcggtaccctactaccactctcagactcagaggaggcagcagatgagtgatcatcaagaacatgaatcaggtttagaagattgaagcccagggcttgtgaaatggtactgaatcttggttgtgactagcagataatgacattggttctgcaaactgttgcacgacaggaacctgtgatgggatctgcatcgaactgcagctgtgttcttcagggggtgccttgcatcagattgaaaaaaagagctactttatagtgcctctcctttatttattgatatgtcactacttgtttttgtaactgcaatcaagatactgggacgctacccgcttgcctgtttagacatgttcacatcatgtgtagtgaggtgttttatttaacgagatgttaaatttgtgctcatgatattcatgtgctgttatcttc

SEQ ID NO: 2095 - protein, 248 aa, Zea mays subsp. mays
  peptide (1)..(248): Ceres Seq. ID no. 12374464
  misc_feature (24)..(244): Homolog of NCBI NO: 18412596 NR Description: putative protein
  misc_feature (24)..(244): Homolog of NCBI NO: 11281127 NR Description: hypothetical protein T20O10.160 - Arabidopsis
  misc_feature (21)..(247): Homolog of NCBI NO: 34908976 NR Description: putative circadian clock coupling factor ZGT
  misc_feature (21)..(243): Homolog of NCBI NO: 14210079 NR Description: circadian clock coupling factor ZGT [Nicotiana
  misc_feature (2)..(245): Homolog of NCBI NO: 15242296 NR Description: putative protein; protein id: At5g15440.1
  misc_feature (2)..(247): Homolog of NCBI NO: 15241717 NR Description: putative protein
  misc_feature (1)..(248): Homolog of NCBI NO: 34393587 NR Description: unknown protein [Oryza sativa (japonica
MVLVVKQHRCTHSASCVCIKGHLSEDALFLVFRHMNWNPRLIAILSCVCKWFDEVAKQVLWKEFCHARAPKMMLDLHSGGSHIVDGNWKALGKLLIYCNGCTKGGLFNNIHVPGHFVFRTRFSRTAGRSFLPLPCKSDVLYVSDPCEHLDQGEEGDIGFFRGIFMSFATSRVKKMLIEKRARFHPRELCPYCKAKLWNMFQENMIPRSASARLGAYDDSVEYFVCLNGHVIGLGTLLPLSDSEEAADE

SEQ ID NO: 2096 - protein, 214 aa, Zea mays subsp. mays
  peptide (1)..(214): Ceres Seq. ID no. 12374465
  misc_feature (1)..(210): Homolog of NCBI NO: 18412596 NR Description: putative protein
  misc_feature (1)..(210): Homolog of NCBI NO: 11281127 NR Description: hypothetical protein T20O10.160 - Arabidopsis
  misc_feature (1)..(213): Homolog of NCBI NO: 34908976 NR Description: putative circadian clock coupling factor ZGT
  misc_feature (1)..(209): Homolog of NCBI NO: 14210079 NR Description: circadian clock coupling factor ZGT [Nicotiana
  misc_feature (1)..(211): Homolog of NCBI NO: 15242296 NR Description: putative protein; protein id: At5g15440.1
  misc_feature (1)..(213): Homolog of NCBI NO: 15241717 NR Description: putative protein
  misc_feature (1)..(214): Homolog of NCBI NO: 34393587 NR Description: unknown protein [Oryza sativa (japonica
MNWNPRLIAILSCVCKWFDEVAKQVLWKEFCHARAPKMMLDLHSGGSHIVDGNWKALGKLLIYCNGCTKGGLFNNIHVPGHFVFRTRFSRTAGRSFLPLPCKSDVLYVSDPCEHLDQGEEGDIGFFRGIFMSFATSRVKKMLIEKRARFHPRELCPYCKAKLWNMFQENMIPRSASARLGAYDDSVEYFVCLNGHVIGLGTLLPLSDSEEAADE

SEQ ID NO: 2097 - protein, 177 aa, Zea mays subsp. mays
  peptide (1)..(177): Ceres Seq. ID no. 12374466
  misc_feature (1)..(173): Homolog of NCBI NO: 18412596 NR Description: putative protein
  misc_feature (1)..(173): Homolog of NCBI NO: 11281127 NR Description: hypothetical protein T20O10.160 - Arabidopsis
  misc_feature (1)..(176): Homolog of NCBI NO: 34908976 NR Description: putative circadian clock coupling factor ZGT
  misc_feature (1)..(172): Homolog of NCBI NO: 14210079 NR Description: circadian clock coupling factor ZGT [Nicotiana
  misc_feature (1)..(174): Homolog of NCBI NO: 15242296 NR Description: putative protein; protein id: At5g15440.1
  misc_feature (1)..(176): Homolog of NCBI NO: 15241717 NR Description: putative protein
  misc_feature (1)..(177): Homolog of NCBI NO: 34393587 NR Description: unknown protein [Oryza sativa (japonica
MMLDLHSGGSHIVDGNWKALGKLLIYCNGCTKGGLFNNIHVPGHFVFRTRFSRTAGRSFLPLPCKSDVLYVSDPCEHLDQGEEGDIGFFRGIFMSFATSRVKKMLIEKRARFHPRELCPYCKAKLWNMFQENMIPRSASARLGAYDDSVEYFVCLNGHVIGLGTLLPLSDSEEAADE

SEQ ID NO: 2098 - DNA, 1772 bp, Zea mays subsp. mays
  misc_feature (1)..(1772): Ceres Seq. ID no. 12355987
  misc_feature: MA Experiment ID: 108529 Result: Up-regulated in Transcription
  misc_feature: MA Experiment 108529 PARAMETER Experiment Name: Zm_Imbibed_Seeds_P Parameter: Age (day) Value: 5 vs. 2
  misc_feature: MA Experiment 108529 PARAMETER Experiment Name: Zm_Imbibed_Seeds_P Parameter: Organism Value: Zea mays
  misc_feature: MA Experiment 108529 PARAMETER Experiment Name: Zm_Imbibed_Seeds_P Parameter: Plant Line Value: 35A19
  misc_feature: MA Experiment 108529 PARAMETER Experiment Name: Zm_Imbibed_Seeds_P Parameter: Tissue Value: Roots vs. Embryo
  misc_feature: MA Experiment ID: 108535 Result: Down-regulated in Transcription
  misc_feature: MA Experiment 108535 PARAMETER Experiment Name: Zm_Meristem_P Parameter: Age (day) Value: 8
  misc_feature: MA Experiment 108535 PARAMETER Experiment Name: Zm_Meristem_P Parameter: Organism Value: Zea mays
  misc_feature: MA Experiment 108535 PARAMETER Experiment Name: Zm_Meristem_P Parameter: Plant Line Value: 35A19
  misc_feature: MA Experiment 108535 PARAMETER Experiment Name: Zm_Meristem_P Parameter: Tissue Value: Root Meristem vs. Above Root Meristem
  misc_feature: MA Experiment ID: 108536 Result: Up-regulated in Transcription
  misc_feature: MA Experiment 108536 PARAMETER Experiment Name: Zm_Meristem_P Parameter: Age (day) Value: 8
  misc_feature: MA Experiment 108536 PARAMETER Experiment Name: Zm_Meristem_P Parameter: Organism Value: Zea mays
  misc_feature: MA Experiment 108536 PARAMETER Experiment Name: Zm_Meristem_P Parameter: Plant Line Value: 35A19
  misc_feature: MA Experiment 108536 PARAMETER Experiment Name: Zm_Meristem_P Parameter: Tissue Value: Shoot Meristem vs. Above Shoot Meristem
  misc_feature: MA Experiment ID: 108547 Result: Up-regulated in Transcription
  misc_feature: MA Experiment 108547 PARAMETER Experiment Name: Zm_Imbibed_Seeds_P Parameter: Age (day) Value: 4 vs. 2
  misc_feature: MA Experiment 108547 PARAMETER Experiment Name: Zm_Imbibed_Seeds_P Parameter: Organism Value: Zea mays
  misc_feature: MA Experiment 108547 PARAMETER Experiment Name: Zm_Imbibed_Seeds_P Parameter: Plant Line Value: 35A19
  misc_feature: MA Experiment 108547 PARAMETER Experiment Name: Zm_Imbibed_Seeds_P Parameter: Tissue Value: Aerial vs. Embryo
  misc_feature: MA Experiment ID: 108687 Result: Down-regulated in Transcription
  misc_feature: MA Experiment 108687 PARAMETER Experiment Name: Zm_Embryos-Flowers__P Parameter: Tissue Value: Embryo vs. Aerial+
  misc_feature: MA Experiment ID: 20000535 Result: Down-regulated in Transcription
  misc_feature: MA Experiment 20000535 PARAMETER Experiment Name: Zm_Hybrid_Seed_Dev_P Parameter: DAP Value: 30 vs. 12
  misc_feature: MA Experiment 20000535 PARAMETER Experiment Name: Zm_Hybrid_Seed_Dev_P Parameter: Organism Value: Zea mays
  misc_feature: MA Experiment 20000535 PARAMETER Experiment Name: Zm_Hybrid_Seed_Dev_P Parameter: Plant Line Value: 35A19
  misc_feature: MA Experiment 20000535 PARAMETER Experiment Name: Zm_Hybrid_Seed_Dev_P Parameter: Tissue Value: Embryo vs. Unfert Floret
actagacttgttttttccgtccatcgtttcgtttgttccacctgcgcaactgcgacggggataagtacgtcttccagatgacgacggcggcatggccgcggccacgcttcctcgtcctcccccagcctggattcctccgctcggtctgccacggcctctgctcccgctgtctcttctgcttcctgctgctcctcgccttcgcctgcagctccagctccgggcgggtggtggtcactagcttgcctggcttcgacggcgacctccccttccacctcgaaacagggtacgtggaggtggaggaggacgccggcgtggagctcttctactacttcgtccaggccgagtccggcgccgccgccgccgccgatgacacccctttcctcttctggctcaccggcggcgaccgctgctccgtcttcagcggcctcgcctacgagatcggtcccatcagattcgtcctggaaccctacaacggcaccctgccgcgcctgcgatacaaccacaactcgtggtcaaaggtgtcacatatcctcttcgtcgattcaccggttggagctggattttccttctcgagagatcccaaaggctacgatgtcggagacatctcggcctcactgcagctacaggaattcctcatcaagtggttcagtgatcatcccgagtacctcgcgaatcctttctacattggcggggactcctatgtcggaaaaatcgtgccgttcctcgggcagatgatttcagaaggtattgaacttggaagaagacccttccctaacctcaagggctatctggtgggtaacccaatcacgggcgaaagtatagatttcacttccagagtgccctacgctcatggagtcggtatcatatcagatcaattgtatgagacgatattggggcattgccaaggagaggactacactagtcctgcaaacgctctgtgtgctcaggctctggacactttcaacaatctcatcaacgaagtccagaacgcccagatcttactggacacgtgcgtctacgcgtctcctgcgccaaacgttctcagcagaccggtggacggtggtagaaggatcctgagggcggcggggatgggaggaggggcgacgctgaaccatccgccagctcgtcctcggtttggctgcatcacctacggctactacctgtcgtatttctgggcgaacgatgaacgcactcgaacagctcttgggatcaagaagggaacagtggacgagtgggtgaggtgtcacgacgcagacctgccgtacacgatcgacctcaagagcgccatcaagtaccaccggaacctgacgtccagaggctaccgcgccctggtgtacagcggcgaccatgacctgctggtgccacacctgggcacccaggcatgggtcaggtccctcaacttccccgtcgtcgacgactggagggcgtggcatctcggtggccaagccgccgggttcacgataaattactcaaacaacatgacgtttgcgacgatcaaaggtggcgggcacacggcgccggagtacgagccggagaggtgtttcgccatgttcagccgctggatactcgaccgtccactctaatctccactcgtacattgccggattcttgcaccatgaccatgattgatggactgtgtggattgcagttcataggtggaataaaatggatgatttctgtgaatggataggtctgccaactaggcaactttgtgtaaattaactaggtctgtgtcagcgcgctttaacgtaatatatgcggggataaatcgt

SEQ ID NO: 2099 - protein, 501 aa, Zea mays subsp. mays
  peptide (1)..(501): Ceres Seq. ID no. 12355988
  misc_feature (56)..(496): Pfam Name: Serine carboxypeptidase Pfam Description: Serine carboxypeptidase
  misc_feature (355)..(501): Homolog of NCBI NO: 15228300 NR Description: putative glucose acyltransferase; protein id:
  misc_feature (36)..(317): Homolog of NCBI NO: 15228300 NR Description: putative glucose acyltransferase; protein id:
  misc_feature (342)..(501): Homolog of NCBI NO: 37530314 NR Description: putative serine carboxypeptidase
  misc_feature (30)..(271): Homolog of NCBI NO: 37530314 NR Description: putative serine carboxypeptidase
  misc_feature (35)..(501): Homolog of NCBI NO: 15418807 NR Description: sinapoylglucose:choline sinapoyltransferase
  misc_feature (35)..(501): Homolog of NCBI NO: 30682773 NR Description: serine carboxypeptidase -related [Arabidopsis
  misc_feature (32)..(211): Homolog of NCBI NO: 28273383 NR Description: putative serine carboxypeptidase
  misc_feature (235)..(496): Homolog of NCBI NO: 28273383 NR Description: putative serine carboxypeptidase
  misc_feature (31)..(282): Homolog of NCBI NO: 28273379 NR Description: putative serine carboxypeptidase I
  misc_feature (239)..(501): Homolog of NCBI NO: 28273379 NR Description: putative serine carboxypeptidase I
MTTAAWPRPRFLVLPQPGFLRSVCHGLCSRCLFCFLLLLAFACSSSSGRVVVTSLPGFDGDLPFHLETGYVEVEEDAGVELFYYFVQAESGAAAAADDTPFLFWLTGGDRCSVFSGLAYEIGPIRFVLEPYNGTLPRLRYNHNSWSKVSHILFVDSPVGAGFSFSRDPKGYDVGDISASLQLQEFLIKWFSDHPEYLANPFYIGGDSYVGKIVPFLGQMISEGIELGRRPFPNLKGYLVGNPITGESIDFTSRVPYAHGVGIISDQLYETILGHCQGEDYTSPANALCAQALDTFNNLINEVQNAQILLDTCVYASPAPNVLSRPVDGGRRILRAAGMGGGATLNHPPARPRFGCITYGYYLSYFWANDERTRTALGIKKGTVDEWVRCHDADLPYTIDLKSAIKYHRNLTSRGYRALVYSGDHDLLVPHLGTQAWVRSLNFPVVDDWRAWHLGGQAAGFTINYSNNMTFATIKGGGHTAPEYEPERCFAMFSRWILDRPL

SEQ ID NO: 2100 - protein, 283 aa, Zea mays subsp. mays
  peptide (1)..(283): Ceres Seq. ID no. 12355989
  misc_feature (1)..(278): Pfam Name: Serine carboxypeptidase Pfam Description: Serine carboxypeptidase
  misc_feature (1)..(278): Homolog of NCBI NO: 37361927 NR Description: 1-O-sinapoylglucose:choline sinapoyltransferase
  misc_feature (137)..(283): Homolog of NCBI NO: 15228300 NR Description: putative glucose acyltransferase; protein id:
  misc_feature (1)..(99): Homolog of NCBI NO: 15228300 NR Description: putative glucose acyltransferase; protein id:
  misc_feature (124)..(283): Homolog of NCBI NO: 37530314 NR Description: putative serine carboxypeptidase
  misc_feature (1)..(53): Homolog of NCBI NO: 37530314 NR Description: putative serine carboxypeptidase
  misc_feature (1)..(283): Homolog of NCBI NO: 15418807 NR Description: sinapoylglucose:choline sinapoyltransferase
  misc_feature (1)..(283): Homolog of NCBI NO: 30682773 NR Description: serine carboxypeptidase -related [Arabidopsis
  misc_feature (17)..(278): Homolog of NCBI NO: 28273383 NR Description: putative serine carboxypeptidase
  misc_feature (1)..(64): Homolog of NCBI NO: 28273379 NR Description: putative serine carboxypeptidase I
  misc_feature (21)..(283): Homolog of NCBI NO: 28273379 NR Description: putative serine carboxypeptidase I
MISEGIELGRRPFPNLKGYLVGNPITGESIDFTSRVPYAHGVGIISDQLYETILGHCQGEDYTSPANALCAQALDTFNNLINEVQNAQILLDTCVYASPAPNVLSRPVDGGRRILRAAGMGGGATLNHPPARPRFGCITYGYYLSYFWANDERTRTALGIKKGTVDEWVRCHDADLPYTIDLKSAIKYHRNLTSRGYRALVYSGDHDLLVPHLGTQAWVRSLNFPVVDDWRAWHLGGQAAGFTINYSNNMTFATIKGGGHTAPEYEPERCFAMFSRWILDRPL

SEQ ID NO: 2101 - DNA, 1201 bp, Zea mays subsp. mays
  misc_feature (1)..(1201): Ceres Seq. ID no. 13498951
  misc_feature: MA Experiment ID: 108527 Result: Up-regulated in Transcription
  misc_feature: MA Experiment 108527 PARAMETER Experiment Name: Zm_5mM_NO_P Parameter: Age (day) Value: 8
  misc_feature: MA Experiment 108527 PARAMETER Experiment Name: Zm_5mM_NO_P Parameter: Organism Value: Zea mays
  misc_feature: MA Experiment 108527 PARAMETER Experiment Name: Zm_5mM_NO_P Parameter: Plant Line Value: 35A19
  misc_feature: MA Experiment 108527 PARAMETER Experiment Name: Zm_5mM_NO_P Parameter: Timepoint (hr) Value: 6
  misc_feature: MA Experiment 108527 PARAMETER Experiment Name: Zm_5mM_NO_P Parameter: Tissue Value: Aerial
  misc_feature: MA Experiment 108527 PARAMETER Experiment Name: Zm_5mM_NO_P Parameter: Treatment Value: 5mM NO vs. No Treatment
  misc_feature: MA Experiment ID: 108528 Result: Up-regulated in Transcription
  misc_feature: MA Experiment 108528 PARAMETER Experiment Name: Zm_Imbibed_Seeds_P Parameter: Age (day) Value: 5 vs. 2
  misc_feature: MA Experiment 108528 PARAMETER Experiment Name: Zm_Imbibed_Seeds_P Parameter: Organism Value: Zea mays
  misc_feature: MA Experiment 108528 PARAMETER Experiment Name: Zm_Imbibed_Seeds_P Parameter: Plant Line Value: 35A19
  misc_feature: MA Experiment 108528 PARAMETER Experiment Name: Zm_Imbibed_Seeds_P Parameter: Tissue Value: Aerial vs. Embryo
  misc_feature: MA Experiment ID: 108529 Result: Up-regulated in Transcription
  misc_feature: MA Experiment 108529 PARAMETER Experiment Name: Zm_Imbibed_Seeds_P Parameter: Age (day) Value: 5 vs. 2
  misc_feature: MA Experiment 108529 PARAMETER Experiment Name: Zm_Imbibed_Seeds_P Parameter: Organism Value: Zea mays
  misc_feature: MA Experiment 108529 PARAMETER Experiment Name: Zm_Imbibed_Seeds_P Parameter: Plant Line Value: 35A19
  misc_feature: MA Experiment 108529 PARAMETER Experiment Name: Zm_Imbibed_Seeds_P Parameter: Tissue Value: Roots vs. Embryo
  misc_feature: MA Experiment ID: 108530 Result: Up-regulated in Transcription
  misc_feature: MA Experiment 108530 PARAMETER Experiment Name: Zm_Imbibed_Seeds_P Parameter: Age (day) Value: 6 vs. 2
  misc_feature: MA Experiment 108530 PARAMETER Experiment Name: Zm_Imbibed_Seeds_P Parameter: Organism Value: Zea mays
  misc_feature: MA Experiment 108530 PARAMETER Experiment Name: Zm_Imbibed_Seeds_P Parameter: Plant Line Value: 35A19
  misc_feature: MA Experiment 108530 PARAMETER Experiment Name: Zm_Imbibed_Seeds_P Parameter: Tissue Value: Aerial vs. Embryo
  misc_feature: MA Experiment ID: 108533 Result: Up-regulated in Transcription
  misc_feature: MA Experiment 108533 PARAMETER Experiment Name: Zm_4deg_Cold_P Parameter: Age (hr) Value: 8
  misc_feature: MA Experiment 108533 PARAMETER Experiment Name: Zm_4deg_Cold_P Parameter: Organism Value: Zea mays
  misc_feature: MA Experiment 108533 PARAMETER Experiment Name: Zm_4deg_Cold_P Parameter: Plant Line Value: 35A19
  misc_feature: MA Experiment 108533 PARAMETER Experiment Name: Zm_4deg_Cold_P Parameter: Temperature (deg C) Value: 4 vs. 22
  misc_feature: MA Experiment 108533 PARAMETER Experiment Name: Zm_4deg_Cold_P Parameter: Timepoint (hr) Value: 1
  misc_feature: MA Experiment 108533 PARAMETER Experiment Name: Zm_4deg_Cold_P Parameter: Tissue Value: Aerial
  misc_feature: MA Experiment ID: 108534 Result: Up-regulated in Transcription
  misc_feature: MA Experiment 108534 PARAMETER Experiment Name: Zm_4deg_Cold_P Parameter: Age (hr) Value: 8
  misc_feature: MA Experiment 108534 PARAMETER Experiment Name: Zm_4deg_Cold_P Parameter: Organism Value: Zea mays
  misc_feature: MA Experiment 108534 PARAMETER Experiment Name: Zm_4deg_Cold_P Parameter: Plant Line Value: 35A19
  misc_feature: MA Experiment 108534 PARAMETER Experiment Name: Zm_4deg_Cold_P Parameter: Temperature (deg C) Value: 4 vs. 22
  misc_feature: MA Experiment 108534 PARAMETER Experiment Name: Zm_4deg_Cold_P Parameter: Timepoint (hr) Value: 6
  misc_feature: MA Experiment 108534 PARAMETER Experiment Name: Zm_4deg_Cold_P Parameter: Tissue Value: Aerial
  misc_feature: MA Experiment ID: 108535 Result: Down-regulated in Transcription
  misc_feature: MA Experiment 108535 PARAMETER Experiment Name: Zm_Meristem_P Parameter: Age (day) Value: 8
  misc_feature: MA Experiment 108535 PARAMETER Experiment Name: Zm_Meristem_P Parameter: Organism Value: Zea mays
  misc_feature: MA Experiment 108535 PARAMETER Experiment Name: Zm_Meristem_P Parameter: Plant Line Value: 35A19
  misc_feature: MA Experiment 108535 PARAMETER Experiment Name: Zm_Meristem_P Parameter: Tissue Value: Root Meristem vs. Above Root Meristem
  misc_feature: MA Experiment ID: 108536 Result: Up-regulated in Transcription
  misc_feature: MA Experiment 108536 PARAMETER Experiment Name: Zm_Meristem_P Parameter: Age (day) Value: 8
  misc_feature: MA Experiment 108536 PARAMETER Experiment Name: Zm_Meristem_P Parameter: Organism Value: Zea mays
  misc_feature: MA Experiment 108536 PARAMETER Experiment Name: Zm_Meristem_P Parameter: Plant Line Value: 35A19
  misc_feature: MA Experiment 108536 PARAMETER Experiment Name: Zm_Meristem_P Parameter: Tissue Value: Shoot Meristem vs. Above Shoot Meristem
  misc_feature: MA Experiment ID: 108545 Result: Down-regulated in Transcription
  misc_feature: MA Experiment 108545 PARAMETER Experiment Name: Zm_Imbibed_Seeds_P Parameter: Age (day) Value: 3 vs. 2
  misc_feature: MA Experiment 108545 PARAMETER Experiment Name: Zm_Imbibed_Seeds_P Parameter: Organism Value: Zea mays
  misc_feature: MA Experiment 108545 PARAMETER Experiment Name: Zm_Imbibed_Seeds_P Parameter: Plant Line Value: 35A19
  misc_feature: MA Experiment 108545 PARAMETER Experiment Name: Zm_Imbibed_Seeds_P Parameter: Tissue Value: Aerial vs. Embryo
  misc_feature: MA Experiment ID: 108546 Result: Up-regulated in Transcription
  misc_feature: MA Experiment 108546 PARAMETER Experiment Name: Zm_Imbibed_Seeds_P Parameter: Age (day) Value: 3 vs. 2
  misc_feature: MA Experiment 108546 PARAMETER Experiment Name: Zm_Imbibed_Seeds_P Parameter: Organism Value: Zea mays
  misc_feature: MA Experiment 108546 PARAMETER Experiment Name: Zm_Imbibed_Seeds_P Parameter: Plant Line Value: 35A19
  misc_feature: MA Experiment 108546 PARAMETER Experiment Name: Zm_Imbibed_Seeds_P Parameter: Tissue Value: Roots vs. Embryo
  misc_feature: MA Experiment ID: 108547 Result: Up-regulated in Transcription
  misc_feature: MA Experiment 108547 PARAMETER Experiment Name: Zm_Imbibed_Seeds_P Parameter: Age (day) Value: 4 vs. 2
  misc_feature: MA Experiment 108547 PARAMETER Experiment Name: Zm_Imbibed_Seeds_P Parameter: Organism Value: Zea mays
  misc_feature: MA Experiment 108547 PARAMETER Experiment Name: Zm_Imbibed_Seeds_P Parameter: Plant Line Value: 35A19
  misc_feature: MA Experiment 108547 PARAMETER Experiment Name: Zm_Imbibed_Seeds_P Parameter: Tissue Value: Aerial vs. Embryo
  misc_feature: MA Experiment ID: 108687 Result: Down-regulated in Transcription
  misc_feature: MA Experiment 108687 PARAMETER Experiment Name: Zm_Embryos-Flowers__P Parameter: Tissue Value: Embryo vs. Aerial+
  misc_feature: MA Experiment ID: 108688 Result: Down-regulated in Transcription
  misc_feature: MA Experiment 108688 PARAMETER Experiment Name: Zm_Embryos-Flowers__P Parameter: Tissue Value: Immature Flowers vs. Aerial+
  misc_feature: MA Experiment ID: 20000108 Result: Down-regulated in Transcription
  misc_feature: MA Experiment 20000108 PARAMETER Experiment Name: Zm_Root-Tips_P Parameter: Age (day) Value: 12
  misc_feature: MA Experiment 20000108 PARAMETER Experiment Name: Zm_Root-Tips_P Parameter: Organism Value: Zea mays
  misc_feature: MA Experiment 20000108 PARAMETER Experiment Name: Zm_Root-Tips_P Parameter: Tissue Value: Root tips vs. Root mid region    35
  misc_feature: MA Experiment 20000108 PARAMETER Experiment Name: Zm_Root-Tips_P Parameter: Tissue Value: Root tips vs. Root mid region   Sequence Listing-Misc Features (4)
  misc_feature: MA Experiment ID: 20000535 Result: Down-regulated in Transcription
  misc_feature: MA Experiment 20000535 PARAMETER Experiment Name: Zm_Hybrid_Seed_Dev_P Parameter: DAP Value: 30 vs. 12
  misc_feature: MA Experiment 20000535 PARAMETER Experiment Name: Zm_Hybrid_Seed_Dev_P Parameter: Organism Value: Zea mays
  misc_feature: MA Experiment 20000535 PARAMETER Experiment Name: Zm_Hybrid_Seed_Dev_P Parameter: Plant Line Value: 35A19
  misc_feature: MA Experiment 20000535 PARAMETER Experiment Name: Zm_Hybrid_Seed_Dev_P Parameter: Tissue Value: Embryo vs. Unfert Floret
aaatcaacccaacacggcgtccccgtcccgagtcaccaccgacccaagcaaaaccgcacgcaccctgccagcggccccccaactcccaacccaacccctactccggctagctcgcggcggcggcccagcggccatggccttccggctgagcaacaacctgatcggggtcctaaacttcgtcaccttcctgctctccgtcccgatcctgggcgcgggcatctggctgggccaccgcgccgacggcaccgagtgcgagcgctacctctcggcgcccgtcatcgcgctgggggccttcctcctcgccgtctccctggcgggcctcgtcggcgcctgctgccgcgtcacctggctgctctgggcctacctcctcgccatgttcgtcctcatcctcgtcctcttctgcttcaccgtcttcgccttcgtcgtcaccaacaggggcgccggcgaggccgtctccggccgcggatacaaggagtaccgcctcggggactactccaactggctgcagaagcgcgtcgagaacaccaggaactgggaccggatcaggagctgcctccaggactccaaggtctgcaagagcctgcaggacaagaacgagaccgtcgcccagttcatgagttccagcctctcccccatcgagtctggctgctgcaagccccccaccagctgcggctacacctacgtcggcggcacggactggacgccggtgaccaccaactcgacggacccggactgcaagacctggagcaacgacgcctcggcgctctgctacaactgccagtcgtgcaaggccggcgtggtggccacgttccagcggaactggaagcgcgtcgccgtcgtctgcatcgtcttcctcgtcttcatcatcatcgtctactccgtcggctgctgcgccttcaggaacaaccgcagagacaacgcctaccgcggcgggtggaagggcgggtacgcttgatccaccatcgcgtcgtttaggagcggagccatgcacgcgcgctcggtgctctgctctgctccctgcccgccgctgtcgtcgtacgtacatgtttagtaggctcgttgtagctctgtacaggtgatggagatcgttgttgcggattcttatcgtcttcctggttacatacttacattattgttatgatctgatcagcggtaggttttgtatacgctgctcattgattcgtctgcctgctattttcgt

SEQ ID NO: 2102 - protein, 324 aa, Zea mays subsp. mays
  peptide (1)..(324): Ceres Seq. ID no. 13498952
KSTQHGVPVPSHHRPKQNRTHPASGPPTPNPTPTPASSRRRPSGHGLPAEQQPDRGPKLRHLPALRPDPGRGHLAGPPRRRHRVRALPLGARHRAGGLPPRRLPGGPRRRLLPRHLAALGLPPRHVRPHPRPLLLHRLRLRRHQQGRRRGRLRPRIQGVPPRGLLQLAAEARREHQELGPDQELPPGLQGLQEPAGQERDRRPVHEFQPLPHRVWLLQAPHQLRLHLRRRHGLDAGDHQLDGPGLQDLEQRRLGALLQLPVVQGRRGGHVPAELEARRRRLHRLPRLHHHRLLRRLLRLQEQPQRQRLPRRVEGRVRLIHHRVV

SEQ ID NO: 2103 - protein, 317 aa, Zea mays subsp. mays
  peptide (1)..(317): Ceres Seq. ID no. 13498953
  misc_feature (50)..(288): Pfam Name: Tetraspanin family Pfam Description: Tetraspanin family
  misc_feature (49)..(316): Homolog of NCBI NO: 15237490 NR Description: senescence-associated protein, putative
  misc_feature (49)..(316): Homolog of NCBI NO: 17979386 NR Description: putative senescence-associated protein 5
  misc_feature (48)..(306): Homolog of NCBI NO: 15231187 NR Description: senescence-associated protein family [Arabidopsis
  misc_feature (48)..(304): Homolog of NCBI NO: 15238641 NR Description: senescence-associated protein family [Arabidopsis
  misc_feature (48)..(316): Homolog of NCBI NO: 21537169 NR Description: senescence-associated protein-like protein
  misc_feature (48)..(316): Homolog of NCBI NO: 15234743 NR Description: senescence-associated protein family [Arabidopsis
  misc_feature (50)..(304): Homolog of NCBI NO: 15234374 NR Description: senescence-associated protein, putative
  misc_feature (48)..(308): Homolog of NCBI NO: 20197174 NR Description: hypothetical protein [Arabidopsis thaliana]
  misc_feature (47)..(314): Homolog of NCBI NO: 3551954 NR Description: senescence-associated protein 5 [Hemerocallis
  misc_feature (45)..(317): Homolog of NCBI NO: 29367553 NR Description: senescence-associated protein-like protein
NQPNTASPSRVTTDPSKTARTLPAAPQLPTQPLLRLARGGGPAAMAFRLSNNLIGVLNFVTFLLSVPILGAGIWLGHRADGTECERYLSAPVIALGAFLLAVSLAGLVGACCRVTWLLWAYLLAMFVLILVLFCFTVFAFVVTNRGAGEAVSGRGYKEYRLGDYSNWLQKRVENTRNWDRIRSCLQDSKVCKSLQDKNETVAQFMSSSLSPIESGCCKPPTSCGYTYVGGTDWTPVTTNSTDPDCKTWSNDASALCYNCQSCKAGVVATFQRNWKRVAVVCIVFLVFIIIVYSVGCCAFRNNRRDNAYRGGWKGGYA

SEQ ID NO: 2104 - protein, 273 aa, Zea mays subsp. mays
  peptide (1)..(273): Ceres Seq. ID no. 13498954
  misc_feature (6)..(244): Pfam Name: Tetraspanin family Pfam Description: Tetraspanin family
  misc_feature (5)..(272): Homolog of NCBI NO: 15237490 NR Description: senescence-associated protein, putative
  misc_feature (5)..(272): Homolog of NCBI NO: 17979386 NR Description: putative senescence-associated protein 5
  misc_feature (4)..(262): Homolog of NCBI NO: 15231187 NR Description: senescence-associated protein family [Arabidopsis
  misc_feature (4)..(260): Homolog of NCBI NO: 15238641 NR Description: senescence-associated protein family [Arabidopsis
  misc_feature (4)..(272): Homolog of NCBI NO: 21537169 NR Description: senescence-associated protein-like protein
  misc_feature (4)..(272): Homolog of NCBI NO: 15234743 NR Description: senescence-associated protein family [Arabidopsis
  misc_feature (6)..(260): Homolog of NCBI NO: 15234374 NR Description: senescence-associated protein, putative
  misc_feature (4)..(264): Homolog of NCBI NO: 20197174 NR Description: hypothetical protein [Arabidopsis thaliana]
  misc_feature (3)..(270): Homolog of NCBI NO: 3551954 NR Description: senescence-associated protein 5 [Hemerocallis
  misc_feature (1)..(273): Homolog of NCBI NO: 29367553 NR Description: senescence-associated protein-like protein
MAFRLSNNLIGVLNFVTFLLSVPILGAGIWLGHRADGTECERYLSAPVIALGAFLLAVSLAGLVGACCRVTWLLWAYLLAMFVLILVLFCFTVFAFVVTNRGAGEAVSGRGYKEYRLGDYSNWLQKRVENTRNWDRIRSCLQDSKVCKSLQDKNETVAQFMSSSLSPIESGCCKPPTSCGYTYVGGTDWTPVTTNSTDPDCKTWSNDASALCYNCQSCKAGVVATFQRNWKRVAVVCIVFLVFIIIVYSVGCCAFRNNRRDNAYRGGWKGGYA

SEQ ID NO: 2105 - DNA, 1780 bp, Zea mays subsp. mays
  misc_feature (1)..(1780): Ceres Seq. ID no. 12367347
  misc_feature: MA Experiment ID: 108543 Result: Down-regulated in Transcription
ataaataggccagcatttgcaatccaactttagctgccatctgtttctgaaccatggatccatttgttctctccatcctcttatgctcatcgatctttgttgtagtgtactggagaaggctgaacagcatgaggctaagacttccaccgggacctccaacatggccaattttcggcaatcttctccagttgagccctcttccccacaaagactttgcccaattttgcaccaaatatggccctctcgtctatcttcgcctgggaaccatcgatgccatcaccactgatgaccccgaagtgatccgtgaaatactcatccggcaagatgaggtctttgcttcgcggcctcggacactggctgccgtccatctcgcctatgggtgtggtgatgtggctctagctccactgggacccaactggaaaaggatgaggagagtttgcatggagcacttgctgacgaccaggcggctcgagtctttcgctgctcaccgagctcaggaggccgagcacctctgccagtttgtgtgggctaaatctcagtccgggaagcccgtgaacctcagagaggttctcggtgccttctcgatgaacaacgtcacgcggatgctgctggggaagcagtactttgggatccagtcggcaggccccggcgaggcaatggagttcatgcacatcacccacgagctgttcttcctgctgggcctgatctatctcggggactacttgccggcttggaggtgggtcgacccgtacgggtgtgagaagaggatgagggaggtggagaagaaggtggacgacttccaccagaagatcattgatgagcacaggagagctagggaggccaggaagagtcgttcctccgttgaggaagatggcggcaacggcaaagatgagatggacttcgtcgatgtgctgttatctttgcctggtgagaacgggaaggagcacatggacgacatggagatcaaagcgttgatgcaggacatgatcgctgctgctactgatacttcatcggtgacgaacgagtgggtgatggcggaggtaatcaagaacccgcgcgtgctccggcgcgtccaggaggagctggacgcggtggtggggcgcgaccggatggtggcggagtcggacctggcccacctcccctacctccggtgcgtggtgcgcgagtcattccggatgcacccggcggggccgttccttatcccgcacgagtcgctgaaggcgacgaccatcatggggtaccacgtgccggcgcgcacgcgcgtgttcatcaacacgcacgcgctggggcggaacccgcgcgtgtgggactcccgtgggcgagttccggccggagcggcacctgccggcggaggagggggcgcgggtggagatcagccacctgccggacttcaagatcctgccgttcagcgccgggaagcgcaagtgccccggcgcgccgctgggcgtggcgctggtgctcatggcgctcgccaggctcttccactgcttcgactggtccccgcccgacggcctccgccccgaggacgtggacacccgggaggtgtacggcatgaccatgcccaaggccacgcccctcgtcgccgtcgccactccgcgcctgccgccgcacttgtacggcggcggcggcggcagctcggctccttagttcgatgacactttgacgcacgtgcgctgcactgccagtctcattagtcattatacgcatgatgtacttccctccatatacaatacaccgcataaaccaaacgatgaatgaaatgtagtcgttctatggtttc

SEQ ID NO: 2106 - protein, 533 aa, Zea mays subsp. mays
  peptide (1)..(533): Ceres Seq. ID no. 12367348
  misc_feature (5)..(432): Homolog of NCBI NO: 12231882 NR Description: flavonoid 3',5'-hydroxylase [Callistephus
  misc_feature (5)..(419): Homolog of NCBI NO: 15223365 NR Description: cytochrome p450 family; protein id: At1g01280.1
  misc_feature (3)..(420): Homolog of NCBI NO: 11249497 NR Description: cytochrome P450 CYP703A1 - garden petunia
  misc_feature (1)..(419): Homolog of NCBI NO: 18481718 NR Description: cytochrome P450 protein [Sorghum bicolor]
MDPFVLSILLCSSIFVVVYWRRLNSMRLRLPPGPPTWPIFGNLLQLSPLPHKDFAQFCTKYGPLVYLRLGTIDAITTDDPEVIREILIRQDEVFASRPRTLAAVHLAYGCGDVALAPLGPNWKRMRRVCMEHLLTTRRLESFAAHRAQEAEHLCQFVWAKSQSGKPVNLREVLGAFSMNNVTRMLLGKQYFGIQSAGPGEAMEFMHITHELFFLLGLIYLGDYLPAWRWVDPYGCEKRMREVEKKVDDFHQKIIDEHRRAREARKSRSSVEEDGGNGKDEMDFVDVLLSLPGENGKEHMDDMEIKALMQDMIAAATDTSSVTNEWVMAEVIKNPRVLRRVQEELDAVVGRDRMVAESDLAHLPYLRCVVRESFRMHPAGPFLIPHESLKATTIMGYHVPARTRVFINTHALGRNPRVWDSRGRVPAGAAPAGGGGGAGGDQPPAGLQDPAVQRREAQVPRRAAGRGAGAHGARQALPLLRLVPARRPPPRGRGHPGGVRHDHAQGHAPRRRRHSAPAAALVRRRRRQLGSLVR

SEQ ID NO: 2107 - protein, 508 aa, Zea mays subsp. mays
  peptide (1)..(508): Ceres Seq. ID no. 12367349
  misc_feature (1)..(407): Homolog of NCBI NO: 12231882 NR Description: flavonoid 3',5'-hydroxylase [Callistephus
  misc_feature (1)..(394): Homolog of NCBI NO: 15223365 NR Description: cytochrome p450 family; protein id: At1g01280.1
  misc_feature (1)..(395): Homolog of NCBI NO: 11249497 NR Description: cytochrome P450 CYP703A1 - garden petunia
  misc_feature (1)..(394): Homolog of NCBI NO: 18481718 NR Description: cytochrome P450 protein [Sorghum bicolor]
MRLRLPPGPPTWPIFGNLLQLSPLPHKDFAQFCTKYGPLVYLRLGTIDAITTDDPEVIREILIRQDEVFASRPRTLAAVHLAYGCGDVALAPLGPNWKRMRRVCMEHLLTTRRLESFAAHRAQEAEHLCQFVWAKSQSGKPVNLREVLGAFSMNNVTRMLLGKQYFGIQSAGPGEAMEFMHITHELFFLLGLIYLGDYLPAWRWVDPYGCEKRMREVEKKVDDFHQKIIDEHRRAREARKSRSSVEEDGGNGKDEMDFVDVLLSLPGENGKEHMDDMEIKALMQDMIAAATDTSSVTNEWVMAEVIKNPRVLRRVQEELDAVVGRDRMVAESDLAHLPYLRCVVRESFRMHPAGPFLIPHESLKATTIMGYHVPARTRVFINTHALGRNPRVWDSRGRVPAGAAPAGGGGGAGGDQPPAGLQDPAVQRREAQVPRRAAGRGAGAHGARQALPLLRLVPARRPPPRGRGHPGGVRHDHAQGHAPRRRRHSAPAAALVRRRRRQLGSLVR

SEQ ID NO: 2108 - protein, 409 aa, Zea mays subsp. mays
  peptide (1)..(409): Ceres Seq. ID no. 12367350
  misc_feature (1)..(295): Homolog of NCBI NO: 18481718 NR Description: cytochrome P450 protein [Sorghum bicolor]
  misc_feature (1)..(308): Homolog of NCBI NO: 12231882 NR Description: flavonoid 3',5'-hydroxylase [Callistephus
  misc_feature (1)..(295): Homolog of NCBI NO: 15223365 NR Description: cytochrome p450 family; protein id: At1g01280.1
  misc_feature (1)..(296): Homolog of NCBI NO: 11249497 NR Description: cytochrome P450 CYP703A1 - garden petunia
MRRVCMEHLLTTRRLESFAAHRAQEAEHLCQFVWAKSQSGKPVNLREVLGAFSMNNVTRMLLGKQYFGIQSAGPGEAMEFMHITHELFFLLGLIYLGDYLPAWRWVDPYGCEKRMREVEKKVDDFHQKIIDEHRRAREARKSRSSVEEDGGNGKDEMDFVDVLLSLPGENGKEHMDDMEIKALMQDMIAAATDTSSVTNEWVMAEVIKNPRVLRRVQEELDAVVGRDRMVAESDLAHLPYLRCVVRESFRMHPAGPFLIPHESLKATTIMGYHVPARTRVFINTHALGRNPRVWDSRGRVPAGAAPAGGGGGAGGDQPPAGLQDPAVQRREAQVPRRAAGRGAGAHGARQALPLLRLVPARRPPPRGRGHPGGVRHDHAQGHAPRRRRHSAPAAALVRRRRRQLGSLVR

SEQ ID NO: 2109 - DNA, 1081 bp, Zea mays subsp. mays
  misc_feature (1)..(1081): Ceres Seq. ID no. 12373916
  misc_feature: MA Experiment ID: 108535 Result: Up-regulated in Transcription
  misc_feature: MA Experiment 108535 PARAMETER Experiment Name: Zm_Meristem_P Parameter: Age (day) Value: 8
  misc_feature: MA Experiment 108535 PARAMETER Experiment Name: Zm_Meristem_P Parameter: Organism Value: Zea mays
  misc_feature: MA Experiment 108535 PARAMETER Experiment Name: Zm_Meristem_P Parameter: Plant Line Value: 35A19
  misc_feature: MA Experiment 108535 PARAMETER Experiment Name: Zm_Meristem_P Parameter: Tissue Value: Root Meristem vs. Above Root Meristem
aaaccgcgtcaccccctcccccaatcgtctcgctcgcaagtcgcatcgcacgtacggtctcaggcgcatcggcctcgccgctgcacaacgccggagacgagacgacggcggctgcgggatgacggtcttccacttcctcaactgcgccttcctcaccttcggccctcacgtcgtctactactccgccacgcccctgtcagagtatgatacaatcggcacttctataaaagcagctgctgtttatcttggaactgcgcttgtaaagcttgtttgcttggcaacattgctcaaagtacctgagaatgatagctttgacccctatcaggagttaatgaaagtttttattggattcatagatgtagctggactgtattttgctttgacccagctgacccacagaaacatctctcagaatcataagttccaggctgttggtcttggttgggcttttgctgattcagttttgcaccgactggcacctctctggattggggcaagagggcttgaatttacatgggagtacatatttcaaggacttgaagcgaatgctaatcttgtgatgaccctctcccttgctgcattggggtccttgatgtggcttaggaagaacaagcctaggactttggttccaataatttatgcatgtgctctgctcttggcaacaatgccatctatcaccagctacttgaggaggtcattggagtggcagacaccaaaggtggttggcttcgagctcttctcctcccttgttatggctttcatcagctggcagctgttctcggcttgtcagagaccgatgtaacaagacatccataccactgccaattttacgtgcaatttgaagctcctgcagatgctcctgagtacgtcagaagaattaggaagatcctttgaactttgagctacaactcttcttcttggcgttcggttacagaacattttacttagaacatctgttgtaacttgtgagctgtagagcagaaacacatgcctgaaatgagttattctataacagatgctcatgtaggcgtttgatctgaaacatttgtttattattattgcggtgtgcatttcagatgct

SEQ ID NO: 2110 - protein, 266 aa, Zea mays subsp. mays
  peptide (1)..(266): Ceres Seq. ID no. 12373917
  misc_feature (40)..(186): Homolog of NCBI NO: 21312420 NR Description: RIKEN cDNA 2010004E11 [Mus musculus]
  misc_feature (40)..(186): Homolog of NCBI NO: 14249166 NR Description: seven transmembrane domain protein [Homo sapiens]
  misc_feature (40)..(186): Homolog of NCBI NO: 12841501 NR Description: unnamed protein product [Mus musculus]
  misc_feature (40)..(185): Homolog of NCBI NO: 3550427 NR Description: seven transmembrane domain protein [Homo sapiens]
  misc_feature (40)..(212): Homolog of NCBI NO: 7511137 NR Description: hypothetical protein ZK418.5 - Caenorhabditis
  misc_feature (40)..(261): Homolog of NCBI NO: 39593965 NR Description: Hypothetical protein CBG16516 [Caenorhabditis
  misc_feature (40)..(261): Homolog of NCBI NO: 17556931 NR Description: Seven transmembrane domain protein like (25.0 kD)
  misc_feature (209)..(265): Homolog of NCBI NO: 15220273 NR Description: cytochrome P450, putative; protein id:
  misc_feature (148)..(211): Homolog of NCBI NO: 15220273 NR Description: cytochrome P450, putative; protein id:
  misc_feature (40)..(265): Homolog of NCBI NO: 18401831 NR Description: expressed protein
NRVTPSPNRLARKSHRTYGLRRIGLAAAQRRRRDDGGCGMTVFHFLNCAFLTFGPHVVYYSATPLSEYDTIGTSIKAAAVYLGTALVKLVCLATLLKVPENDSFDPYQELMKVFIGFIDVAGLYFALTQLTHRNISQNHKFQAVGLGWAFADSVLHRLAPLWIGARGLEFTWEYIFQGLEANANLVMTLSLAALGSLMWLRKNKPRTLVPIIYACALLLATMPSITSYLRRSLEWQTPKVVGFELFSSLVMAFISWQLFSACQRPM

SEQ ID NO: 2111 - protein, 227 aa, Zea mays subsp. mays
  peptide (1)..(227): Ceres Seq. ID no. 12373918
  misc_feature (1)..(147): Homolog of NCBI NO: 21312420 NR Description: RIKEN cDNA 2010004E11 [Mus musculus]
  misc_feature (1)..(147): Homolog of NCBI NO: 27731097 NR Description: similar to seven transmembrane domain protein
  misc_feature (1)..(147): Homolog of NCBI NO: 12841501 NR Description: unnamed protein product [Mus musculus]
  misc_feature (1)..(146): Homolog of NCBI NO: 3550427 NR Description: seven transmembrane domain protein [Homo sapiens]
  misc_feature (1)..(173): Homolog of NCBI NO: 7511137 NR Description: hypothetical protein ZK418.5 - Caenorhabditis
  misc_feature (1)..(222): Homolog of NCBI NO: 39593965 NR Description: Hypothetical protein CBG16516 [Caenorhabditis
  misc_feature (1)..(222): Homolog of NCBI NO: 17556931 NR Description: Seven transmembrane domain protein like (25.0 kD)
  misc_feature (170)..(226): Homolog of NCBI NO: 15220273 NR Description: cytochrome P450, putative; protein id:
  misc_feature (109)..(172): Homolog of NCBI NO: 15220273 NR Description: cytochrome P450, putative; protein id:
  misc_feature (1)..(226): Homolog of NCBI NO: 18401831 NR Description: expressed protein
MTVFHFLNCAFLTFGPHVVYYSATPLSEYDTIGTSIKAAAVYLGTALVKLVCLATLLKVPENDSFDPYQELMKVFIGFIDVAGLYFALTQLTHRNISQNHKFQAVGLGWAFADSVLHRLAPLWIGARGLEFTWEYIFQGLEANANLVMTLSLAALGSLMWLRKNKPRTLVPIIYACALLLATMPSITSYLRRSLEWQTPKVVGFELFSSLVMAFISWQLFSACQRPM

SEQ ID NO: 2112 - protein, 156 aa, Zea mays subsp. mays
  peptide (1)..(156): Ceres Seq. ID no. 12373919
  misc_feature (1)..(76): Homolog of NCBI NO: 27731097 NR Description: similar to seven transmembrane domain protein
  misc_feature (1)..(76): Homolog of NCBI NO: 21312420 NR Description: RIKEN cDNA 2010004E11 [Mus musculus]
  misc_feature (1)..(76): Homolog of NCBI NO: 12841501 NR Description: unnamed protein product [Mus musculus]
  misc_feature (1)..(75): Homolog of NCBI NO: 3550427 NR Description: seven transmembrane domain protein [Homo sapiens]
  misc_feature (1)..(102): Homolog of NCBI NO: 7511137 NR Description: hypothetical protein ZK418.5 - Caenorhabditis
  misc_feature (1)..(151): Homolog of NCBI NO: 39593965 NR Description: Hypothetical protein CBG16516 [Caenorhabditis
  misc_feature (1)..(151): Homolog of NCBI NO: 17556931 NR Description: Seven transmembrane domain protein like (25.0 kD)
  misc_feature (99)..(155): Homolog of NCBI NO: 15220273 NR Description: cytochrome P450, putative; protein id:
  misc_feature (38)..(101): Homolog of NCBI NO: 15220273 NR Description: cytochrome P450, putative; protein id:
  misc_feature (1)..(155): Homolog of NCBI NO: 18401831 NR Description: expressed protein
MKVFIGFIDVAGLYFALTQLTHRNISQNHKFQAVGLGWAFADSVLHRLAPLWIGARGLEFTWEYIFQGLEANANLVMTLSLAALGSLMWLRKNKPRTLVPIIYACALLLATMPSITSYLRRSLEWQTPKVVGFELFSSLVMAFISWQLFSACQRPM

SEQ ID NO: 2113 - DNA, 1137 bp, Zea mays subsp. mays
  misc_feature (1)..(1137): Ceres Seq. ID no. 12359692
  misc_feature: MA Experiment ID: 108547 Result: Up-regulated in Transcription
  misc_feature: MA Experiment 108547 PARAMETER Experiment Name: Zm_Imbibed_Seeds_P Parameter: Age (day) Value: 4 vs. 2
  misc_feature: MA Experiment 108547 PARAMETER Experiment Name: Zm_Imbibed_Seeds_P Parameter: Organism Value: Zea mays
  misc_feature: MA Experiment 108547 PARAMETER Experiment Name: Zm_Imbibed_Seeds_P Parameter: Plant Line Value: 35A19
  misc_feature: MA Experiment 108547 PARAMETER Experiment Name: Zm_Imbibed_Seeds_P Parameter: Tissue Value: Aerial vs. Embryo
  misc_feature: MA Experiment ID: 108548 Result: Up-regulated in Transcription
  misc_feature: MA Experiment 108548 PARAMETER Experiment Name: Zm_20uM_KNO3_H-to-L_P Parameter: Age (day) Value: 11
  misc_feature: MA Experiment 108548 PARAMETER Experiment Name: Zm_20uM_KNO3_H-to-L_P Parameter: Organism Value: Zea mays
  misc_feature: MA Experiment 108548 PARAMETER Experiment Name: Zm_20uM_KNO3_H-to-L_P Parameter: Plant Line Value: 35A19
  misc_feature: MA Experiment 108548 PARAMETER Experiment Name: Zm_20uM_KNO3_H-to-L_P Parameter: Timepoint (hr) Value: 4
  misc_feature: MA Experiment 108548 PARAMETER Experiment Name: Zm_20uM_KNO3_H-to-L_P Parameter: Tissue Value: Roots
  misc_feature: MA Experiment 108548 PARAMETER Experiment Name: Zm_20uM_KNO3_H-to-L_P Parameter: Treatment Value: 20uM KNO3 vs. 60mM KNO3
  misc_feature: MA Experiment ID: 108556 Result: Down-regulated in Transcription
  misc_feature: MA Experiment 108556 PARAMETER Experiment Name: Zm_Drought_P Parameter: Age (day) Value: 9
  misc_feature: MA Experiment 108556 PARAMETER Experiment Name: Zm_Drought_P Parameter: Organism Value: Zea mays
  misc_feature: MA Experiment 108556 PARAMETER Experiment Name: Zm_Drought_P Parameter: Plant Line Value: 35A19
  misc_feature: MA Experiment 108556 PARAMETER Experiment Name: Zm_Drought_P Parameter: Timepoint (hr) Value: 24
  misc_feature: MA Experiment 108556 PARAMETER Experiment Name: Zm_Drought_P Parameter: Tissue Value: Aerial
  misc_feature: MA Experiment 108556 PARAMETER Experiment Name: Zm_Drought_P Parameter: Treatment Value: Drought vs. No Drought
  misc_feature: MA Experiment ID: 108597 Result: Down-regulated in Transcription
  misc_feature: MA Experiment 108597 PARAMETER Experiment Name: Zm_100uM_ABA_P Parameter: Age (day) Value: 9
  misc_feature: MA Experiment 108597 PARAMETER Experiment Name: Zm_100uM_ABA_P Parameter: Organism Value: Zea mays
  misc_feature: MA Experiment 108597 PARAMETER Experiment Name: Zm_100uM_ABA_P Parameter: Plant Line Value: 35A19
  misc_feature: MA Experiment 108597 PARAMETER Experiment Name: Zm_100uM_ABA_P Parameter: Timepoint (hr) Value: 24
  misc_feature: MA Experiment 108597 PARAMETER Experiment Name: Zm_100uM_ABA_P Parameter: Tissue Value: Aerial
  misc_feature: MA Experiment 108597 PARAMETER Experiment Name: Zm_100uM_ABA_P Parameter: Treatment Value: 100uM ABA vs. No Treatment
  misc_feature: MA Experiment ID: 108687 Result: Down-regulated in Transcription
  misc_feature: MA Experiment 108687 PARAMETER Experiment Name: Zm_Embryos-Flowers__P Parameter: Tissue Value: Embryo vs. Aerial+
  misc_feature: MA Experiment ID: 20000477 Result: Down-regulated in Transcription
  misc_feature: MA Experiment 20000477 PARAMETER Experiment Name: Zm_5mM_SA_P Parameter: Age (day) Value: 10
  misc_feature: MA Experiment 20000477 PARAMETER Experiment Name: Zm_5mM_SA_P Parameter: Organism Value: Zea mays
  misc_feature: MA Experiment 20000477 PARAMETER Experiment Name: Zm_5mM_SA_P Parameter: Plant Line Value: 35A19
  misc_feature: MA Experiment 20000477 PARAMETER Experiment Name: Zm_5mM_SA_P Parameter: Timepoint (hr) Value: 48
  misc_feature: MA Experiment 20000477 PARAMETER Experiment Name: Zm_5mM_SA_P Parameter: Tissue Value: Aerial
  misc_feature: MA Experiment 20000477 PARAMETER Experiment Name: Zm_5mM_SA_P Parameter: Treatment Value: 5mM SA vs. No Treatment
  misc_feature: MA Experiment ID: 20000478 Result: Down-regulated in Transcription
  misc_feature: MA Experiment 20000478 PARAMETER Experiment Name: Zm_5mM_SA_P Parameter: Age (day) Value: 11
  misc_feature: MA Experiment 20000478 PARAMETER Experiment Name: Zm_5mM_SA_P Parameter: Organism Value: Zea mays
  misc_feature: MA Experiment 20000478 PARAMETER Experiment Name: Zm_5mM_SA_P Parameter: Plant Line Value: 35A19
  misc_feature: MA Experiment 20000478 PARAMETER Experiment Name: Zm_5mM_SA_P Parameter: Timepoint (hr) Value: 72
  misc_feature: MA Experiment 20000478 PARAMETER Experiment Name: Zm_5mM_SA_P Parameter: Tissue Value: Aerial
  misc_feature: MA Experiment 20000478 PARAMETER Experiment Name: Zm_5mM_SA_P Parameter: Treatment Value: 5mM SA vs. No Treatment
  misc_feature: MA Experiment ID: 20000480 Result: Down-regulated in Transcription
  misc_feature: MA Experiment 20000480 PARAMETER Experiment Name: Zm_Drought_P Parameter: Age (day) Value: 11
  misc_feature: MA Experiment 20000480 PARAMETER Experiment Name: Zm_Drought_P Parameter: Organism Value: Zea mays
  misc_feature: MA Experiment 20000480 PARAMETER Experiment Name: Zm_Drought_P Parameter: Plant Line Value: 35A19
  misc_feature: MA Experiment 20000480 PARAMETER Experiment Name: Zm_Drought_P Parameter: Timepoint (hr) Value: 72
  misc_feature: MA Experiment 20000480 PARAMETER Experiment Name: Zm_Drought_P Parameter: Tissue Value: Aerial
  misc_feature: MA Experiment 20000480 PARAMETER Experiment Name: Zm_Drought_P Parameter: Treatment Value: Drought vs. No Drought
acccagcaccgcagagctctcatctcctctctctctctctctctctctctctctcgcgctcgctttgcttcctcgtcgaggtccagttcctgcattgatggcgaccgaggtggctgagactcccgcgccgttggcggaggcggtccccgagacccccgcggaggcaccggcggcgcccgccgccgaggcgaattctaccaaggccaagaaggcctctgcgcccaagaagcgtgccaacccgacccacccgccgtacgccgagatgatctcggaggctgtcacgtcgctcaaggagcggacggggtccagccagtacgcgatcgccaagttcgtcgaggacaagcacaaggacaagctcccgcccaacttccgcaagctcctgctcggccagctcaagaagctcgtcgccgccggcaagctcaccaaggtgaagaactcctacaagctgcccgcacgcgccccggccgccgccaagccgaagcccaagtccaagaccgctgtgaagaagcccaaggccggggcgaagaagcccaaggccgccaccaagcccaagcccaaggccaaggccaagtcccccgctaaggcgaagcccgctgcaaagcccaaggcagccgcgaagccgaaacccgcagcagccaagcccaaggcggccgccaagccgaaggccaagccagctgccaaggctaagccgaaggctgtcgctgccaagccgaagccagctgccaagaaggccggccgccctgccaaggccgccaagacgtcagccaaggacacgcccgggaagaaagcggcgcccgccaagaagcccgctgctgcggccaagaaggcccctgccaagaaggccgccccagccaagaaggctcccaccccgtcgcggaaggtgccgtcgcgtaaggcgaagaagtagagcggtggtcttggcaggaatctagggtttcatgctccttcgattttagatgtttactcgtttttgctctagttgtgggtggtgtgcggggtgggttactaggttgtaaatttgatgccggaggctggggtacacatgggcattctgtaccagcggtggaagggcggaggcgccggcgacgatgacgaaccagtgtgtgttattattagaagacgaagttgtatttctgc

SEQ ID NO: 2114 - protein, 301 aa, Zea mays subsp. mays
  peptide (1)..(301): Ceres Seq. ID no. 12359693
  misc_feature (81)..(149): Pfam Name: linker histone H1 and H5 family Pfam Description: linker histone H1 and H5 family
  misc_feature (30)..(301): Homolog of NCBI NO: 13540393 NR Description: histone H1 [Pisum sativum]
  misc_feature (33)..(301): Homolog of NCBI NO: 585241 NR Description: HISTONE H1
  misc_feature (30)..(301): Homolog of NCBI NO: 30420970 NR Description: histone H1 [Vicia faba]
  misc_feature (28)..(299): Homolog of NCBI NO: 2623960 NR Description: histone H1 [Apium graveolens]
  misc_feature (30)..(301): Homolog of NCBI NO: 13540401 NR Description: histone H1 [Lens culinaris]
  misc_feature (28)..(301): Homolog of NCBI NO: 7439656 NR Description: histone H1 (clone TH315) - wheat
  misc_feature (34)..(301): Homolog of NCBI NO: 5230785 NR Description: histone H1 WH1B.1 [Triticum aestivum]
  misc_feature (28)..(301): Homolog of NCBI NO: 7439660 NR Description: histone H1 (clone TH32) - wheat
  misc_feature (33)..(299): Homolog of NCBI NO: 34897182 NR Description: histone-like protein [Oryza sativa (japonica
  misc_feature (33)..(287): Homolog of NCBI NO: 121950 NR Description: HISTONE H1
PSTAELSSPLSLSLSLSLALALLPRRGPVPALMATEVAETPAPLAEAVPETPAEAPAAPAAEANSTKAKKASAPKKRANPTHPPYAEMISEAVTSLKERTGSSQYAIAKFVEDKHKDKLPPNFRKLLLGQLKKLVAAGKLTKVKNSYKLPARAPAAAKPKPKSKTAVKKPKAGAKKPKAATKPKPKAKAKSPAKAKPAAKPKAAAKPKPAAAKPKAAAKPKAKPAAKAKPKAVAAKPKPAAKKAGRPAKAAKTSAKDTPGKKAAPAKKPAAAAKKAPAKKAAPAKKAPTPSRKVPSRKAKK

SEQ ID NO: 2115 - protein, 269 aa, Zea mays subsp. mays
  peptide (1)..(269): Ceres Seq. ID no. 12359694
  misc_feature (49)..(117): Pfam Name: linker histone H1 and H5 family Pfam Description: linker histone H1 and H5 family
  misc_feature (1)..(269): Homolog of NCBI NO: 13540393 NR Description: histone H1 [Pisum sativum]
  misc_feature (1)..(269): Homolog of NCBI NO: 585241 NR Description: HISTONE H1
  misc_feature (1)..(269): Homolog of NCBI NO: 30420970 NR Description: histone H1 [Vicia faba]
  misc_feature (1)..(267): Homolog of NCBI NO: 2623960 NR Description: histone H1 [Apium graveolens]
  misc_feature (1)..(269): Homolog of NCBI NO: 13540401 NR Description: histone H1 [Lens culinaris]
  misc_feature (1)..(269): Homolog of NCBI NO: 7439656 NR Description: histone H1 (clone TH315) - wheat
  misc_feature (2)..(269): Homolog of NCBI NO: 5230785 NR Description: histone H1 WH1B.1 [Triticum aestivum]
  misc_feature (1)..(269): Homolog of NCBI NO: 7439660 NR Description: histone H1 (clone TH32) - wheat
  misc_feature (1)..(267): Homolog of NCBI NO: 34897182 NR Description: histone-like protein [Oryza sativa (japonica
  misc_feature (1)..(255): Homolog of NCBI NO: 121950 NR Description: HISTONE H1
MATEVAETPAPLAEAVPETPAEAPAAPAAEANSTKAKKASAPKKRANPTHPPYAEMISEAVTSLKERTGSSQYAIAKFVEDKHKDKLPPNFRKLLLGQLKKLVAAGKLTKVKNSYKLPARAPAAAKPKPKSKTAVKKPKAGAKKPKAATKPKPKAKAKSPAKAKPAAKPKAAAKPKPAAAKPKAAAKPKAKPAAKAKPKAVAAKPKPAAKKAGRPAKAAKTSAKDTPGKKAAPAKKPAAAAKKAPAKKAAPAKKAPTPSRKVPSRKAKK

SEQ ID NO: 2116 - protein, 214 aa, Zea mays subsp. mays
  peptide (1)..(214): Ceres Seq. ID no. 12359695
  misc_feature (1)..(62): Pfam Name: linker histone H1 and H5 family Pfam Description: linker histone H1 and H5 family
  misc_feature (1)..(214): Homolog of NCBI NO: 13540393 NR Description: histone H1 [Pisum sativum]
  misc_feature (1)..(214): Homolog of NCBI NO: 585241 NR Description: HISTONE H1
  misc_feature (1)..(214): Homolog of NCBI NO: 30420970 NR Description: histone H1 [Vicia faba]
  misc_feature (1)..(212): Homolog of NCBI NO: 2623960 NR Description: histone H1 [Apium graveolens]
  misc_feature (1)..(214): Homolog of NCBI NO: 13540401 NR Description: histone H1 [Lens culinaris]
  misc_feature (1)..(214): Homolog of NCBI NO: 7439656 NR Description: histone H1 (clone TH315) - wheat
  misc_feature (1)..(214): Homolog of NCBI NO: 5230785 NR Description: histone H1 WH1B.1 [Triticum aestivum]
  misc_feature (1)..(214): Homolog of NCBI NO: 7439660 NR Description: histone H1 (clone TH32) - wheat
  misc_feature (1)..(212): Homolog of NCBI NO: 34897182 NR Description: histone-like protein [Oryza sativa (japonica
  misc_feature (1)..(200): Homolog of NCBI NO: 121950 NR Description: HISTONE H1
MISEAVTSLKERTGSSQYAIAKFVEDKHKDKLPPNFRKLLLGQLKKLVAAGKLTKVKNSYKLPARAPAAAKPKPKSKTAVKKPKAGAKKPKAATKPKPKAKAKSPAKAKPAAKPKAAAKPKPAAAKPKAAAKPKAKPAAKAKPKAVAAKPKPAAKKAGRPAKAAKTSAKDTPGKKAAPAKKPAAAAKKAPAKKAAPAKKAPTPSRKVPSRKAKK

SEQ ID NO: 2117 - DNA, 1605 bp, Zea mays subsp. mays
  misc_feature (1)..(1605): Ceres Seq. ID no. 12341578
  misc_feature: MA Experiment ID: 108522 Result: Down-regulated in Transcription
  misc_feature: MA Experiment 108522 PARAMETER Experiment Name: Zm_42deg_Heat_P Parameter: Age (day) Value: 8
  misc_feature: MA Experiment 108522 PARAMETER Experiment Name: Zm_42deg_Heat_P Parameter: Organism Value: Zea mays
  misc_feature: MA Experiment 108522 PARAMETER Experiment Name: Zm_42deg_Heat_P Parameter: Plant Line Value: 35A19
  misc_feature: MA Experiment 108522 PARAMETER Experiment Name: Zm_42deg_Heat_P Parameter: Temperature (deg C) Value: 42 vs. 22
  misc_feature: MA Experiment 108522 PARAMETER Experiment Name: Zm_42deg_Heat_P Parameter: Timepoint (hr) Value: 1
  misc_feature: MA Experiment 108522 PARAMETER Experiment Name: Zm_42deg_Heat_P Parameter: Tissue Value: Aerial
  misc_feature: MA Experiment ID: 20000534 Result: Down-regulated in Transcription
  misc_feature: MA Experiment 20000534 PARAMETER Experiment Name: Zm_Hybrid_Pollen_P Parameter: Age (day) Value: 8
  misc_feature: MA Experiment 20000534 PARAMETER Experiment Name: Zm_Hybrid_Pollen_P Parameter: Organism Value: Zea mays
  misc_feature: MA Experiment 20000534 PARAMETER Experiment Name: Zm_Hybrid_Pollen_P Parameter: Plant Line Value: 35A19
  misc_feature: MA Experiment 20000534 PARAMETER Experiment Name: Zm_Hybrid_Pollen_P Parameter: Tissue Value: Pollen vs. Aerial
atttataaacactgccaattagtccgcgccggacctccaacccgcccccacggcccacgccatcctccacaccccccacgccggacaaccggggctcgccgcgccgctacgctcccaagccggaactccgaactcgccgcgccgttctcactgtggcaccagagctgctcgatctgccccgccctcgcccctcgcccctcgcccccttgccggaggggcgcgaactcgcaaaaattattgggtgtgcatttatacacccatgttctttgctgaccctgtctggtagcagattaaggtttggttgcggaaaatattggtgggttgtccaccatgacgagtccgccaagggtgagcatggagatcaccgacgacatgctcaagagcatggaggtcggcctagctttccgggactataatggtagaattagttctatggattttcacagcaaggctaccaactatcttgtgacagctagcgacgatgaatcaatccgcctatacgacactcaaaatgcagtatgtttgaagactattaatagcaaaaaatatggggtcgaactagtgtgcttcactgataacccaaatattgtcttatattcatcaaaaaatggctgggatgaatctctgcgtctactctcactgaatgataatcggtttcttagatattttaaaggtcaccttgacagggttgtctgcatctcattttgctctgagaaagaaaattttctctctggttcacttgaccgtactgttctcttatgggatcaacgggctgaaaaatcacagggcttactgcgtgtgcaagggaggcctgcagtttcatatgacgatcagggcatggtatttgcagttgcctatggtggtcacataaggatgtttgatgctcgaaaatttgaaaaggggccttttgagatcttctctgttggtaataacgattcagaggcccatgtcataaagttcagcagtgatggcaggcggattctgttaaccactaaagctggacgtgtccatgtgctagattcattccatggcaatagcattgcgtcgtgcaatgtgaagccagtggtaaccaactcaacactggaggcgtcgttcagccctgatggaaaccatatcatatctggctccggtgacggtagtgtttatgcttggaatgttaggagtggaaaggtcgcgcgctggggaagcacagacgacgaaccgccgctggtaaggtgggctccaggatccttgatgttcgtgacaggatcatcagaactgtcatgctgggttccggacctgtctaagctgggatcctttaccattagcaagtaggtgaaaatgatgagaggtggactgcccttgcaaaccctgttcgtccctgtatggtatgtcgtgtggctggttgaagcgactcatcctttagccaggtggccgtggtaaacttgcaacctgttacaattgaatgacttgtatagagcatcggctgtggcgatctggcttctgaagccagcggctagacaatgaagatggatccatgctttagttctgtaaaccggagattgtagctgagtattgctgtatctctttgtttctggaaggcgtcttggctcgtaaagattctgg

SEQ ID NO: 2118 - protein, 327 aa, Zea mays subsp. mays
  peptide (1)..(327): Ceres Seq. ID no. 12341579
  misc_feature (45)..(317): Homolog of NCBI NO: 34877546 NR Description: similar to CG17293-PA [Rattus norvegicus]
  misc_feature (16)..(317): Homolog of NCBI NO: 21618713 NR Description: RIKEN cDNA 9430077D24 gene [Mus musculus]
  misc_feature (7)..(315): Homolog of NCBI NO: 19920938 NR Description: CG17293-PA [Drosophila melanogaster]
  misc_feature (9)..(315): Homolog of NCBI NO: 31232763 NR Description: ENSANGP00000013183 [Anopheles gambiae]
  misc_feature (9)..(317): Homolog of NCBI NO: 28277563 NR Description: Similar to RIKEN cDNA 9430077D24 gene [Danio
  misc_feature (10)..(316): Homolog of NCBI NO: 15241434 NR Description: putative protein
  misc_feature (6)..(327): Homolog of NCBI NO: 21536827 NR Description: WD repeat protein-like [Arabidopsis thaliana]
  misc_feature (6)..(327): Homolog of NCBI NO: 30698206 NR Description: transducin / WD-40 repeat protein family
  misc_feature (6)..(327): Homolog of NCBI NO: 18425050 NR Description: WD repeat protein-like
  misc_feature (7)..(327): Homolog of NCBI NO: 28564824 NR Description: OSJNBb0005G07.13 [Oryza sativa (japonica
MTSPPRVSMEITDDMLKSMEVGLAFRDYNGRISSMDFHSKATNYLVTASDDESIRLYDTQNAVCLKTINSKKYGVELVCFTDNPNIVLYSSKNGWDESLRLLSLNDNRFLRYFKGHLDRVVCISFCSEKENFLSGSLDRTVLLWDQRAEKSQGLLRVQGRPAVSYDDQGMVFAVAYGGHIRMFDARKFEKGPFEIFSVGNNDSEAHVIKFSSDGRRILLTTKAGRVHVLDSFHGNSIASCNVKPVVTNSTLEASFSPDGNHIISGSGDGSVYAWNVRSGKVARWGSTDDEPPLVRWAPGSLMFVTGSSELSCWVPDLSKLGSFTISK

SEQ ID NO: 2119 - protein, 319 aa, Zea mays subsp. mays
  peptide (1)..(319): Ceres Seq. ID no. 12341580
  misc_feature (37)..(309): Homolog of NCBI NO: 34877546 NR Description: similar to CG17293-PA [Rattus norvegicus]
  misc_feature (8)..(309): Homolog of NCBI NO: 21618713 NR Description: RIKEN cDNA 9430077D24 gene [Mus musculus]
  misc_feature (1)..(307): Homolog of NCBI NO: 19920938 NR Description: CG17293-PA [Drosophila melanogaster]
  misc_feature (1)..(307): Homolog of NCBI NO: 31232763 NR Description: ENSANGP00000013183 [Anopheles gambiae]
  misc_feature (1)..(309): Homolog of NCBI NO: 28277563 NR Description: Similar to RIKEN cDNA 9430077D24 gene [Danio
  misc_feature (2)..(308): Homolog of NCBI NO: 15241434 NR Description: putative protein
  misc_feature (1)..(319): Homolog of NCBI NO: 21536827 NR Description: WD repeat protein-like [Arabidopsis thaliana]
  misc_feature (1)..(319): Homolog of NCBI NO: 30698206 NR Description: transducin / WD-40 repeat protein family
  misc_feature (1)..(319): Homolog of NCBI NO: 18425050 NR Description: WD repeat protein-like
  misc_feature (1)..(319): Homolog of NCBI NO: 28564824 NR Description: OSJNBb0005G07.13 [Oryza sativa (japonica
MEITDDMLKSMEVGLAFRDYNGRISSMDFHSKATNYLVTASDDESIRLYDTQNAVCLKTINSKKYGVELVCFTDNPNIVLYSSKNGWDESLRLLSLNDNRFLRYFKGHLDRVVCISFCSEKENFLSGSLDRTVLLWDQRAEKSQGLLRVQGRPAVSYDDQGMVFAVAYGGHIRMFDARKFEKGPFEIFSVGNNDSEAHVIKFSSDGRRILLTTKAGRVHVLDSFHGNSIASCNVKPVVTNSTLEASFSPDGNHIISGSGDGSVYAWNVRSGKVARWGSTDDEPPLVRWAPGSLMFVTGSSELSCWVPDLSKLGSFTISK

SEQ ID NO: 2120 - protein, 313 aa, Zea mays subsp. mays
  peptide (1)..(313): Ceres Seq. ID no. 12341581
  misc_feature (31)..(303): Homolog of NCBI NO: 34877546 NR Description: similar to CG17293-PA [Rattus norvegicus]
  misc_feature (2)..(303): Homolog of NCBI NO: 21618713 NR Description: RIKEN cDNA 9430077D24 gene [Mus musculus]
  misc_feature (1)..(301): Homolog of NCBI NO: 19920938 NR Description: CG17293-PA [Drosophila melanogaster]
  misc_feature (1)..(301): Homolog of NCBI NO: 31232763 NR Description: ENSANGP00000013183 [Anopheles gambiae]
  misc_feature (1)..(303): Homolog of NCBI NO: 28277563 NR Description: Similar to RIKEN cDNA 9430077D24 gene [Danio
  misc_feature (1)..(302): Homolog of NCBI NO: 15241434 NR Description: putative protein
  misc_feature (1)..(313): Homolog of NCBI NO: 21536827 NR Description: WD repeat protein-like [Arabidopsis thaliana]
  misc_feature (1)..(313): Homolog of NCBI NO: 30698206 NR Description: transducin / WD-40 repeat protein family
  misc_feature (1)..(313): Homolog of NCBI NO: 18425050 NR Description: WD repeat protein-like
  misc_feature (1)..(313): Homolog of NCBI NO: 28564824 NR Description: OSJNBb0005G07.13 [Oryza sativa (japonica
MLKSMEVGLAFRDYNGRISSMDFHSKATNYLVTASDDESIRLYDTQNAVCLKTINSKKYGVELVCFTDNPNIVLYSSKNGWDESLRLLSLNDNRFLRYFKGHLDRVVCISFCSEKENFLSGSLDRTVLLWDQRAEKSQGLLRVQGRPAVSYDDQGMVFAVAYGGHIRMFDARKFEKGPFEIFSVGNNDSEAHVIKFSSDGRRILLTTKAGRVHVLDSFHGNSIASCNVKPVVTNSTLEASFSPDGNHIISGSGDGSVYAWNVRSGKVARWGSTDDEPPLVRWAPGSLMFVTGSSELSCWVPDLSKLGSFTISK

SEQ ID NO: 2121 - DNA, 481 bp, Zea mays subsp. mays
  misc_feature (1)..(481): Ceres Seq. ID no. 12633478
  misc_feature: MA Experiment ID: 108522 Result: Down-regulated in Transcription
  misc_feature: MA Experiment 108522 PARAMETER Experiment Name: Zm_42deg_Heat_P Parameter: Age (day) Value: 8
  misc_feature: MA Experiment 108522 PARAMETER Experiment Name: Zm_42deg_Heat_P Parameter: Organism Value: Zea mays
  misc_feature: MA Experiment 108522 PARAMETER Experiment Name: Zm_42deg_Heat_P Parameter: Plant Line Value: 35A19
  misc_feature: MA Experiment 108522 PARAMETER Experiment Name: Zm_42deg_Heat_P Parameter: Temperature (deg C) Value: 42 vs. 22
  misc_feature: MA Experiment 108522 PARAMETER Experiment Name: Zm_42deg_Heat_P Parameter: Timepoint (hr) Value: 1
  misc_feature: MA Experiment 108522 PARAMETER Experiment Name: Zm_42deg_Heat_P Parameter: Tissue Value: Aerial
  misc_feature: MA Experiment ID: 108535 Result: Up-regulated in Transcription
  misc_feature: MA Experiment 108535 PARAMETER Experiment Name: Zm_Meristem_P Parameter: Age (day) Value: 8
  misc_feature: MA Experiment 108535 PARAMETER Experiment Name: Zm_Meristem_P Parameter: Organism Value: Zea mays
  misc_feature: MA Experiment 108535 PARAMETER Experiment Name: Zm_Meristem_P Parameter: Plant Line Value: 35A19
  misc_feature: MA Experiment 108535 PARAMETER Experiment Name: Zm_Meristem_P Parameter: Tissue Value: Root Meristem vs. Above Root Meristem
  misc_feature: MA Experiment ID: 20000487 Result: Up-regulated in Transcription
  misc_feature: MA Experiment 20000487 PARAMETER Experiment Name: Zm_50mM_NH4NO3_L_to_H_P Parameter: Organism Value: Zea mays
  misc_feature: MA Experiment 20000487 PARAMETER Experiment Name: Zm_50mM_NH4NO3_L_to_H_P Parameter: Timepoint (hr) Value: 4
  misc_feature: MA Experiment 20000487 PARAMETER Experiment Name: Zm_50mM_NH4NO3_L_to_H_P Parameter: Tissue Value: Leaves
  misc_feature: MA Experiment 20000487 PARAMETER Experiment Name: Zm_50mM_NH4NO3_L_to_H_P Parameter: Treatment Value: 50mM NH4NO3 vs. 100mM Mannitol
gcttctgctctcacctgtttcgctgctcgcccgatctcgcgctgccgatctgagatcgagcgamkaagctttttcatcgagatggtgcttgtactgcatgctaacagtggtaacaaaaatgcattcaaaacactaattgccgcagaatacagcggtgtcaaggttgagttggtgaaggactttcaaatgggtgtctccaacaaaactccagagttcctcaagatgaaccctattgggaagattcctgtcctggagactcctgatggtcctgtttttgagagcaatgcaattsaagatatgnnacncgcttgaaggctgataacccactttatggatcttcactgattgattatgcccatattgagcaatggattgactttgctgcaacagagattgatgcaaacattggaaagtggttgtacccacggatggggttttatccccatgctggtgtggtagaagaatcaactattgctgcctt

SEQ ID NO: 2122 - protein, 103 aa, Zea mays subsp. mays
  peptide (1)..(103): Ceres Seq. ID no. 12633479
  misc_feature (28)..(97): Homolog of NCBI NO: 13626392 NR Description: Elongation factor 1-gamma (EF-1-gamma) (eEF-1B
  misc_feature (31)..(97): Homolog of NCBI NO: 29367381 NR Description: elongation factor 1 gamma-like protein
  misc_feature (37)..(97): Homolog of NCBI NO: 29367403 NR Description: elongation factor 1 gamma-like protein
  misc_feature (28)..(97): Homolog of NCBI NO: 13626515 NR Description: Elongation factor 1-gamma (EF-1-gamma) (eEF-1B
  misc_feature (22)..(22): Xaa is any aa, unknown or other
  misc_feature (98)..(98): Xaa is any aa, unknown or other
  misc_feature (101)..(101): Xaa is any aa, unknown or other
  misc_feature (102)..(102): Xaa is any aa, unknown or other
ASALTCFAARPISRCRSEIERXSFFIEMVLVLHANSGNKNAFKTLIAAEYSGVKVELVKDFQMGVSNKTPEFLKMNPIGKIPVLETPDGPVFESNAIXDMXXA

SEQ ID NO: 2123 - protein, 76 aa, Zea mays subsp. mays
  peptide (1)..(76): Ceres Seq. ID no. 12633480
  misc_feature (1)..(70): Homolog of NCBI NO: 13626392 NR Description: Elongation factor 1-gamma (EF-1-gamma) (eEF-1B
  misc_feature (4)..(70): Homolog of NCBI NO: 29367381 NR Description: elongation factor 1 gamma-like protein
  misc_feature (10)..(70): Homolog of NCBI NO: 29367403 NR Description: elongation factor 1 gamma-like protein
  misc_feature (1)..(70): Homolog of NCBI NO: 13626515 NR Description: Elongation factor 1-gamma (EF-1-gamma) (eEF-1B
  misc_feature (71)..(71): Xaa is any aa, unknown or other
  misc_feature (74)..(74): Xaa is any aa, unknown or other
  misc_feature (75)..(75): Xaa is any aa, unknown or other
MVLVLHANSGNKNAFKTLIAAEYSGVKVELVKDFQMGVSNKTPEFLKMNPIGKIPVLETPDGPVFESNAIXDMXXA

SEQ ID NO: 2124 - DNA, 1378 bp, Zea mays subsp. mays
  misc_feature (1)..(1378): Ceres Seq. ID no. 12410879
  misc_feature: MA Experiment ID: 108523 Result: Down-regulated in Transcription
  misc_feature: MA Experiment 108523 PARAMETER Experiment Name: Zm_42deg_Heat_P Parameter: Age (day) Value: 8
  misc_feature: MA Experiment 108523 PARAMETER Experiment Name: Zm_42deg_Heat_P Parameter: Organism Value: Zea mays
  misc_feature: MA Experiment 108523 PARAMETER Experiment Name: Zm_42deg_Heat_P Parameter: Plant Line Value: 35A19
  misc_feature: MA Experiment 108523 PARAMETER Experiment Name: Zm_42deg_Heat_P Parameter: Temperature (deg C) Value: 42 vs. 22
  misc_feature: MA Experiment 108523 PARAMETER Experiment Name: Zm_42deg_Heat_P Parameter: Timepoint (hr) Value: 6
  misc_feature: MA Experiment 108523 PARAMETER Experiment Name: Zm_42deg_Heat_P Parameter: Tissue Value: Aerial
  misc_feature: MA Experiment ID: 108536 Result: Down-regulated in Transcription
  misc_feature: MA Experiment 108536 PARAMETER Experiment Name: Zm_Meristem_P Parameter: Age (day) Value: 8
  misc_feature: MA Experiment 108536 PARAMETER Experiment Name: Zm_Meristem_P Parameter: Organism Value: Zea mays
  misc_feature: MA Experiment 108536 PARAMETER Experiment Name: Zm_Meristem_P Parameter: Plant Line Value: 35A19
  misc_feature: MA Experiment 108536 PARAMETER Experiment Name: Zm_Meristem_P Parameter: Tissue Value: Shoot Meristem vs. Above Shoot Meristem
  misc_feature: MA Experiment ID: 108556 Result: Down-regulated in Transcription
  misc_feature: MA Experiment 108556 PARAMETER Experiment Name: Zm_Drought_P Parameter: Age (day) Value: 9
  misc_feature: MA Experiment 108556 PARAMETER Experiment Name: Zm_Drought_P Parameter: Organism Value: Zea mays
  misc_feature: MA Experiment 108556 PARAMETER Experiment Name: Zm_Drought_P Parameter: Plant Line Value: 35A19
  misc_feature: MA Experiment 108556 PARAMETER Experiment Name: Zm_Drought_P Parameter: Timepoint (hr) Value: 24
  misc_feature: MA Experiment 108556 PARAMETER Experiment Name: Zm_Drought_P Parameter: Tissue Value: Aerial
  misc_feature: MA Experiment 108556 PARAMETER Experiment Name: Zm_Drought_P Parameter: Treatment Value: Drought vs. No Drought
  misc_feature: MA Experiment ID: 20000477 Result: Down-regulated in Transcription
  misc_feature: MA Experiment 20000477 PARAMETER Experiment Name: Zm_5mM_SA_P Parameter: Age (day) Value: 10
  misc_feature: MA Experiment 20000477 PARAMETER Experiment Name: Zm_5mM_SA_P Parameter: Organism Value: Zea mays
  misc_feature: MA Experiment 20000477 PARAMETER Experiment Name: Zm_5mM_SA_P Parameter: Plant Line Value: 35A19
  misc_feature: MA Experiment 20000477 PARAMETER Experiment Name: Zm_5mM_SA_P Parameter: Timepoint (hr) Value: 48
  misc_feature: MA Experiment 20000477 PARAMETER Experiment Name: Zm_5mM_SA_P Parameter: Tissue Value: Aerial
  misc_feature: MA Experiment 20000477 PARAMETER Experiment Name: Zm_5mM_SA_P Parameter: Treatment Value: 5mM SA vs. No Treatment
  misc_feature: MA Experiment ID: 20000478 Result: Down-regulated in Transcription
  misc_feature: MA Experiment 20000478 PARAMETER Experiment Name: Zm_5mM_SA_P Parameter: Age (day) Value: 11
  misc_feature: MA Experiment 20000478 PARAMETER Experiment Name: Zm_5mM_SA_P Parameter: Organism Value: Zea mays
  misc_feature: MA Experiment 20000478 PARAMETER Experiment Name: Zm_5mM_SA_P Parameter: Plant Line Value: 35A19
  misc_feature: MA Experiment 20000478 PARAMETER Experiment Name: Zm_5mM_SA_P Parameter: Timepoint (hr) Value: 72
  misc_feature: MA Experiment 20000478 PARAMETER Experiment Name: Zm_5mM_SA_P Parameter: Tissue Value: Aerial
  misc_feature: MA Experiment 20000478 PARAMETER Experiment Name: Zm_5mM_SA_P Parameter: Treatment Value: 5mM SA vs. No Treatment
  misc_feature: MA Experiment ID: 20000479 Result: Down-regulated in Transcription
  misc_feature: MA Experiment 20000479 PARAMETER Experiment Name: Zm_Drought_P Parameter: Age (day) Value: 10
  misc_feature: MA Experiment 20000479 PARAMETER Experiment Name: Zm_Drought_P Parameter: Organism Value: Zea mays
  misc_feature: MA Experiment 20000479 PARAMETER Experiment Name: Zm_Drought_P Parameter: Plant Line Value: 35A19
  misc_feature: MA Experiment 20000479 PARAMETER Experiment Name: Zm_Drought_P Parameter: Timepoint (hr) Value: 48
  misc_feature: MA Experiment 20000479 PARAMETER Experiment Name: Zm_Drought_P Parameter: Tissue Value: Aerial
  misc_feature: MA Experiment 20000479 PARAMETER Experiment Name: Zm_Drought_P Parameter: Treatment Value: Drought vs. No Drought
  misc_feature: MA Experiment ID: 20000480 Result: Down-regulated in Transcription
  misc_feature: MA Experiment 20000480 PARAMETER Experiment Name: Zm_Drought_P Parameter: Age (day) Value: 11
  misc_feature: MA Experiment 20000480 PARAMETER Experiment Name: Zm_Drought_P Parameter: Organism Value: Zea mays
  misc_feature: MA Experiment 20000480 PARAMETER Experiment Name: Zm_Drought_P Parameter: Plant Line Value: 35A19
  misc_feature: MA Experiment 20000480 PARAMETER Experiment Name: Zm_Drought_P Parameter: Timepoint (hr) Value: 72
  misc_feature: MA Experiment 20000480 PARAMETER Experiment Name: Zm_Drought_P Parameter: Tissue Value: Aerial
  misc_feature: MA Experiment 20000480 PARAMETER Experiment Name: Zm_Drought_P Parameter: Treatment Value: Drought vs. No Drought
aacacggatggaattggcgcgggcggcgggctggcagttgcgcagcaataactcccgctgcccaccggctcacctgtccttcatccgccccgatccgaccccaaatcaattccaaattcaatccggtctcagtggttggcccgccgctgccagtgccagatcgaatcggactctcggctcgtgtgcagcccaccggcgagacgccgaagctatatttttatgcccatctgatccgatgcgtggtgtggcgtcgtctccgcttttactagatcatcagtagccagctcaggagccgagcctggtcagggtagccaagcccatcccggtcctctcccggcgtcttctccctccgcaccgcggctccgggcgatggcgggcgtcggctccgcgctgcgtcggctctacctctccgtctacaactgggtcgtcttcttcggatgggcgcaggtgctgtactacgcggtcctgacgctgcgtttgagcgggcacaaggccgtctacgccgccgtcgagaggccgctgcagttcgcgcagacagccgccatcatggagatcgttcatgggctcgtagggttggtgaggtctccggtctctgcaactcttccacagattggatccaggttgttccttacgtggggtgtcttgtggagttttcctgagacccagtcacaccttcttgttactaccctggtcataagctggtctatcactgagatcatcagatactctttctttggaacgaaggaggcatttggctttgcgccttcctggttattatggcttaggtacagcacctttatgttgttgtatcctactggcatctctagtgaagttggtctgatctacattgccttgccttacatgaaggcatcggagaaatactgtattaggatgcccaacaaatggaacttctcatacgattacttctattcatctgtccttgccctcctgatctatgttccaggaagcccacacatgtaccgttacatgctctcccagaggaagaaggcgctatcaaaggccaaagcggcgtgatgatgccgcgcaagcaagggaatcggtggactggtttgcgtgatggatgtcggaacgtgttcaagttttcgacatccccagtagaatctagtggtcgggggatatatattactagaatggggctcttcatatgaactgccccgtatgcgtaatgtgttgtaccggagtcatcatttcagatatcagctgttgcgtggttaaatcgtagtttgcttccggatcacccatcagttggggggtggatttccatgttgattatatatggcaatgcgttccgcatccttccctcaactggtgctgtgctctcttgtttctagcgtacaatgtatgatggattttatcc

SEQ ID NO: 2125 - protein, 221 aa, Zea mays subsp. mays
  peptide (1)..(221): Ceres Seq. ID no. 12410880
  misc_feature (59)..(219): Pfam Name: Protein tyrosine phosphatase-like protein, PTPLA Pfam Description: Protein tyrosine phosphatase-like protein, PTPLA
  misc_feature (4)..(219): Homolog of NCBI NO: 34895862 NR Description: P0009G03.11 [Oryza sativa (japonica
  misc_feature (1)..(219): Homolog of NCBI NO: 22326707 NR Description: putative protein phosphatase
  misc_feature (1)..(216): Homolog of NCBI NO: 34869216 NR Description: similar to protein tyrosine phosphatase-like
  misc_feature (1)..(200): Homolog of NCBI NO: 11358666 NR Description: probable protein phosphatase - Arabidopsis
  misc_feature (1)..(202): Homolog of NCBI NO: 34895856 NR Description: P0009G03.7 [Oryza sativa (japonica
  misc_feature (59)..(221): Homolog of NCBI NO: 34895852 NR Description: P0009G03.5 [Oryza sativa (japonica
  misc_feature (1)..(193): Homolog of NCBI NO: 34895854 NR Description: P0009G03.6 [Oryza sativa (japonica
  misc_feature (1)..(216): Homolog of NCBI NO: 20892371 NR Description: similar to protein tyrosine phosphatase-like
  misc_feature (8)..(215): Homolog of NCBI NO: 7305421 NR Description: protein tyrosine phosphatase-like (proline
  misc_feature (1)..(221): Homolog of NCBI NO: 38344078 NR Description: OSJNBb0056F09.1 [Oryza sativa (japonica
MAGVGSALRRLYLSVYNWVVFFGWAQVLYYAVLTLRLSGHKAVYAAVERPLQFAQTAAIMEIVHGLVGLVRSPVSATLPQIGSRLFLTWGVLWSFPETQSHLLVTTLVISWSITEIIRYSFFGTKEAFGFAPSWLLWLRYSTFMLLYPTGISSEVGLIYIALPYMKASEKYCIRMPNKWNFSYDYFYSSVLALLIYVPGSPHMYRYMLSQRKKALSKAKAA

SEQ ID NO: 2126 - protein, 162 aa, Zea mays subsp. mays
  peptide (1)..(162): Ceres Seq. ID no. 12410881
  misc_feature (1)..(160): Pfam Name: Protein tyrosine phosphatase-like protein, PTPLA Pfam Description: Protein tyrosine phosphatase-like protein, PTPLA
  misc_feature (1)..(156): Homolog of NCBI NO: 7305421 NR Description: protein tyrosine phosphatase-like (proline
  misc_feature (1)..(157): Homolog of NCBI NO: 34869216 NR Description: similar to protein tyrosine phosphatase-like
  misc_feature (1)..(157): Homolog of NCBI NO: 20892371 NR Description: similar to protein tyrosine phosphatase-like
  misc_feature (1)..(141): Homolog of NCBI NO: 11358666 NR Description: probable protein phosphatase - Arabidopsis
  misc_feature (1)..(134): Homolog of NCBI NO: 34895854 NR Description: P0009G03.6 [Oryza sativa (japonica
  misc_feature (1)..(143): Homolog of NCBI NO: 34895856 NR Description: P0009G03.7 [Oryza sativa (japonica
  misc_feature (1)..(162): Homolog of NCBI NO: 34895852 NR Description: P0009G03.5 [Oryza sativa (japonica
  misc_feature (1)..(160): Homolog of NCBI NO: 34895862 NR Description: P0009G03.11 [Oryza sativa (japonica
  misc_feature (1)..(160): Homolog of NCBI NO: 22326707 NR Description: putative protein phosphatase
  misc_feature (1)..(162): Homolog of NCBI NO: 38344078 NR Description: OSJNBb0056F09.1 [Oryza sativa (japonica
MEIVHGLVGLVRSPVSATLPQIGSRLFLTWGVLWSFPETQSHLLVTTLVISWSITEIIRYSFFGTKEAFGFAPSWLLWLRYSTFMLLYPTGISSEVGLIYIALPYMKASEKYCIRMPNKWNFSYDYFYSSVLALLIYVPGSPHMYRYMLSQRKKALSKAKAA

SEQ ID NO: 2127 - DNA, 1455 bp, Zea mays subsp. mays
  misc_feature (1)..(1455): Ceres Seq. ID no. 12373785
  misc_feature: MA Experiment ID: 108504 Result: Up-regulated in Transcription
  misc_feature: MA Experiment 108504 PARAMETER Experiment Name: Zm_Drought_P Parameter: Age (day) Value: 8
  misc_feature: MA Experiment 108504 PARAMETER Experiment Name: Zm_Drought_P Parameter: Organism Value: Zea mays
  misc_feature: MA Experiment 108504 PARAMETER Experiment Name: Zm_Drought_P Parameter: Plant Line Value: 35A19
  misc_feature: MA Experiment 108504 PARAMETER Experiment Name: Zm_Drought_P Parameter: Timepoint (hr) Value: 12
  misc_feature: MA Experiment 108504 PARAMETER Experiment Name: Zm_Drought_P Parameter: Tissue Value: Aerial
  misc_feature: MA Experiment 108504 PARAMETER Experiment Name: Zm_Drought_P Parameter: Treatment Value: Drought vs. No Drought
  misc_feature: MA Experiment ID: 108523 Result: Up-regulated in Transcription
  misc_feature: MA Experiment 108523 PARAMETER Experiment Name: Zm_42deg_Heat_P Parameter: Age (day) Value: 8
  misc_feature: MA Experiment 108523 PARAMETER Experiment Name: Zm_42deg_Heat_P Parameter: Organism Value: Zea mays
  misc_feature: MA Experiment 108523 PARAMETER Experiment Name: Zm_42deg_Heat_P Parameter: Plant Line Value: 35A19
  misc_feature: MA Experiment 108523 PARAMETER Experiment Name: Zm_42deg_Heat_P Parameter: Temperature (deg C) Value: 42 vs. 22
  misc_feature: MA Experiment 108523 PARAMETER Experiment Name: Zm_42deg_Heat_P Parameter: Timepoint (hr) Value: 6
  misc_feature: MA Experiment 108523 PARAMETER Experiment Name: Zm_42deg_Heat_P Parameter: Tissue Value: Aerial
  misc_feature: MA Experiment ID: 108535 Result: Up-regulated in Transcription
  misc_feature: MA Experiment 108535 PARAMETER Experiment Name: Zm_Meristem_P Parameter: Age (day) Value: 8
  misc_feature: MA Experiment 108535 PARAMETER Experiment Name: Zm_Meristem_P Parameter: Organism Value: Zea mays
  misc_feature: MA Experiment 108535 PARAMETER Experiment Name: Zm_Meristem_P Parameter: Plant Line Value: 35A19
  misc_feature: MA Experiment 108535 PARAMETER Experiment Name: Zm_Meristem_P Parameter: Tissue Value: Root Meristem vs. Above Root Meristem
  misc_feature: MA Experiment ID: 108543 Result: Down-regulated in Transcription
  misc_feature: MA Experiment ID: 108597 Result: Up-regulated in Transcription
  misc_feature: MA Experiment 108597 PARAMETER Experiment Name: Zm_100uM_ABA_P Parameter: Age (day) Value: 9
  misc_feature: MA Experiment 108597 PARAMETER Experiment Name: Zm_100uM_ABA_P Parameter: Organism Value: Zea mays
  misc_feature: MA Experiment 108597 PARAMETER Experiment Name: Zm_100uM_ABA_P Parameter: Plant Line Value: 35A19
  misc_feature: MA Experiment 108597 PARAMETER Experiment Name: Zm_100uM_ABA_P Parameter: Timepoint (hr) Value: 24
  misc_feature: MA Experiment 108597 PARAMETER Experiment Name: Zm_100uM_ABA_P Parameter: Tissue Value: Aerial
  misc_feature: MA Experiment 108597 PARAMETER Experiment Name: Zm_100uM_ABA_P Parameter: Treatment Value: 100uM ABA vs. No Treatment
gaaatttccgatttctgccagatccaatcgcggctaccatcatggcagaagcggccggcggcggacccctgctccccgaggaactcattatctgggagatcctaacccgtctgccggcgaagcccctcctccgatgccgcgctgtctgcctctcctggtgccgccgactcacctccgacgccaaattcctcctcgcccaccaccgtcgccagccctcgctcccgctcctcactgaaggggacaggagcaccgaggagaggaggatcgacgccctggactaccgcaccggcgagcggcgccccatcgcgcggacaacaggccggaccgccgccaacggggacgacctgaacgtgctggcttcctgcgaaggcctcctcatcctcctcgccaacggcggcctccagatctgcaacccggcgacccgccagcgcgcgccactcactcttctccacggcgcctattgcatctccgcgctttaccctcacatcccgtccaggtcgtaccgtgtgctctgctgcttcgagagagccgaggacggccacgccgtgtaccacgtgcacaccgtcgggtcgcgcgagctcaggtgcgtcggagaacctcccgcgccgtgggcgtccggggatatggtaatggcgatgccgatgatggtgtaccttcacccgcacgtcgtggcagacagcaggatctactggcagccggtaaagctgcccgtcggcaacggcaaggtcaacaacatgctcgtgttcgacacaatgaccgagtccttccagcaactgctgtcgcccgtggagggcccctttcttgaactgtttcagatgaacagcggcgcccttggattgtaccactgccgcagcggcaaggttgatctttgggtgttacaggatcacgggagctggtcctggtcgatgaaccaccggatcaaattggacgtgatgtttttctccctgctgccggtgctggacccggaaggagatgtgctagtgctttctaaaagaggggaaacaggcatcctgtggcaacatctgcatcacatctctggtgtcaatggcagtttgctggccctgtatcaatggagcgcttatctgaagcttagcaggcataggctcaaagaaagtctagtccaccatgacttcttctcgatggaaggtaatgagggtggtgtggatgaaaaaccattgttcgatggcttgtcaactgtggcattgcttcgtgatgataattctgagccacattgagaaacaaaggtattactcaagctgtttcatctcatcaggatggagtcactcctgcctagtaataacagcactgcagattagtaataacctgaaactatacctcgagtctgatttttcccttttcacatgagtcataaacactgttatgactggtattttattttcccttttcacgtgagtcatgaacactgttattactggtattttattttccattttc

SEQ ID NO: 2128 - protein, 410 aa, Zea mays subsp. mays
  peptide (1)..(410): Ceres Seq. ID no. 12373786
  misc_feature (20)..(67): Pfam Name: F-box domain Pfam Description: F-box domain
  misc_feature (23)..(76): Homolog of NCBI NO: 25553615 NR Description: OJ1046_F10.9 [Oryza sativa (japonica
  misc_feature (267)..(337): Homolog of NCBI NO: 25553615 NR Description: OJ1046_F10.9 [Oryza sativa (japonica
  misc_feature (6)..(310): Homolog of NCBI NO: 34905158 NR Description: P0700D12.24 [Oryza sativa (japonica
  misc_feature (24)..(380): Homolog of NCBI NO: 38346527 NR Description: OSJNBa0040D17.2 [Oryza sativa (japonica
  misc_feature (6)..(384): Homolog of NCBI NO: 37530720 NR Description: unknown protein [Oryza sativa (japonica
  misc_feature (17)..(396): Homolog of NCBI NO: 38344215 NR Description: OSJNBb0026E15.3 [Oryza sativa (japonica
  misc_feature (24)..(380): Homolog of NCBI NO: 38346536 NR Description: OSJNBa0040D17.11 [Oryza sativa (japonica
  misc_feature (14)..(380): Homolog of NCBI NO: 38346045 NR Description: OSJNBa0059D20.17 [Oryza sativa (japonica
  misc_feature (20)..(380): Homolog of NCBI NO: 37533944 NR Description: hypothetical protein [Oryza sativa (japonica
NFRFLPDPIAATIMAEAAGGGPLLPEELIIWEILTRLPAKPLLRCRAVCLSWCRRLTSDAKFLLAHHRRQPSLPLLTEGDRSTEERRIDALDYRTGERRPIARTTGRTAANGDDLNVLASCEGLLILLANGGLQICNPATRQRAPLTLLHGAYCISALYPHIPSRSYRVLCCFERAEDGHAVYHVHTVGSRELRCVGEPPAPWASGDMVMAMPMMVYLHPHVVADSRIYWQPVKLPVGNGKVNNMLVFDTMTESFQQLLSPVEGPFLELFQMNSGALGLYHCRSGKVDLWVLQDHGSWSWSMNHRIKLDVMFFSLLPVLDPEGDVLVLSKRGETGILWQHLHHISGVNGSLLALYQWSAYLKLSRHRLKESLVHHDFFSMEGNEGGVDEKPLFDGLSTVALLRDDNSEPH

SEQ ID NO: 2129 - protein, 397 aa, Zea mays subsp. mays
  peptide (1)..(397): Ceres Seq. ID no. 12373787
  misc_feature (7)..(54): Pfam Name: F-box domain Pfam Description: F-box domain
  misc_feature (10)..(63): Homolog of NCBI NO: 25553615 NR Description: OJ1046_F10.9 [Oryza sativa (japonica
  misc_feature (254)..(324): Homolog of NCBI NO: 25553615 NR Description: OJ1046_F10.9 [Oryza sativa (japonica
  misc_feature (1)..(297): Homolog of NCBI NO: 34905158 NR Description: P0700D12.24 [Oryza sativa (japonica
  misc_feature (11)..(367): Homolog of NCBI NO: 38346527 NR Description: OSJNBa0040D17.2 [Oryza sativa (japonica
  misc_feature (1)..(371): Homolog of NCBI NO: 37530720 NR Description: unknown protein [Oryza sativa (japonica
  misc_feature (4)..(383): Homolog of NCBI NO: 38344215 NR Description: OSJNBb0026E15.3 [Oryza sativa (japonica
  misc_feature (11)..(367): Homolog of NCBI NO: 38346536 NR Description: OSJNBa0040D17.11 [Oryza sativa (japonica
  misc_feature (1)..(367): Homolog of NCBI NO: 38346045 NR Description: OSJNBa0059D20.17 [Oryza sativa (japonica
  misc_feature (7)..(367): Homolog of NCBI NO: 37533944 NR Description: hypothetical protein [Oryza sativa (japonica
MAEAAGGGPLLPEELIIWEILTRLPAKPLLRCRAVCLSWCRRLTSDAKFLLAHHRRQPSLPLLTEGDRSTEERRIDALDYRTGERRPIARTTGRTAANGDDLNVLASCEGLLILLANGGLQICNPATRQRAPLTLLHGAYCISALYPHIPSRSYRVLCCFERAEDGHAVYHVHTVGSRELRCVGEPPAPWASGDMVMAMPMMVYLHPHVVADSRIYWQPVKLPVGNGKVNNMLVFDTMTESFQQLLSPVEGPFLELFQMNSGALGLYHCRSGKVDLWVLQDHGSWSWSMNHRIKLDVMFFSLLPVLDPEGDVLVLSKRGETGILWQHLHHISGVNGSLLALYQWSAYLKLSRHRLKESLVHHDFFSMEGNEGGVDEKPLFDGLSTVALLRDDNSEPH

SEQ ID NO: 2130 - DNA, 1149 bp, Zea mays subsp. mays
  misc_feature (1)..(1149): Ceres Seq. ID no. 12406482
  misc_feature: MA Experiment ID: 108535 Result: Up-regulated in Transcription
  misc_feature: MA Experiment 108535 PARAMETER Experiment Name: Zm_Meristem_P Parameter: Age (day) Value: 8
  misc_feature: MA Experiment 108535 PARAMETER Experiment Name: Zm_Meristem_P Parameter: Organism Value: Zea mays
  misc_feature: MA Experiment 108535 PARAMETER Experiment Name: Zm_Meristem_P Parameter: Plant Line Value: 35A19
  misc_feature: MA Experiment 108535 PARAMETER Experiment Name: Zm_Meristem_P Parameter: Tissue Value: Root Meristem vs. Above Root Meristem
  misc_feature: MA Experiment ID: 108544 Result: Down-regulated in Transcription
  misc_feature: MA Experiment ID: 20000488 Result: Up-regulated in Transcription
  misc_feature: MA Experiment 20000488 PARAMETER Experiment Name: Zm_50mM_NH4NO3_L_to_H_P Parameter: Organism Value: Zea mays
  misc_feature: MA Experiment 20000488 PARAMETER Experiment Name: Zm_50mM_NH4NO3_L_to_H_P Parameter: Timepoint (hr) Value: 8
  misc_feature: MA Experiment 20000488 PARAMETER Experiment Name: Zm_50mM_NH4NO3_L_to_H_P Parameter: Tissue Value: Leaves
  misc_feature: MA Experiment 20000488 PARAMETER Experiment Name: Zm_50mM_NH4NO3_L_to_H_P Parameter: Treatment Value: 50mM NH4NO3 vs. 100mM Mannitol
aacaaatagggttttatcattttgggaaggagcagatcaggatccattaacacccctacgtacgcctttcctctggaaacccttctctcgcctgcctctcccccgccgcgccgccacttcccctctcccgtcaactccggcttccgcgcgaggtcgagctagcgtttggagttctcgagacctgctgtgatggcgacagagcaagcggcggagaactacacggtggaggacctcgtggccctgaacccctacaaccccgacatcctcaacgacctcgagaagttcgtcaatgagcaggtctcatctcagacatataacttggatgcaaatctcagccttcttcgcttgtaccagtttgagccagaaaggatgagcatacagattgtggcccacatactgattaaggctctcatggcaatgccagcccctgacttcagtttgtgcttattcttaatccctgaacatgtgcaaatggaggagcaattcaaggtattgatagttctttctcactacctagagactgctaggttcagtcaattttgggatgaagcagcaaagaaccgccacatatcggaagcagtgccaggtttcgaacaagcaatccaatcctatgcgattcatgtactttccttgacataccagaaagttccaaggcctattcttgtagaggcaatcaacatcgaaggtctcgcgttggacaagtttcttgagtaccatgccgcgaactcaggttgggtgattgagaagggtgggcagtctcaagtgattgttcttccgcgtaatgagttcaatcacccagagctcaagaagaacacagccgatatccttccgtttgaacacgtaacacgcatattccctgtccttggctgattcaggcgtgctgagagatctatacaaaactcagcgagtgaagcttctcttagtcattgcatcttcagtttgtagtgtaccctattgagattatctcggtataccagtcctttttatgccggagttggtttctgcaacctatggttattgttattactataacgaaatgctcagatatgagattggtcttgtccttcgaaggaggctgtcaggtccattgtttgagaacgtgtgttgtgaatggtgtgtgctgggaatgagtctcattagctatcgccg

SEQ ID NO: 2131 - protein, 226 aa, Zea mays subsp. mays
  peptide (1)..(226): Ceres Seq. ID no. 12406483
  misc_feature (1)..(225): Pfam Name: Eukaryotic translation initiation factor 3 Pfam Description: Eukaryotic translation initiation factor 3
  misc_feature (1)..(225): Homolog of NCBI NO: 23396617 NR Description: Eukaryotic translation initiation factor 3
  misc_feature (5)..(226): Homolog of NCBI NO: 15234123 NR Description: putative protein; protein id: At4g33250.1, by cDNA: gi_12407752, supported by cDNA: gi_14335023, supported cDNA: gi_15292988, supported by cDNA: gi_20147104, supported by
  misc_feature (15)..(221): Homolog of NCBI NO: 21312044 NR Description: RIKEN cDNA 1200009C21 [Mus musculus]
  misc_feature (15)..(221): Homolog of NCBI NO: 27730981 NR Description: similar to RIKEN cDNA 1200009C21 [Mus musculus]
  misc_feature (15)..(221): Homolog of NCBI NO: 10801345 NR Description: muscle specific gene [Homo sapiens]
  misc_feature (15)..(221): Homolog of NCBI NO: 5114051 NR Description: HSPC029 [Homo sapiens]
  misc_feature (8)..(218): Homolog of NCBI NO: 19922704 NR Description: CG10306-PA [Drosophila melanogaster]
  misc_feature (8)..(182): Homolog of NCBI NO: 38047673 NR Description: similar to Drosophila melanogaster CG10306
  misc_feature (54)..(221): Homolog of NCBI NO: 20380678 NR Description: Similar to RIKEN cDNA 1200009C21 gene [Mus
  misc_feature (164)..(226): Homolog of NCBI NO: 20453126 NR Description: AT4g33250/F17M5_10 [Arabidopsis thaliana]
MATEQAAENYTVEDLVALNPYNPDILNDLEKFVNEQVSSQTYNLDANLSLLRLYQFEPERMSIQIVAHILIKALMAMPAPDFSLCLFLIPEHVQMEEQFKVLIVLSHYLETARFSQFWDEAAKNRHISEAVPGFEQAIQSYAIHVLSLTYQKVPRPILVEAINIEGLALDKFLEYHAANSGWVIEKGGQSQVIVLPRNEFNHPELKKNTADILPFEHVTRIFPVLG

SEQ ID NO: 2132 - protein, 166 aa, Zea mays subsp. mays
  peptide (1)..(166): Ceres Seq. ID no. 12406484
  misc_feature (1)..(165): Pfam Name: Eukaryotic translation initiation factor 3 Pfam Description: Eukaryotic translation initiation factor 3
  misc_feature (1)..(161): Homolog of NCBI NO: 10801345 NR Description: muscle specific gene [Homo sapiens]
  misc_feature (1)..(161): Homolog of NCBI NO: 5114051 NR Description: HSPC029 [Homo sapiens]
  misc_feature (1)..(158): Homolog of NCBI NO: 19922704 NR Description: CG10306-PA [Drosophila melanogaster]
  misc_feature (1)..(165): Homolog of NCBI NO: 23396617 NR Description: Eukaryotic translation initiation factor 3
  misc_feature (1)..(161): Homolog of NCBI NO: 21312044 NR Description: RIKEN cDNA 1200009C21 [Mus musculus]
  misc_feature (1)..(161): Homolog of NCBI NO: 27730981 NR Description: similar to RIKEN cDNA 1200009C21 [Mus musculus]
  misc_feature (1)..(166): Homolog of NCBI NO: 15234123 NR Description: putative protein; protein id: At4g33250.1, by cDNA: gi_12407752, supported by cDNA: gi_14335023, supported cDNA: gi_15292988, supported by cDNA: gi_20147104, supported by
  misc_feature (1)..(122): Homolog of NCBI NO: 38047673 NR Description: similar to Drosophila melanogaster CG10306
  misc_feature (1)..(161): Homolog of NCBI NO: 20380678 NR Description: Similar to RIKEN cDNA 1200009C21 gene [Mus
  misc_feature (104)..(166): Homolog of NCBI NO: 20453126 NR Description: AT4g33250/F17M5_10 [Arabidopsis thaliana]
MSIQIVAHILIKALMAMPAPDFSLCLFLIPEHVQMEEQFKVLIVLSHYLETARFSQFWDEAAKNRHISEAVPGFEQAIQSYAIHVLSLTYQKVPRPILVEAINIEGLALDKFLEYHAANSGWVIEKGGQSQVIVLPRNEFNHPELKKNTADILPFEHVTRIFPVLG

SEQ ID NO: 2133 - protein, 152 aa, Zea mays subsp. mays
  peptide (1)..(152): Ceres Seq. ID no. 12406485
  misc_feature (1)..(151): Pfam Name: Eukaryotic translation initiation factor 3 Pfam Description: Eukaryotic translation initiation factor 3
  misc_feature (1)..(151): Homolog of NCBI NO: 23396617 NR Description: Eukaryotic translation initiation factor 3
  misc_feature (1)..(152): Homolog of NCBI NO: 15234123 NR Description: putative protein; protein id: At4g33250.1, by cDNA: gi_12407752, supported by cDNA: gi_14335023, supported cDNA: gi_15292988, supported by cDNA: gi_20147104, supported by
  misc_feature (1)..(147): Homolog of NCBI NO: 21312044 NR Description: RIKEN cDNA 1200009C21 [Mus musculus]
  misc_feature (1)..(147): Homolog of NCBI NO: 27730981 NR Description: similar to RIKEN cDNA 1200009C21 [Mus musculus]
  misc_feature (1)..(147): Homolog of NCBI NO: 10801345 NR Description: muscle specific gene [Homo sapiens]
  misc_feature (1)..(147): Homolog of NCBI NO: 5114051 NR Description: HSPC029 [Homo sapiens]
  misc_feature (1)..(144): Homolog of NCBI NO: 19922704 NR Description: CG10306-PA [Drosophila melanogaster]
  misc_feature (1)..(108): Homolog of NCBI NO: 38047673 NR Description: similar to Drosophila melanogaster CG10306
  misc_feature (1)..(147): Homolog of NCBI NO: 20380678 NR Description: Similar to RIKEN cDNA 1200009C21 gene [Mus
  misc_feature (90)..(152): Homolog of NCBI NO: 20453126 NR Description: AT4g33250/F17M5_10 [Arabidopsis thaliana]
MAMPAPDFSLCLFLIPEHVQMEEQFKVLIVLSHYLETARFSQFWDEAAKNRHISEAVPGFEQAIQSYAIHVLSLTYQKVPRPILVEAINIEGLALDKFLEYHAANSGWVIEKGGQSQVIVLPRNEFNHPELKKNTADILPFEHVTRIFPVLG

SEQ ID NO: 2134 - DNA, 1731 bp, Zea mays subsp. mays
  misc_feature (1)..(1731): Ceres Seq. ID no. 12345243
  misc_feature: MA Experiment ID: 108535 Result: Up-regulated in Transcription
  misc_feature: MA Experiment 108535 PARAMETER Experiment Name: Zm_Meristem_P Parameter: Age (day) Value: 8
  misc_feature: MA Experiment 108535 PARAMETER Experiment Name: Zm_Meristem_P Parameter: Organism Value: Zea mays
  misc_feature: MA Experiment 108535 PARAMETER Experiment Name: Zm_Meristem_P Parameter: Plant Line Value: 35A19
  misc_feature: MA Experiment 108535 PARAMETER Experiment Name: Zm_Meristem_P Parameter: Tissue Value: Root Meristem vs. Above Root Meristem
  misc_feature: MA Experiment ID: 108543 Result: Up-regulated in Transcription
  misc_feature: MA Experiment ID: 20000535 Result: Up-regulated in Transcription
  misc_feature: MA Experiment 20000535 PARAMETER Experiment Name: Zm_Hybrid_Seed_Dev_P Parameter: DAP Value: 30 vs. 12
  misc_feature: MA Experiment 20000535 PARAMETER Experiment Name: Zm_Hybrid_Seed_Dev_P Parameter: Organism Value: Zea mays
  misc_feature: MA Experiment 20000535 PARAMETER Experiment Name: Zm_Hybrid_Seed_Dev_P Parameter: Plant Line Value: 35A19
  misc_feature: MA Experiment 20000535 PARAMETER Experiment Name: Zm_Hybrid_Seed_Dev_P Parameter: Tissue Value: Embryo vs. Unfert Floret
aagaattgttcggttacattttgcctgtttgctgtttttttcgtcggttcgcctcgtcttctccgcctggcccgagactcacactcaattcggtcgttttctgcattaacggagtcaggcccaggcctaacctcagtacatcagagcagccgaacacgcccgcggcaaccgccgccattctaccccaggtcggacggacccttgccggagacgagcacacgccacagcaggaattatcgggcgtagagcagcgcgaagcgagagatccaatggcggcggcggaggggcagtgggtgctcatggcaacggggcggacgccgaccaacattgcggtgatcaagtactgggggaagcgggacgaggcgctcatcctccccatcaacgacagcatcagcgtaacgctcgaccccgaccatctctccgccaccaccactgtcgccgtcagcccctcattcccttccgaccgcatgtggctcaatggcaaggagatctcgctattaggaggaaggtttcagagctgcctcagagaaatcagaaagcgtgctcgtgactttgaggacaaggagaagggcgtcaagatcaagaaagaggactgggacaagttgcatgttcacatagcctcgtacaacaacttccccactgctgctggtttggcctcttcagctgctggccttgcctgtttcgttttcacccttggaaagctgatgaatgcgaaagaagattatggagaactttcttcaatagcaaggcagggatctgggagtgcatgccgcagtatatatggtggttttgtgaaatggtgcatgggagaaaaagatgatggaagtgacagtattgccgtgcagcttgctgacgaaacacactggaatgatcttgtaattattattgcagtggtcagttcaaagcagaaggaaaccagtagcaccagtgggatgcgagatagtgttgaaacaagtcctctcttgcagtacagggcccagacagtggtgccaggtcgggtgttgaaaatggaagaagctatcaagaaccgtgactttgaatcctttgccaaattaacttgtgcggatagcaaccagtttcatgctgtatgcttagacacgagccctcctatcttctatatgaatgacacgtcacaccgaataattagccttgtggaaaaatggaaccactcagaaggaaccccacaggtcgcttacaccttcgatgctgggccaaacgctgttctaatcgcacaaaaccgtaaaactgcagcacatctcctccagaagctcctatactatttccctccacaggataatgatttgagcagctatctggttggcgataaatcgattctaggtgtcgccggattgcattccatgaaagacgtcgaggctcttccagcacctccagagacgaagataccggatcagaaattcaagggcgatgttagctacttcatctgcagcaggcttggcgctggtccaaaggttgtttctgacgaaggtcaagcattgatcgattcagtcaccggacttccaaaaggcgtgtagttctagatttaggttggaataatggtttaagctggggattaaagacaatggtatcatacaagcaacctgggccgggaagatacattaggctcgtgtcacgttggtttcgtgctgattgacttgacggtgtattggtcatgtattatgcatttgcgctggtgttcgttgctgtccaataaagatagaacacgttctcgcc

SEQ ID NO: 2135 - protein, 509 aa, Zea mays subsp. mays
  peptide (1)..(509): Ceres Seq. ID no. 12345244
  misc_feature (92)..(507): Homolog of NCBI NO: 13592005 NR Description: mevalonate pyrophosphate decarboxylase [Rattus
  misc_feature (92)..(507): Homolog of NCBI NO: 23814095 NR Description: Diphosphomevalonate decarboxylase (Mevalonate
  misc_feature (92)..(507): Homolog of NCBI NO: 26354448 NR Description: unnamed protein product [Mus musculus]
  misc_feature (92)..(507): Homolog of NCBI NO: 20149736 NR Description: mevalonate (diphospho) decarboxylase
  misc_feature (100)..(507): Homolog of NCBI NO: 21593039 NR Description: mevalonate diphosphate decarboxylase [Arabidopsis
  misc_feature (93)..(507): Homolog of NCBI NO: 11281655 NR Description: diphosphomevalonate decarboxylase (EC 4.1.1.33)
  misc_feature (93)..(507): Homolog of NCBI NO: 15224931 NR Description: mevalonate diphosphate decarboxylase
  misc_feature (93)..(507): Homolog of NCBI NO: 21593243 NR Description: diphosphomevalonate decarboxylase-like protein
  misc_feature (93)..(507): Homolog of NCBI NO: 18410026 NR Description: DIPHOSPHOMEVALONATE DECARBOXYLASE - like protein
  misc_feature (97)..(507): Homolog of NCBI NO: 16417950 NR Description: mevalonate disphosphate decarboxylase [Hevea
ELFGYILPVCCFFRRFASSSPPGPRLTLNSVVFCINGVRPRPNLSTSEQPNTPAATAAILPQVGRTLAGDEHTPQQELSGVEQREARDPMAAAEGQWVLMATGRTPTNIAVIKYWGKRDEALILPINDSISVTLDPDHLSATTTVAVSPSFPSDRMWLNGKEISLLGGRFQSCLREIRKRARDFEDKEKGVKIKKEDWDKLHVHIASYNNFPTAAGLASSAAGLACFVFTLGKLMNAKEDYGELSSIARQGSGSACRSIYGGFVKWCMGEKDDGSDSIAVQLADETHWNDLVIIIAVVSSKQKETSSTSGMRDSVETSPLLQYRAQTVVPGRVLKMEEAIKNRDFESFAKLTCADSNQFHAVCLDTSPPIFYMNDTSHRIISLVEKWNHSEGTPQVAYTFDAGPNAVLIAQNRKTAAHLLQKLLYYFPPQDNDLSSYLVGDKSILGVAGLHSMKDVEALPAPPETKIPDQKFKGDVSYFICSRLGAGPKVVSDEGQALIDSVTGLPKGV

SEQ ID NO: 2136 - protein, 420 aa, Zea mays subsp. mays
  peptide (1)..(420): Ceres Seq. ID no. 12345245
  misc_feature (3)..(418): Homolog of NCBI NO: 23814095 NR Description: Diphosphomevalonate decarboxylase (Mevalonate
  misc_feature (3)..(418): Homolog of NCBI NO: 26354448 NR Description: unnamed protein product [Mus musculus]
  misc_feature (3)..(418): Homolog of NCBI NO: 20149736 NR Description: mevalonate (diphospho) decarboxylase
  misc_feature (11)..(418): Homolog of NCBI NO: 21593039 NR Description: mevalonate diphosphate decarboxylase [Arabidopsis
  misc_feature (4)..(418): Homolog of NCBI NO: 11281655 NR Description: diphosphomevalonate decarboxylase (EC 4.1.1.33)
  misc_feature (4)..(418): Homolog of NCBI NO: 15224931 NR Description: mevalonate diphosphate decarboxylase
  misc_feature (4)..(418): Homolog of NCBI NO: 21593243 NR Description: diphosphomevalonate decarboxylase-like protein
  misc_feature (4)..(418): Homolog of NCBI NO: 18410026 NR Description: DIPHOSPHOMEVALONATE DECARBOXYLASE - like protein
  misc_feature (8)..(418): Homolog of NCBI NO: 16417950 NR Description: mevalonate disphosphate decarboxylase [Hevea
  misc_feature (3)..(418): Homolog of NCBI NO: 13592005 NR Description: mevalonate pyrophosphate decarboxylase [Rattus
MAAAEGQWVLMATGRTPTNIAVIKYWGKRDEALILPINDSISVTLDPDHLSATTTVAVSPSFPSDRMWLNGKEISLLGGRFQSCLREIRKRARDFEDKEKGVKIKKEDWDKLHVHIASYNNFPTAAGLASSAAGLACFVFTLGKLMNAKEDYGELSSIARQGSGSACRSIYGGFVKWCMGEKDDGSDSIAVQLADETHWNDLVIIIAVVSSKQKETSSTSGMRDSVETSPLLQYRAQTVVPGRVLKMEEAIKNRDFESFAKLTCADSNQFHAVCLDTSPPIFYMNDTSHRIISLVEKWNHSEGTPQVAYTFDAGPNAVLIAQNRKTAAHLLQKLLYYFPPQDNDLSSYLVGDKSILGVAGLHSMKDVEALPAPPETKIPDQKFKGDVSYFICSRLGAGPKVVSDEGQALIDSVTGLPKGV

SEQ ID NO: 2137 - protein, 410 aa, Zea mays subsp. mays
  peptide (1)..(410): Ceres Seq. ID no. 12345246
  misc_feature (1)..(408): Homolog of NCBI NO: 13592005 NR Description: mevalonate pyrophosphate decarboxylase [Rattus
  misc_feature (1)..(408): Homolog of NCBI NO: 23814095 NR Description: Diphosphomevalonate decarboxylase (Mevalonate
  misc_feature (1)..(408): Homolog of NCBI NO: 26354448 NR Description: unnamed protein product [Mus musculus]
  misc_feature (1)..(408): Homolog of NCBI NO: 20149736 NR Description: mevalonate (diphospho) decarboxylase
  misc_feature (1)..(408): Homolog of NCBI NO: 21593039 NR Description: mevalonate diphosphate decarboxylase [Arabidopsis
  misc_feature (1)..(408): Homolog of NCBI NO: 11281655 NR Description: diphosphomevalonate decarboxylase (EC 4.1.1.33)
  misc_feature (1)..(408): Homolog of NCBI NO: 15224931 NR Description: mevalonate diphosphate decarboxylase
  misc_feature (1)..(408): Homolog of NCBI NO: 21593243 NR Description: diphosphomevalonate decarboxylase-like protein
  misc_feature (1)..(408): Homolog of NCBI NO: 18410026 NR Description: DIPHOSPHOMEVALONATE DECARBOXYLASE - like protein
  misc_feature (1)..(408): Homolog of NCBI NO: 16417950 NR Description: mevalonate disphosphate decarboxylase [Hevea
MATGRTPTNIAVIKYWGKRDEALILPINDSISVTLDPDHLSATTTVAVSPSFPSDRMWLNGKEISLLGGRFQSCLREIRKRARDFEDKEKGVKIKKEDWDKLHVHIASYNNFPTAAGLASSAAGLACFVFTLGKLMNAKEDYGELSSIARQGSGSACRSIYGGFVKWCMGEKDDGSDSIAVQLADETHWNDLVIIIAVVSSKQKETSSTSGMRDSVETSPLLQYRAQTVVPGRVLKMEEAIKNRDFESFAKLTCADSNQFHAVCLDTSPPIFYMNDTSHRIISLVEKWNHSEGTPQVAYTFDAGPNAVLIAQNRKTAAHLLQKLLYYFPPQDNDLSSYLVGDKSILGVAGLHSMKDVEALPAPPETKIPDQKFKGDVSYFICSRLGAGPKVVSDEGQALIDSVTGLPKGV

SEQ ID NO: 2138 - DNA, 1984 bp, Zea mays subsp. mays
  misc_feature (1)..(1984): Ceres Seq. ID no. 12595533
  misc_feature: MA Experiment ID: 108522 Result: Up-regulated in Transcription
  misc_feature: MA Experiment 108522 PARAMETER Experiment Name: Zm_42deg_Heat_P Parameter: Age (day) Value: 8
  misc_feature: MA Experiment 108522 PARAMETER Experiment Name: Zm_42deg_Heat_P Parameter: Organism Value: Zea mays
  misc_feature: MA Experiment 108522 PARAMETER Experiment Name: Zm_42deg_Heat_P Parameter: Plant Line Value: 35A19
  misc_feature: MA Experiment 108522 PARAMETER Experiment Name: Zm_42deg_Heat_P Parameter: Temperature (deg C) Value: 42 vs. 22
  misc_feature: MA Experiment 108522 PARAMETER Experiment Name: Zm_42deg_Heat_P Parameter: Timepoint (hr) Value: 1
  misc_feature: MA Experiment 108522 PARAMETER Experiment Name: Zm_42deg_Heat_P Parameter: Tissue Value: Aerial
  misc_feature: MA Experiment ID: 108527 Result: Down-regulated in Transcription
  misc_feature: MA Experiment 108527 PARAMETER Experiment Name: Zm_5mM_NO_P Parameter: Age (day) Value: 8
  misc_feature: MA Experiment 108527 PARAMETER Experiment Name: Zm_5mM_NO_P Parameter: Organism Value: Zea mays
  misc_feature: MA Experiment 108527 PARAMETER Experiment Name: Zm_5mM_NO_P Parameter: Plant Line Value: 35A19
  misc_feature: MA Experiment 108527 PARAMETER Experiment Name: Zm_5mM_NO_P Parameter: Timepoint (hr) Value: 6
  misc_feature: MA Experiment 108527 PARAMETER Experiment Name: Zm_5mM_NO_P Parameter: Tissue Value: Aerial
  misc_feature: MA Experiment 108527 PARAMETER Experiment Name: Zm_5mM_NO_P Parameter: Treatment Value: 5mM NO vs. No Treatment
  misc_feature: MA Experiment ID: 108528 Result: Up-regulated in Transcription
  misc_feature: MA Experiment 108528 PARAMETER Experiment Name: Zm_Imbibed_Seeds_P Parameter: Age (day) Value: 5 vs. 2
  misc_feature: MA Experiment 108528 PARAMETER Experiment Name: Zm_Imbibed_Seeds_P Parameter: Organism Value: Zea mays
  misc_feature: MA Experiment 108528 PARAMETER Experiment Name: Zm_Imbibed_Seeds_P Parameter: Plant Line Value: 35A19
  misc_feature: MA Experiment 108528 PARAMETER Experiment Name: Zm_Imbibed_Seeds_P Parameter: Tissue Value: Aerial vs. Embryo
  misc_feature: MA Experiment ID: 108529 Result: Down-regulated in Transcription
  misc_feature: MA Experiment 108529 PARAMETER Experiment Name: Zm_Imbibed_Seeds_P Parameter: Age (day) Value: 5 vs. 2
  misc_feature: MA Experiment 108529 PARAMETER Experiment Name: Zm_Imbibed_Seeds_P Parameter: Organism Value: Zea mays
  misc_feature: MA Experiment 108529 PARAMETER Experiment Name: Zm_Imbibed_Seeds_P Parameter: Plant Line Value: 35A19
  misc_feature: MA Experiment 108529 PARAMETER Experiment Name: Zm_Imbibed_Seeds_P Parameter: Tissue Value: Roots vs. Embryo
  misc_feature: MA Experiment ID: 108530 Result: Up-regulated in Transcription
  misc_feature: MA Experiment 108530 PARAMETER Experiment Name: Zm_Imbibed_Seeds_P Parameter: Age (day) Value: 6 vs. 2
  misc_feature: MA Experiment 108530 PARAMETER Experiment Name: Zm_Imbibed_Seeds_P Parameter: Organism Value: Zea mays
  misc_feature: MA Experiment 108530 PARAMETER Experiment Name: Zm_Imbibed_Seeds_P Parameter: Plant Line Value: 35A19
  misc_feature: MA Experiment 108530 PARAMETER Experiment Name: Zm_Imbibed_Seeds_P Parameter: Tissue Value: Aerial vs. Embryo
  misc_feature: MA Experiment ID: 108536 Result: Down-regulated in Transcription
  misc_feature: MA Experiment 108536 PARAMETER Experiment Name: Zm_Meristem_P Parameter: Age (day) Value: 8
  misc_feature: MA Experiment 108536 PARAMETER Experiment Name: Zm_Meristem_P Parameter: Organism Value: Zea mays
  misc_feature: MA Experiment 108536 PARAMETER Experiment Name: Zm_Meristem_P Parameter: Plant Line Value: 35A19
  misc_feature: MA Experiment 108536 PARAMETER Experiment Name: Zm_Meristem_P Parameter: Tissue Value: Shoot Meristem vs. Above Shoot Meristem
  misc_feature: MA Experiment ID: 108543 Result: Up-regulated in Transcription
  misc_feature: MA Experiment ID: 108545 Result: Up-regulated in Transcription
  misc_feature: MA Experiment 108545 PARAMETER Experiment Name: Zm_Imbibed_Seeds_P Parameter: Age (day) Value: 3 vs. 2
  misc_feature: MA Experiment 108545 PARAMETER Experiment Name: Zm_Imbibed_Seeds_P Parameter: Organism Value: Zea mays
  misc_feature: MA Experiment 108545 PARAMETER Experiment Name: Zm_Imbibed_Seeds_P Parameter: Plant Line Value: 35A19
  misc_feature: MA Experiment 108545 PARAMETER Experiment Name: Zm_Imbibed_Seeds_P Parameter: Tissue Value: Aerial vs. Embryo
  misc_feature: MA Experiment ID: 108546 Result: Down-regulated in Transcription
  misc_feature: MA Experiment 108546 PARAMETER Experiment Name: Zm_Imbibed_Seeds_P Parameter: Age (day) Value: 3 vs. 2
  misc_feature: MA Experiment 108546 PARAMETER Experiment Name: Zm_Imbibed_Seeds_P Parameter: Organism Value: Zea mays
  misc_feature: MA Experiment 108546 PARAMETER Experiment Name: Zm_Imbibed_Seeds_P Parameter: Plant Line Value: 35A19
  misc_feature: MA Experiment 108546 PARAMETER Experiment Name: Zm_Imbibed_Seeds_P Parameter: Tissue Value: Roots vs. Embryo
  misc_feature: MA Experiment ID: 108547 Result: Up-regulated in Transcription
  misc_feature: MA Experiment 108547 PARAMETER Experiment Name: Zm_Imbibed_Seeds_P Parameter: Age (day) Value: 4 vs. 2
  misc_feature: MA Experiment 108547 PARAMETER Experiment Name: Zm_Imbibed_Seeds_P Parameter: Organism Value: Zea mays
  misc_feature: MA Experiment 108547 PARAMETER Experiment Name: Zm_Imbibed_Seeds_P Parameter: Plant Line Value: 35A19
  misc_feature: MA Experiment 108547 PARAMETER Experiment Name: Zm_Imbibed_Seeds_P Parameter: Tissue Value: Aerial vs. Embryo
  misc_feature: MA Experiment ID: 108556 Result: Down-regulated in Transcription
  misc_feature: MA Experiment 108556 PARAMETER Experiment Name: Zm_Drought_P Parameter: Age (day) Value: 9
  misc_feature: MA Experiment 108556 PARAMETER Experiment Name: Zm_Drought_P Parameter: Organism Value: Zea mays
  misc_feature: MA Experiment 108556 PARAMETER Experiment Name: Zm_Drought_P Parameter: Plant Line Value: 35A19
  misc_feature: MA Experiment 108556 PARAMETER Experiment Name: Zm_Drought_P Parameter: Timepoint (hr) Value: 24
  misc_feature: MA Experiment 108556 PARAMETER Experiment Name: Zm_Drought_P Parameter: Tissue Value: Aerial
  misc_feature: MA Experiment 108556 PARAMETER Experiment Name: Zm_Drought_P Parameter: Treatment Value: Drought vs. No Drought
  misc_feature: MA Experiment ID: 108689 Result: Down-regulated in Transcription
  misc_feature: MA Experiment 108689 PARAMETER Experiment Name: Zm_Drought_Roots_P Parameter: Age (day) Value: 9
  misc_feature: MA Experiment 108689 PARAMETER Experiment Name: Zm_Drought_Roots_P Parameter: Organism Value: Zea mays
  misc_feature: MA Experiment 108689 PARAMETER Experiment Name: Zm_Drought_Roots_P Parameter: Plant Line Value: 35A19
  misc_feature: MA Experiment 108689 PARAMETER Experiment Name: Zm_Drought_Roots_P Parameter: Timepoint (hr) Value: 24
  misc_feature: MA Experiment 108689 PARAMETER Experiment Name: Zm_Drought_Roots_P Parameter: Tissue Value: Roots
  misc_feature: MA Experiment 108689 PARAMETER Experiment Name: Zm_Drought_Roots_P Parameter: Treatment Value: Drought vs. No Drought
  misc_feature: MA Experiment ID: 20000480 Result: Down-regulated in Transcription
  misc_feature: MA Experiment 20000480 PARAMETER Experiment Name: Zm_Drought_P Parameter: Age (day) Value: 11
  misc_feature: MA Experiment 20000480 PARAMETER Experiment Name: Zm_Drought_P Parameter: Organism Value: Zea mays
  misc_feature: MA Experiment 20000480 PARAMETER Experiment Name: Zm_Drought_P Parameter: Plant Line Value: 35A19
  misc_feature: MA Experiment 20000480 PARAMETER Experiment Name: Zm_Drought_P Parameter: Timepoint (hr) Value: 72
  misc_feature: MA Experiment 20000480 PARAMETER Experiment Name: Zm_Drought_P Parameter: Tissue Value: Aerial
  misc_feature: MA Experiment 20000480 PARAMETER Experiment Name: Zm_Drought_P Parameter: Treatment Value: Drought vs. No Drought
  misc_feature: MA Experiment ID: 20000626 Result: Down-regulated in Transcription
  misc_feature: MA Experiment 20000626 PARAMETER Experiment Name: Zm_Herbicide-Treatments_P Parameter: Timepoint (hr) Value: 12
  misc_feature: MA Experiment 20000626 PARAMETER Experiment Name: Zm_Herbicide-Treatments_P Parameter: Tissue Value: Aerial
  misc_feature: MA Experiment 20000626 PARAMETER Experiment Name: Zm_Herbicide-Treatments_P Parameter: Treatment Value: Roundup vs. No Treatment
  misc_feature: MA Experiment ID: 20001606 Result: Up-regulated in Transcription
  misc_feature: MA Experiment 20001606 PARAMETER Experiment Name: Zm_50ppm_KNO3_L-to-H_P Parameter: Age (day) Value: 19
  misc_feature: MA Experiment 20001606 PARAMETER Experiment Name: Zm_50ppm_KNO3_L-to-H_P Parameter: Organism Value: Zea mays
  misc_feature: MA Experiment 20001606 PARAMETER Experiment Name: Zm_50ppm_KNO3_L-to-H_P Parameter: Plant Line Value: 35A19
  misc_feature: MA Experiment 20001606 PARAMETER Experiment Name: Zm_50ppm_KNO3_L-to-H_P Parameter: Timepoint (hr) Value: 8
  misc_feature: MA Experiment 20001606 PARAMETER Experiment Name: Zm_50ppm_KNO3_L-to-H_P Parameter: Tissue Value: Shoots
  misc_feature: MA Experiment 20001606 PARAMETER Experiment Name: Zm_50ppm_KNO3_L-to-H_P Parameter: Treatment Value: 50ppm KNO3 vs. 50ppm KCl
  misc_feature: MA Experiment ID: 20001608 Result: Up-regulated in Transcription
  misc_feature: MA Experiment 20001608 PARAMETER Experiment Name: Zm_50ppm_KNO3_L-to-H_P Parameter: Age (day) Value: 21
  misc_feature: MA Experiment 20001608 PARAMETER Experiment Name: Zm_50ppm_KNO3_L-to-H_P Parameter: Organism Value: Zea mays
  misc_feature: MA Experiment 20001608 PARAMETER Experiment Name: Zm_50ppm_KNO3_L-to-H_P Parameter: Plant Line Value: 35A19
  misc_feature: MA Experiment 20001608 PARAMETER Experiment Name: Zm_50ppm_KNO3_L-to-H_P Parameter: Timepoint (hr) Value: 48
  misc_feature: MA Experiment 20001608 PARAMETER Experiment Name: Zm_50ppm_KNO3_L-to-H_P Parameter: Tissue Value: Shoots
  misc_feature: MA Experiment 20001608 PARAMETER Experiment Name: Zm_50ppm_KNO3_L-to-H_P Parameter: Treatment Value: 50ppm KNO3 vs. 50ppm KCl
agaagtttcagatcctcgcatcgtccgcaccttatcctctcgactttacagtacctgctctcagctcctccctatctcaatggcatccgcgaatgccatctccaccgcctcccccttccggcccctctctcagggcagggcgacgaggtcacagcggttcgtggtgcgtgcgaacgccaaagacattgcctttgaccagaaatccagggcagcgctgcaggccggcgtcgagaagctcgcaaacgccgtcggtgtcaccctcgggccacgagggaggaatgtggtgctcgatgagtacggcaaccccaaagttgtgaatgatggagtcactattgcccgtgctattgagctgtatgatccaatggaaaatgctggtgcagcattgattcgtgaggttgctagcaagaccaatgattcagctggtgatgggactacaactgcatgcgtccttgctcgtgaaatcatcaagctaggccttctgagtgtaacatctggtgcaaatcctgtatcactaaagaaaggaatagacaaaactgtgcagggcctaattcaggagcttgagaataagtctagaccaatcaagggtggtggtgatatcaaagctgttgcatctatctctgctggcaatgatgaatttatcggatccatgattgctgaagcaattgacaaagtggggcctgatggtgttctatcaattgaatcctcctcgtcttttgagaccactgttgaagttgaagaaggaatggagattgaccgcggttatatttccccacaatttgtgacaaaccttgagaaatcaattgtggagtttgagaattgtaaggttcttattactgatcagaagatcacaagcataaaggaaatccttccgattttggagaagaccacacagctgagagcccctctgttcattattgctgaggacattactggtgaagctttggcaactcttgttgttaacaagcttcgaggaattctcaatgttgcagcgattaaggctccaagttttggtgagcggcggaaggctgtacttcaggacattgccatcgtcacaggtgctgagttcctagcaaaagatcttggtttgttggttgaaaatgctacagaggaacaacttggcacagcaaggaaagtcacgatacatcagactacaacaaccctcatagcagatgcagccagtaaagatgagatccaggcgagaattgcacaactgaagaaggagcttgctgagactgattcagtttatgatactgagaaattggccgagagaattgctaagcttgccggtggtgttgctgttatcaaggttggagctgcaactgagactgagcttgaggaccgccagctaagaattgaggatgcaaaaaatgccacttttgcagctatagaggagggcattgttccaggaggtggtgcggcatatgtgcacctatctacggttgtccctaagatcaaagaagcaattgaggaccctgatgagcgtcttggcgctgatattattcaaaaggcattggtagcacctgcttcattgattgcacacaatgctggagtagagggtgaagtagttgtcgagaagatcaaggacagcgattgggaggtgggctacaatgcaatgactgacaagtacgagaacctgatggaggctggtgtgatcgaccctgccaaggtgaccaggtgtgcgctccagaatgcggcctcagtagctggaatggtcctaaccacacaggccattgttgttgagaagccaaagccgaagcctcaagtggcagagccaccggagggagcccttaccgtttaaaacttaacgttcttgaggctgctgtccagacggttcagatcagttgagagggtagaactttggtttgagaattttggttcagatccactgggagttatagagtaggattgctatttttcagacgaagagtaattttactctggtctgaacttatccgaatcgaagacatttgcatcaccatttttt

SEQ ID NO: 2139 - protein, 598 aa, Zea mays subsp. mays
  peptide (1)..(598): Ceres Seq. ID no. 12595534
  misc_feature (79)..(582): Pfam Name: TCP-1/cpn60 chaperonin family Pfam Description: TCP-1/cpn60 chaperonin family
  misc_feature (57)..(598): Homolog of NCBI NO: 134102 NR Description: RuBisCO subunit binding-protein alpha subunit,
  misc_feature (54)..(598): Homolog of NCBI NO: 31193919 NR Description: putative rubisco subunit binding-protein alpha
  misc_feature (27)..(598): Homolog of NCBI NO: 1710807 NR Description: RuBisCO subunit binding-protein alpha subunit,
  misc_feature (52)..(596): Homolog of NCBI NO: 1351030 NR Description: RuBisCO subunit binding-protein alpha subunit,
  misc_feature (27)..(596): Homolog of NCBI NO: 15226314 NR Description: putative rubisco subunit binding-protein alpha protein id: At2g28000.1, supported by cDNA: 25773. [Arabidopsis
  misc_feature (27)..(596): Homolog of NCBI NO: 21554572 NR Description: putative rubisco subunit binding-protein alpha
  misc_feature (27)..(598): Homolog of NCBI NO: 3790441 NR Description: chaperonin 60 alpha subunit [Canavalia lineata]
  misc_feature (51)..(596): Homolog of NCBI NO: 99801 NR Description: chaperonine 60K alpha chain - rape (fragment)
  misc_feature (27)..(596): Homolog of NCBI NO: 464727 NR Description: RuBisCO subunit binding-protein alpha subunit,
  misc_feature (69)..(564): Homolog of NCBI NO: 5650721 NR Description: rubisco subunit binding-protein alpha subunit ( AA) (1 is 3rd base in codon) (1488 is 2nd base in codon) [Ricinus
EVSDPRIVRTLSSRLYSTCSQLLPISMASANAISTASPFRPLSQGRATRSQRFVVRANAKDIAFDQKSRAALQAGVEKLANAVGVTLGPRGRNVVLDEYGNPKVVNDGVTIARAIELYDPMENAGAALIREVASKTNDSAGDGTTTACVLAREIIKLGLLSVTSGANPVSLKKGIDKTVQGLIQELENKSRPIKGGGDIKAVASISAGNDEFIGSMIAEAIDKVGPDGVLSIESSSSFETTVEVEEGMEIDRGYISPQFVTNLEKSIVEFENCKVLITDQKITSIKEILPILEKTTQLRAPLFIIAEDITGEALATLVVNKLRGILNVAAIKAPSFGERRKAVLQDIAIVTGAEFLAKDLGLLVENATEEQLGTARKVTIHQTTTTLIADAASKDEIQARIAQLKKELAETDSVYDTEKLAERIAKLAGGVAVIKVGAATETELEDRQLRIEDAKNATFAAIEEGIVPGGGAAYVHLSTVVPKIKEAIEDPDERLGADIIQKALVAPASLIAHNAGVEGEVVVEKIKDSDWEVGYNAMTDKYENLMEAGVIDPAKVTRCALQNAASVAGMVLTTQAIVVEKPKPKPQVAEPPEGALTV

SEQ ID NO: 2140 - protein, 572 aa, Zea mays subsp. mays
  peptide (1)..(572): Ceres Seq. ID no. 12595535
  misc_feature (53)..(556): Pfam Name: TCP-1/cpn60 chaperonin family Pfam Description: TCP-1/cpn60 chaperonin family
  misc_feature (31)..(572): Homolog of NCBI NO: 134102 NR Description: RuBisCO subunit binding-protein alpha subunit,
  misc_feature (28)..(572): Homolog of NCBI NO: 31193919 NR Description: putative rubisco subunit binding-protein alpha
  misc_feature (1)..(572): Homolog of NCBI NO: 1710807 NR Description: RuBisCO subunit binding-protein alpha subunit,
  misc_feature (26)..(570): Homolog of NCBI NO: 1351030 NR Description: RuBisCO subunit binding-protein alpha subunit,
  misc_feature (1)..(570): Homolog of NCBI NO: 15226314 NR Description: putative rubisco subunit binding-protein alpha protein id: At2g28000.1, supported by cDNA: 25773. [Arabidopsis
  misc_feature (1)..(570): Homolog of NCBI NO: 21554572 NR Description: putative rubisco subunit binding-protein alpha
  misc_feature (1)..(572): Homolog of NCBI NO: 3790441 NR Description: chaperonin 60 alpha subunit [Canavalia lineata]
  misc_feature (25)..(570): Homolog of NCBI NO: 99801 NR Description: chaperonine 60K alpha chain - rape (fragment)
  misc_feature (1)..(570): Homolog of NCBI NO: 464727 NR Description: RuBisCO subunit binding-protein alpha subunit,
  misc_feature (43)..(538): Homolog of NCBI NO: 5650721 NR Description: rubisco subunit binding-protein alpha subunit ( AA) (1 is 3rd base in codon) (1488 is 2nd base in codon) [Ricinus
MASANAISTASPFRPLSQGRATRSQRFVVRANAKDIAFDQKSRAALQAGVEKLANAVGVTLGPRGRNVVLDEYGNPKVVNDGVTIARAIELYDPMENAGAALIREVASKTNDSAGDGTTTACVLAREIIKLGLLSVTSGANPVSLKKGIDKTVQGLIQELENKSRPIKGGGDIKAVASISAGNDEFIGSMIAEAIDKVGPDGVLSIESSSSFETTVEVEEGMEIDRGYISPQFVTNLEKSIVEFENCKVLITDQKITSIKEILPILEKTTQLRAPLFIIAEDITGEALATLVVNKLRGILNVAAIKAPSFGERRKAVLQDIAIVTGAEFLAKDLGLLVENATEEQLGTARKVTIHQTTTTLIADAASKDEIQARIAQLKKELAETDSVYDTEKLAERIAKLAGGVAVIKVGAATETELEDRQLRIEDAKNATFAAIEEGIVPGGGAAYVHLSTVVPKIKEAIEDPDERLGADIIQKALVAPASLIAHNAGVEGEVVVEKIKDSDWEVGYNAMTDKYENLMEAGVIDPAKVTRCALQNAASVAGMVLTTQAIVVEKPKPKPQVAEPPEGALTV

SEQ ID NO: 2141 - protein, 478 aa, Zea mays subsp. mays
  peptide (1)..(478): Ceres Seq. ID no. 12595536
  misc_feature (1)..(462): Pfam Name: TCP-1/cpn60 chaperonin family Pfam Description: TCP-1/cpn60 chaperonin family
  misc_feature (1)..(476): Homolog of NCBI NO: 1351030 NR Description: RuBisCO subunit binding-protein alpha subunit,
  misc_feature (1)..(476): Homolog of NCBI NO: 15226314 NR Description: putative rubisco subunit binding-protein alpha protein id: At2g28000.1, supported by cDNA: 25773. [Arabidopsis
  misc_feature (1)..(476): Homolog of NCBI NO: 21554572 NR Description: putative rubisco subunit binding-protein alpha
  misc_feature (1)..(478): Homolog of NCBI NO: 3790441 NR Description: chaperonin 60 alpha subunit [Canavalia lineata]
  misc_feature (1)..(478): Homolog of NCBI NO: 31193919 NR Description: putative rubisco subunit binding-protein alpha
  misc_feature (1)..(478): Homolog of NCBI NO: 1710807 NR Description: RuBisCO subunit binding-protein alpha subunit,
  misc_feature (1)..(478): Homolog of NCBI NO: 134102 NR Description: RuBisCO subunit binding-protein alpha subunit,
  misc_feature (1)..(476): Homolog of NCBI NO: 99801 NR Description: chaperonine 60K alpha chain - rape (fragment)
  misc_feature (1)..(476): Homolog of NCBI NO: 464727 NR Description: RuBisCO subunit binding-protein alpha subunit,
  misc_feature (1)..(444): Homolog of NCBI NO: 5650721 NR Description: rubisco subunit binding-protein alpha subunit ( AA) (1 is 3rd base in codon) (1488 is 2nd base in codon) [Ricinus
MENAGAALIREVASKTNDSAGDGTTTACVLAREIIKLGLLSVTSGANPVSLKKGIDKTVQGLIQELENKSRPIKGGGDIKAVASISAGNDEFIGSMIAEAIDKVGPDGVLSIESSSSFETTVEVEEGMEIDRGYISPQFVTNLEKSIVEFENCKVLITDQKITSIKEILPILEKTTQLRAPLFIIAEDITGEALATLVVNKLRGILNVAAIKAPSFGERRKAVLQDIAIVTGAEFLAKDLGLLVENATEEQLGTARKVTIHQTTTTLIADAASKDEIQARIAQLKKELAETDSVYDTEKLAERIAKLAGGVAVIKVGAATETELEDRQLRIEDAKNATFAAIEEGIVPGGGAAYVHLSTVVPKIKEAIEDPDERLGADIIQKALVAPASLIAHNAGVEGEVVVEKIKDSDWEVGYNAMTDKYENLMEAGVIDPAKVTRCALQNAASVAGMVLTTQAIVVEKPKPKPQVAEPPEGALTV

SEQ ID NO: 2142 - DNA, 1320 bp, Zea mays subsp. mays
  misc_feature (1)..(1320): Ceres Seq. ID no. 12365213
  misc_feature: MA Experiment ID: 20000480 Result: Up-regulated in Transcription
  misc_feature: MA Experiment 20000480 PARAMETER Experiment Name: Zm_Drought_P Parameter: Age (day) Value: 11
  misc_feature: MA Experiment 20000480 PARAMETER Experiment Name: Zm_Drought_P Parameter: Organism Value: Zea mays
  misc_feature: MA Experiment 20000480 PARAMETER Experiment Name: Zm_Drought_P Parameter: Plant Line Value: 35A19
  misc_feature: MA Experiment 20000480 PARAMETER Experiment Name: Zm_Drought_P Parameter: Timepoint (hr) Value: 72
  misc_feature: MA Experiment 20000480 PARAMETER Experiment Name: Zm_Drought_P Parameter: Tissue Value: Aerial
  misc_feature: MA Experiment 20000480 PARAMETER Experiment Name: Zm_Drought_P Parameter: Treatment Value: Drought vs. No Drought
gtcaggacccggaccaaaccaatcagggcggctcgggcgcggcggcgacacagggcaaggaggccgaacgttggggggaccggggctcgacgccagccgtggatcgcctgcggagggggacaagcgtctgcctcatgtcccgcgacggcggggaatagggcgacggcgtcggcggcggggatcggttgcggcggcgtgacgaggcggctacggcggcggctcgggagggaggcggcaccatgtctgcggtagtctgtggcaagaggtcctcctccatcttcgccgacgagctcctcccgccgtctccttcctcccctcactcctcccaccagccggcggccaagaggtcccgccgctccccctcgcaccgcggcggctccgacggactccgaccggaggcgctcgtcgactatctacttgccctcttccccgacatggatccacagttacttgaaaaagctctggaagcatctggagatgacttggattctgcgataaaaagtttgaatttgctgcgcttagagtcagcagaagctatcttgtcatcgactggtttcaaacctgaaaattgtctgcaaacagccaattcagccttctcttgaaggtattcctaatggtggtgtggatacggttacagaacatccgcctagcgtagataattaccagacaagttataatggctctgaatgggttgagctattagtcacagagatgagaaatgcttctgacataaacgatgcacgggctcgtgcgtcaagagctctggaggctttggagaaaacgattgtagagcgtgcaggagctgaagctacacaaaacctgcataaggaaaacatgatgctcaaggagcagttgactgttgttctgcgagagaactccgtgctgaagcgggcagtcgccattcagcacgagcgccaaaaggagttcgacgagaggtctcacgaggtccagaacttgaagcaacttgttctgcagtaccaggagcaagttaggactctagagatgaacaactacgccctcacaatgcatctcaagcaggctcaacagaacagctccatacctgggcgtttcaaccctgatgttttctaagcgtagtagctgctgaacggtccgccccagattaataagctatgtatgaatatatcttgttctaccaactgctcctgagatggggatatccgataggtggattcaccgcccaagggtccagaattttcaagtcactatggttttgatttcgatatactccgtatttatttaaacgtgttgctttcatgcaattggctatccgatatattgtgtgcgcccacttttccgggc

SEQ ID NO: 2143 - protein, 125 aa, Zea mays subsp. mays
  peptide (1)..(125): Ceres Seq. ID no. 12365214
  misc_feature (1)..(92): Homolog of NCBI NO: 35215036 NR Description: hypothetical protein [Oryza sativa (japonica
  misc_feature (65)..(125): Homolog of NCBI NO: 35215036 NR Description: hypothetical protein [Oryza sativa (japonica
  misc_feature (1)..(125): Homolog of NCBI NO: 15241851 NR Description: putative protein; protein id: At5g02510.1
  misc_feature (1)..(125): Homolog of NCBI NO: 18412607 NR Description: expressed protein
  misc_feature (1)..(125): Homolog of NCBI NO: 34015166 NR Description: hypothetical protein OSJNBa0017M13.20
  misc_feature (1)..(125): Homolog of NCBI NO: 13877755 NR Description: unknown protein [Arabidopsis thaliana]
  misc_feature (1)..(125): Homolog of NCBI NO: 18421340 NR Description: putative protein
MRNASDINDARARASRALEALEKTIVERAGAEATQNLHKENMMLKEQLTVVLRENSVLKRAVAIQHERQKEFDERSHEVQNLKQLVLQYQEQVRTLEMNNYALTMHLKQAQQNSSIPGRFNPDVF

SEQ ID NO: 2144 - protein, 120 aa, Zea mays subsp. mays
  peptide (1)..(120): Ceres Seq. ID no. 12365215
  misc_feature (1)..(108): Homolog of NCBI NO: 35215037 NR Description: hypothetical protein [Oryza sativa (japonica
  misc_feature (1)..(89): Homolog of NCBI NO: 18412607 NR Description: expressed protein
  misc_feature (1)..(108): Homolog of NCBI NO: 34015166 NR Description: hypothetical protein OSJNBa0017M13.20
  misc_feature (1)..(97): Homolog of NCBI NO: 13877755 NR Description: unknown protein [Arabidopsis thaliana]
  misc_feature (1)..(97): Homolog of NCBI NO: 18421340 NR Description: putative protein
MSAVVCGKRSSSIFADELLPPSPSSPHSSHQPAAKRSRRSPSHRGGSDGLRPEALVDYLLALFPDMDPQLLEKALEASGDDLDSAIKSLNLLRLESAEAILSSTGFKPENCLQTANSAFS

SEQ ID NO: 2145 - protein, 84 aa, Zea mays subsp. mays
  peptide (1)..(84): Ceres Seq. ID no. 12365216
  misc_feature (1)..(51): Homolog of NCBI NO: 35215036 NR Description: hypothetical protein [Oryza sativa (japonica
  misc_feature (24)..(84): Homolog of NCBI NO: 35215036 NR Description: hypothetical protein [Oryza sativa (japonica
  misc_feature (1)..(84): Homolog of NCBI NO: 15241851 NR Description: putative protein; protein id: At5g02510.1
  misc_feature (1)..(84): Homolog of NCBI NO: 18412607 NR Description: expressed protein
  misc_feature (1)..(84): Homolog of NCBI NO: 34015166 NR Description: hypothetical protein OSJNBa0017M13.20
  misc_feature (1)..(84): Homolog of NCBI NO: 13877755 NR Description: unknown protein [Arabidopsis thaliana]
  misc_feature (1)..(84): Homolog of NCBI NO: 18421340 NR Description: putative protein
MMLKEQLTVVLRENSVLKRAVAIQHERQKEFDERSHEVQNLKQLVLQYQEQVRTLEMNNYALTMHLKQAQQNSSIPGRFNPDVF

SEQ ID NO: 2146 - DNA, 1345 bp, Zea mays subsp. mays
  misc_feature (1)..(1345): Ceres Seq. ID no. 12341582
  misc_feature: MA Experiment ID: 108522 Result: Up-regulated in Transcription
  misc_feature: MA Experiment 108522 PARAMETER Experiment Name: Zm_42deg_Heat_P Parameter: Age (day) Value: 8
  misc_feature: MA Experiment 108522 PARAMETER Experiment Name: Zm_42deg_Heat_P Parameter: Organism Value: Zea mays
  misc_feature: MA Experiment 108522 PARAMETER Experiment Name: Zm_42deg_Heat_P Parameter: Plant Line Value: 35A19
  misc_feature: MA Experiment 108522 PARAMETER Experiment Name: Zm_42deg_Heat_P Parameter: Temperature (deg C) Value: 42 vs. 22
  misc_feature: MA Experiment 108522 PARAMETER Experiment Name: Zm_42deg_Heat_P Parameter: Timepoint (hr) Value: 1
  misc_feature: MA Experiment 108522 PARAMETER Experiment Name: Zm_42deg_Heat_P Parameter: Tissue Value: Aerial
gcgcgactagactagccttcagccttctccagttctcctctcctcctcgttttttcccctcctcaacgcctggacggaactgaagccagccagcctgcccagccaaggtgaccggagacaagtaaaaatctcgccggtcttctcacagaccacaaacattgcgcttgctgcccagctataagtactcgccggactaggcggccaactcatcccatcccatttcatccatctcggagcagaggcaacgcaatccggcaaaaaggcgcttctttcttgccctgttcgggacaggacacagacacagagccaggagacggaaccgtcggaggctaagcttcttcttcgtctttcctgggcgcgctcaagtggcgatggcatttgcggtctccgacgagctgctgggcaccttcgtgccgattgcggtgtactggctctactcggggctctacgtcgtcctggacgggctcgggatggacgactacaggctccatcccaagggggaggaggaggccaagaacatcgtttccaggtccacggtcgtcaggggcgtccttgttcagcaggcgtttcaaatcgctgtctcccttcttctcttcacggttcttggtgatgagaatgaggctgcgaggaagcaacctccggctctggtgttggcattgcaatttatcgttgcaatgttcgtcatggacacatggcagtatttcatgcacagatacatgcacatcaacaagttcttgtacaagcacgtccactctaagcaccacacccttgtcgtcccctacgcttttggagctctgtacaaccaccccctggagggactcatcctggacaccatcggtggcgcgctctcgttcctcatctctggcatgaccccgaggactggcatattcttcttctcgttcgcgaccatcaagaccgtcgacgaccactgtggtctgtggcttcctgggaacatcctccatgtattcttcagcaacaacagcgcttaccatgacatccaccatcagctctacggcaacaagtacaacttctctcagcccttctttgtcatgtgggacaagatccttggaacatacatgccttacactctggagacccgcaagggaggtggtctcgaggcgcgcccggttaagctcaaccaagcacagcagaccaaggctgattgagcagtgtggtttctcctgtttatctactacttcccctgattttttccccttctgactgcatttgtactgtagaagtatttcctgtccatatagtaaaatcatttaggcaaatgccatgttgtacccaacagatatagcaaataaaacatcttgttaatggagatccattgatgtttgtt

SEQ ID NO: 2147 - protein, 264 aa, Zea mays subsp. mays
  peptide (1)..(264): Ceres Seq. ID no. 12341583
  misc_feature (95)..(264): Homolog of NCBI NO: 40746027 NR Description: hypothetical protein AN0640.2 [Aspergillus
  misc_feature (92)..(242): Homolog of NCBI NO: 19113281 NR Description: hypothetical integral membrane protein, putative
  misc_feature (1)..(85): Homolog of NCBI NO: 34911990 NR Description: P0694A04.28 [Oryza sativa (japonica
  misc_feature (92)..(253): Homolog of NCBI NO: 34911990 NR Description: P0694A04.28 [Oryza sativa (japonica
  misc_feature (31)..(199): Homolog of NCBI NO: 5360721 NR Description: acid phosphatase [Lupinus albus]
  misc_feature (10)..(254): Homolog of NCBI NO: 34913184 NR Description: similar to acid phosphatase
  misc_feature (1)..(257): Homolog of NCBI NO: 25511716 NR Description: F14L17.5 protein - Arabidopsis thaliana
  misc_feature (1)..(257): Homolog of NCBI NO: 18394095 NR Description: acid phosphatase, putative
  misc_feature (1)..(254): Homolog of NCBI NO: 25404823 NR Description: probable sterol desaturase T6C23.16
  misc_feature (1)..(254): Homolog of NCBI NO: 22330531 NR Description: acid phosphatase, putative
MAFAVSDELLGTFVPIAVYWLYSGLYVVLDGLGMDDYRLHPKGEEEAKNIVSRSTVVRGVLVQQAFQIAVSLLLFTVLGDENEAARKQPPALVLALQFIVAMFVMDTWQYFMHRYMHINKFLYKHVHSKHHTLVVPYAFGALYNHPLEGLILDTIGGALSFLISGMTPRTGIFFFSFATIKTVDDHCGLWLPGNILHVFFSNNSAYHDIHHQLYGNKYNFSQPFFVMWDKILGTYMPYTLETRKGGGLEARPVKLNQAQQTKAD

SEQ ID NO: 2148 - protein, 231 aa, Zea mays subsp. mays
  peptide (1)..(231): Ceres Seq. ID no. 12341584
  misc_feature (1)..(224): Homolog of NCBI NO: 18394095 NR Description: acid phosphatase, putative
  misc_feature (1)..(221): Homolog of NCBI NO: 25404823 NR Description: probable sterol desaturase T6C23.16
  misc_feature (1)..(221): Homolog of NCBI NO: 22330531 NR Description: acid phosphatase, putative
  misc_feature (62)..(231): Homolog of NCBI NO: 40746027 NR Description: hypothetical protein AN0640.2 [Aspergillus
  misc_feature (59)..(209): Homolog of NCBI NO: 19113281 NR Description: hypothetical integral membrane protein, putative
  misc_feature (1)..(52): Homolog of NCBI NO: 34911990 NR Description: P0694A04.28 [Oryza sativa (japonica
  misc_feature (59)..(220): Homolog of NCBI NO: 34911990 NR Description: P0694A04.28 [Oryza sativa (japonica
  misc_feature (1)..(166): Homolog of NCBI NO: 5360721 NR Description: acid phosphatase [Lupinus albus]
  misc_feature (1)..(221): Homolog of NCBI NO: 34913184 NR Description: similar to acid phosphatase
  misc_feature (1)..(224): Homolog of NCBI NO: 25511716 NR Description: F14L17.5 protein - Arabidopsis thaliana
MDDYRLHPKGEEEAKNIVSRSTVVRGVLVQQAFQIAVSLLLFTVLGDENEAARKQPPALVLALQFIVAMFVMDTWQYFMHRYMHINKFLYKHVHSKHHTLVVPYAFGALYNHPLEGLILDTIGGALSFLISGMTPRTGIFFFSFATIKTVDDHCGLWLPGNILHVFFSNNSAYHDIHHQLYGNKYNFSQPFFVMWDKILGTYMPYTLETRKGGGLEARPVKLNQAQQTKAD

SEQ ID NO: 2149 - protein, 163 aa, Zea mays subsp. mays
  peptide (1)..(163): Ceres Seq. ID no. 12341585
  misc_feature (1)..(163): Homolog of NCBI NO: 32411679 NR Description: hypothetical protein [Neurospora crassa]
  misc_feature (1)..(163): Homolog of NCBI NO: 40746027 NR Description: hypothetical protein AN0640.2 [Aspergillus
  misc_feature (1)..(141): Homolog of NCBI NO: 19113281 NR Description: hypothetical integral membrane protein, putative
  misc_feature (1)..(152): Homolog of NCBI NO: 34911990 NR Description: P0694A04.28 [Oryza sativa (japonica
  misc_feature (1)..(98): Homolog of NCBI NO: 5360721 NR Description: acid phosphatase [Lupinus albus]
  misc_feature (1)..(153): Homolog of NCBI NO: 34913184 NR Description: similar to acid phosphatase
  misc_feature (1)..(156): Homolog of NCBI NO: 25511716 NR Description: F14L17.5 protein - Arabidopsis thaliana
  misc_feature (1)..(156): Homolog of NCBI NO: 18394095 NR Description: acid phosphatase, putative
  misc_feature (1)..(153): Homolog of NCBI NO: 25404823 NR Description: probable sterol desaturase T6C23.16
  misc_feature (1)..(153): Homolog of NCBI NO: 22330531 NR Description: acid phosphatase, putative
MFVMDTWQYFMHRYMHINKFLYKHVHSKHHTLVVPYAFGALYNHPLEGLILDTIGGALSFLISGMTPRTGIFFFSFATIKTVDDHCGLWLPGNILHVFFSNNSAYHDIHHQLYGNKYNFSQPFFVMWDKILGTYMPYTLETRKGGGLEARPVKLNQAQQTKAD

SEQ ID NO: 2150 - DNA, 1721 bp, Zea mays subsp. mays
  misc_feature (1)..(1721): Ceres Seq. ID no. 12372921
  misc_feature: MA Experiment ID: 108556 Result: Down-regulated in Transcription
  misc_feature: MA Experiment 108556 PARAMETER Experiment Name: Zm_Drought_P Parameter: Age (day) Value: 9
  misc_feature: MA Experiment 108556 PARAMETER Experiment Name: Zm_Drought_P Parameter: Organism Value: Zea mays
  misc_feature: MA Experiment 108556 PARAMETER Experiment Name: Zm_Drought_P Parameter: Plant Line Value: 35A19
  misc_feature: MA Experiment 108556 PARAMETER Experiment Name: Zm_Drought_P Parameter: Timepoint (hr) Value: 24
  misc_feature: MA Experiment 108556 PARAMETER Experiment Name: Zm_Drought_P Parameter: Tissue Value: Aerial
  misc_feature: MA Experiment 108556 PARAMETER Experiment Name: Zm_Drought_P Parameter: Treatment Value: Drought vs. No Drought
  misc_feature: MA Experiment ID: 20000477 Result: Down-regulated in Transcription
  misc_feature: MA Experiment 20000477 PARAMETER Experiment Name: Zm_5mM_SA_P Parameter: Age (day) Value: 10
  misc_feature: MA Experiment 20000477 PARAMETER Experiment Name: Zm_5mM_SA_P Parameter: Organism Value: Zea mays
  misc_feature: MA Experiment 20000477 PARAMETER Experiment Name: Zm_5mM_SA_P Parameter: Plant Line Value: 35A19
  misc_feature: MA Experiment 20000477 PARAMETER Experiment Name: Zm_5mM_SA_P Parameter: Timepoint (hr) Value: 48
  misc_feature: MA Experiment 20000477 PARAMETER Experiment Name: Zm_5mM_SA_P Parameter: Tissue Value: Aerial
  misc_feature: MA Experiment 20000477 PARAMETER Experiment Name: Zm_5mM_SA_P Parameter: Treatment Value: 5mM SA vs. No Treatment
  misc_feature: MA Experiment ID: 20000478 Result: Down-regulated in Transcription
  misc_feature: MA Experiment 20000478 PARAMETER Experiment Name: Zm_5mM_SA_P Parameter: Age (day) Value: 11
  misc_feature: MA Experiment 20000478 PARAMETER Experiment Name: Zm_5mM_SA_P Parameter: Organism Value: Zea mays
  misc_feature: MA Experiment 20000478 PARAMETER Experiment Name: Zm_5mM_SA_P Parameter: Plant Line Value: 35A19
  misc_feature: MA Experiment 20000478 PARAMETER Experiment Name: Zm_5mM_SA_P Parameter: Timepoint (hr) Value: 72
  misc_feature: MA Experiment 20000478 PARAMETER Experiment Name: Zm_5mM_SA_P Parameter: Tissue Value: Aerial
  misc_feature: MA Experiment 20000478 PARAMETER Experiment Name: Zm_5mM_SA_P Parameter: Treatment Value: 5mM SA vs. No Treatment
  misc_feature: MA Experiment ID: 20000535 Result: Up-regulated in Transcription
  misc_feature: MA Experiment 20000535 PARAMETER Experiment Name: Zm_Hybrid_Seed_Dev_P Parameter: DAP Value: 30 vs. 12
  misc_feature: MA Experiment 20000535 PARAMETER Experiment Name: Zm_Hybrid_Seed_Dev_P Parameter: Organism Value: Zea mays
  misc_feature: MA Experiment 20000535 PARAMETER Experiment Name: Zm_Hybrid_Seed_Dev_P Parameter: Plant Line Value: 35A19
  misc_feature: MA Experiment 20000535 PARAMETER Experiment Name: Zm_Hybrid_Seed_Dev_P Parameter: Tissue Value: Embryo vs. Unfert Floret
ataattccatagtctaacctgccaaccacttccaccgccaccgccgagcgcggtggcaccgacacgacacacgtagctgcagacctgcagtgccagcacggctgccaatccctgctggcgctgttcccggctccgagatcatttggactcggcactcggcagggatggggatggggacggaatggccgccgacgcctgcgcagcagaggaaagcggtggtgagcgccgggtcggcgctgaagctggtactgttcgtgattctcgcgggcctcgcactgcggctgctggtggggcccccagcctacctcctgccgcccaccgccgcgccagagggggccgctcgtcttttcgcggtgccggagagggaaagaaccgccggcggcggcggcggcggataccttccgtcgaaacggatgatgcggtttttactttgaccgattcagaacctctaacagctttaggcaagaaggaaggttccacaaaaccagaagaaagttgtgatcttttccatggcgagtgggttcccaattcatcaggaccagcttatactaatgcaagctgccgcttcattgagtctcctcagaactgtatgacaaatggaagacctgacacagattatctcaattggagatggaagccatatggttgtgaggtatcaccatttgacggcaagaagtttttggatggcatgaaaggcaagcattgggcactcattggtgattccatccttcgcaaccacgtccagtcattgctttgtcttctttccaaggtcgaagatgctactgaggtttaccacgacgatacattcagatccagaagatggcacttcccttcgtacaattttacgatctcccttgtctgggcaccattcctggtcaaagctaaaatatttgaggacgacgatggagtttctactgctgatctccagctgcaccttgacgttctcgagacagactggactagtcaatgggagaagttcgattacgcggtgatatccacgggccaatggttcttcaagactgcagtgtactgggagaatggagctgcgattggctgccactcctgccagaacaaaaccctggaagagaggcctccggagtactccttccgcagggcactcagggtggccttccagttcatcacatcctcacctcacaagccagtagtcttctacagaacgtgggctccctcgcattttgagaacggcgagtggttcagcggcgggacttgcaacaggacggccccattcaagccaggggaggccggtgacagagaatgggacaatagtatgtggaggattgagagagaagagtttcacaacgcggtgcctatcggtggtgaccgtctgaaactgctcgatacatttgagctctctctcctcaggcctgatggtcatccagggccttatagagcataccatccttacgagaagggcgtgacagccaaagtccagaatgactgcctccactggtgcttgcctgggcctattgatgcgtggaacgatgtaattatgaagatggtggcaaaggactgaagcattatcaggtggtagtgtggtaccctaggcatggcatctgatctgaacaccagtattgtctcaagtctcattttcatacatatgtatgtttctgggcattgcatggcgtctcctctatctggtgtcaagaaactcaagtagattcggacttctcttcatggtgggtatgatttttttttatgtt

SEQ ID NO: 2151 - protein, 450 aa, Zea mays subsp. mays
  peptide (1)..(450): Ceres Seq. ID no. 12372922
  misc_feature (277)..(445): Pfam Name: Arabidopsis proteins of unknown function Pfam Description: Arabidopsis proteins of unknown function
  misc_feature (103)..(449): Homolog of NCBI NO: 15223079 NR Description: unknown protein
  misc_feature (78)..(450): Homolog of NCBI NO: 15237213 NR Description: putative protein; protein id: At5g15900.1
  misc_feature (87)..(450): Homolog of NCBI NO: 15237211 NR Description: putative protein; protein id: At5g15890.1
  misc_feature (72)..(447): Homolog of NCBI NO: 25518737 NR Description: hypothetical protein F6F3.23 [imported] -
  misc_feature (106)..(445): Homolog of NCBI NO: 28393189 NR Description: unknown protein [Arabidopsis thaliana]
  misc_feature (106)..(445): Homolog of NCBI NO: 15234058 NR Description: hypothetical protein; protein id: At4g01080.1
  misc_feature (104)..(447): Homolog of NCBI NO: 30686312 NR Description: expressed protein [Arabidopsis thaliana]
  misc_feature (104)..(447): Homolog of NCBI NO: 7486743 NR Description: hypothetical protein F9D16.260 - Arabidopsis
  misc_feature (90)..(447): Homolog of NCBI NO: 30678135 NR Description: expressed protein [Arabidopsis thaliana]
  misc_feature (104)..(447): Homolog of NCBI NO: 15237044 NR Description: putative protein; protein id: At4g11090.1
MAADACAAEESGGERRVGAEAGTVRDSRGPRTAAAGGAPSLPPAAHRRARGGRSSFRGAGEGKNRRRRRRRIPSVETDDAVFTLTDSEPLTALGKKEGSTKPEESCDLFHGEWVPNSSGPAYTNASCRFIESPQNCMTNGRPDTDYLNWRWKPYGCEVSPFDGKKFLDGMKGKHWALIGDSILRNHVQSLLCLLSKVEDATEVYHDDTFRSRRWHFPSYNFTISLVWAPFLVKAKIFEDDDGVSTADLQLHLDVLETDWTSQWEKFDYAVISTGQWFFKTAVYWENGAAIGCHSCQNKTLEERPPEYSFRRALRVAFQFITSSPHKPVVFYRTWAPSHFENGEWFSGGTCNRTAPFKPGEAGDREWDNSMWRIEREEFHNAVPIGGDRLKLLDTFELSLLRPDGHPGPYRAYHPYEKGVTAKVQNDCLHWCLPGPIDAWNDVIMKMVAKD

SEQ ID NO: 2152 - protein, 314 aa, Zea mays subsp. mays
  peptide (1)..(314): Ceres Seq. ID no. 12372923
  misc_feature (141)..(309): Pfam Name: Arabidopsis proteins of unknown function Pfam Description: Arabidopsis proteins of unknown function
  misc_feature (1)..(313): Homolog of NCBI NO: 15223079 NR Description: unknown protein
  misc_feature (1)..(314): Homolog of NCBI NO: 15237213 NR Description: putative protein; protein id: At5g15900.1
  misc_feature (1)..(314): Homolog of NCBI NO: 15237211 NR Description: putative protein; protein id: At5g15890.1
  misc_feature (1)..(311): Homolog of NCBI NO: 25518737 NR Description: hypothetical protein F6F3.23 [imported] -
  misc_feature (1)..(309): Homolog of NCBI NO: 28393189 NR Description: unknown protein [Arabidopsis thaliana]
  misc_feature (1)..(309): Homolog of NCBI NO: 15234058 NR Description: hypothetical protein; protein id: At4g01080.1
  misc_feature (1)..(311): Homolog of NCBI NO: 30686312 NR Description: expressed protein [Arabidopsis thaliana]
  misc_feature (1)..(311): Homolog of NCBI NO: 7486743 NR Description: hypothetical protein F9D16.260 - Arabidopsis
  misc_feature (1)..(311): Homolog of NCBI NO: 30678135 NR Description: expressed protein [Arabidopsis thaliana]
  misc_feature (1)..(311): Homolog of NCBI NO: 15237044 NR Description: putative protein; protein id: At4g11090.1
MTNGRPDTDYLNWRWKPYGCEVSPFDGKKFLDGMKGKHWALIGDSILRNHVQSLLCLLSKVEDATEVYHDDTFRSRRWHFPSYNFTISLVWAPFLVKAKIFEDDDGVSTADLQLHLDVLETDWTSQWEKFDYAVISTGQWFFKTAVYWENGAAIGCHSCQNKTLEERPPEYSFRRALRVAFQFITSSPHKPVVFYRTWAPSHFENGEWFSGGTCNRTAPFKPGEAGDREWDNSMWRIEREEFHNAVPIGGDRLKLLDTFELSLLRPDGHPGPYRAYHPYEKGVTAKVQNDCLHWCLPGPIDAWNDVIMKMVAKD

SEQ ID NO: 2153 - protein, 281 aa, Zea mays subsp. mays
  peptide (1)..(281): Ceres Seq. ID no. 12372924
  misc_feature (108)..(276): Pfam Name: Arabidopsis proteins of unknown function Pfam Description: Arabidopsis proteins of unknown function
  misc_feature (1)..(280): Homolog of NCBI NO: 15223079 NR Description: unknown protein
  misc_feature (1)..(281): Homolog of NCBI NO: 15237213 NR Description: putative protein; protein id: At5g15900.1
  misc_feature (1)..(281): Homolog of NCBI NO: 15237211 NR Description: putative protein; protein id: At5g15890.1
  misc_feature (1)..(278): Homolog of NCBI NO: 25518737 NR Description: hypothetical protein F6F3.23 [imported] -
  misc_feature (1)..(276): Homolog of NCBI NO: 28393189 NR Description: unknown protein [Arabidopsis thaliana]
  misc_feature (1)..(276): Homolog of NCBI NO: 15234058 NR Description: hypothetical protein; protein id: At4g01080.1
  misc_feature (1)..(278): Homolog of NCBI NO: 30686312 NR Description: expressed protein [Arabidopsis thaliana]
  misc_feature (1)..(278): Homolog of NCBI NO: 7486743 NR Description: hypothetical protein F9D16.260 - Arabidopsis
  misc_feature (1)..(278): Homolog of NCBI NO: 30678135 NR Description: expressed protein [Arabidopsis thaliana]
  misc_feature (1)..(278): Homolog of NCBI NO: 15237044 NR Description: putative protein; protein id: At4g11090.1
MKGKHWALIGDSILRNHVQSLLCLLSKVEDATEVYHDDTFRSRRWHFPSYNFTISLVWAPFLVKAKIFEDDDGVSTADLQLHLDVLETDWTSQWEKFDYAVISTGQWFFKTAVYWENGAAIGCHSCQNKTLEERPPEYSFRRALRVAFQFITSSPHKPVVFYRTWAPSHFENGEWFSGGTCNRTAPFKPGEAGDREWDNSMWRIEREEFHNAVPIGGDRLKLLDTFELSLLRPDGHPGPYRAYHPYEKGVTAKVQNDCLHWCLPGPIDAWNDVIMKMVAKD

SEQ ID NO: 2154 - DNA, 1372 bp, Zea mays subsp. mays
  misc_feature (1)..(1372): Ceres Seq. ID no. 12365191
  misc_feature: MA Experiment ID: 108522 Result: Down-regulated in Transcription
  misc_feature: MA Experiment 108522 PARAMETER Experiment Name: Zm_42deg_Heat_P Parameter: Age (day) Value: 8
  misc_feature: MA Experiment 108522 PARAMETER Experiment Name: Zm_42deg_Heat_P Parameter: Organism Value: Zea mays
  misc_feature: MA Experiment 108522 PARAMETER Experiment Name: Zm_42deg_Heat_P Parameter: Plant Line Value: 35A19
  misc_feature: MA Experiment 108522 PARAMETER Experiment Name: Zm_42deg_Heat_P Parameter: Temperature (deg C) Value: 42 vs. 22
  misc_feature: MA Experiment 108522 PARAMETER Experiment Name: Zm_42deg_Heat_P Parameter: Timepoint (hr) Value: 1
  misc_feature: MA Experiment 108522 PARAMETER Experiment Name: Zm_42deg_Heat_P Parameter: Tissue Value: Aerial
  misc_feature: MA Experiment ID: 108527 Result: Down-regulated in Transcription
  misc_feature: MA Experiment 108527 PARAMETER Experiment Name: Zm_5mM_NO_P Parameter: Age (day) Value: 8
  misc_feature: MA Experiment 108527 PARAMETER Experiment Name: Zm_5mM_NO_P Parameter: Organism Value: Zea mays
  misc_feature: MA Experiment 108527 PARAMETER Experiment Name: Zm_5mM_NO_P Parameter: Plant Line Value: 35A19
  misc_feature: MA Experiment 108527 PARAMETER Experiment Name: Zm_5mM_NO_P Parameter: Timepoint (hr) Value: 6
  misc_feature: MA Experiment 108527 PARAMETER Experiment Name: Zm_5mM_NO_P Parameter: Tissue Value: Aerial
  misc_feature: MA Experiment 108527 PARAMETER Experiment Name: Zm_5mM_NO_P Parameter: Treatment Value: 5mM NO vs. No Treatment
  misc_feature: MA Experiment ID: 108528 Result: Down-regulated in Transcription
  misc_feature: MA Experiment 108528 PARAMETER Experiment Name: Zm_Imbibed_Seeds_P Parameter: Age (day) Value: 5 vs. 2
  misc_feature: MA Experiment 108528 PARAMETER Experiment Name: Zm_Imbibed_Seeds_P Parameter: Organism Value: Zea mays
  misc_feature: MA Experiment 108528 PARAMETER Experiment Name: Zm_Imbibed_Seeds_P Parameter: Plant Line Value: 35A19
  misc_feature: MA Experiment 108528 PARAMETER Experiment Name: Zm_Imbibed_Seeds_P Parameter: Tissue Value: Aerial vs. Embryo
  misc_feature: MA Experiment ID: 108530 Result: Down-regulated in Transcription
  misc_feature: MA Experiment 108530 PARAMETER Experiment Name: Zm_Imbibed_Seeds_P Parameter: Age (day) Value: 6 vs. 2
  misc_feature: MA Experiment 108530 PARAMETER Experiment Name: Zm_Imbibed_Seeds_P Parameter: Organism Value: Zea mays
  misc_feature: MA Experiment 108530 PARAMETER Experiment Name: Zm_Imbibed_Seeds_P Parameter: Plant Line Value: 35A19
  misc_feature: MA Experiment 108530 PARAMETER Experiment Name: Zm_Imbibed_Seeds_P Parameter: Tissue Value: Aerial vs. Embryo
  misc_feature: MA Experiment ID: 108532 Result: Down-regulated in Transcription
  misc_feature: MA Experiment 108532 PARAMETER Experiment Name: Zm_20uM_KNO3_H-to-L_P Parameter: Age (day) Value: 11
  misc_feature: MA Experiment 108532 PARAMETER Experiment Name: Zm_20uM_KNO3_H-to-L_P Parameter: Organism Value: Zea mays
  misc_feature: MA Experiment 108532 PARAMETER Experiment Name: Zm_20uM_KNO3_H-to-L_P Parameter: Plant Line Value: 35A19
  misc_feature: MA Experiment 108532 PARAMETER Experiment Name: Zm_20uM_KNO3_H-to-L_P Parameter: Timepoint (hr) Value: 16
  misc_feature: MA Experiment 108532 PARAMETER Experiment Name: Zm_20uM_KNO3_H-to-L_P Parameter: Tissue Value: Roots
  misc_feature: MA Experiment 108532 PARAMETER Experiment Name: Zm_20uM_KNO3_H-to-L_P Parameter: Treatment Value: 20uM KNO3 vs. 60mM KNO3
  misc_feature: MA Experiment ID: 108535 Result: Down-regulated in Transcription
  misc_feature: MA Experiment 108535 PARAMETER Experiment Name: Zm_Meristem_P Parameter: Age (day) Value: 8
  misc_feature: MA Experiment 108535 PARAMETER Experiment Name: Zm_Meristem_P Parameter: Organism Value: Zea mays
  misc_feature: MA Experiment 108535 PARAMETER Experiment Name: Zm_Meristem_P Parameter: Plant Line Value: 35A19
  misc_feature: MA Experiment 108535 PARAMETER Experiment Name: Zm_Meristem_P Parameter: Tissue Value: Root Meristem vs. Above Root Meristem
  misc_feature: MA Experiment ID: 108536 Result: Down-regulated in Transcription
  misc_feature: MA Experiment 108536 PARAMETER Experiment Name: Zm_Meristem_P Parameter: Age (day) Value: 8
  misc_feature: MA Experiment 108536 PARAMETER Experiment Name: Zm_Meristem_P Parameter: Organism Value: Zea mays
  misc_feature: MA Experiment 108536 PARAMETER Experiment Name: Zm_Meristem_P Parameter: Plant Line Value: 35A19
  misc_feature: MA Experiment 108536 PARAMETER Experiment Name: Zm_Meristem_P Parameter: Tissue Value: Shoot Meristem vs. Above Shoot Meristem
  misc_feature: MA Experiment ID: 108544 Result: Down-regulated in Transcription
  misc_feature: MA Experiment ID: 108597 Result: Down-regulated in Transcription
  misc_feature: MA Experiment 108597 PARAMETER Experiment Name: Zm_100uM_ABA_P Parameter: Age (day) Value: 9
  misc_feature: MA Experiment 108597 PARAMETER Experiment Name: Zm_100uM_ABA_P Parameter: Organism Value: Zea mays
  misc_feature: MA Experiment 108597 PARAMETER Experiment Name: Zm_100uM_ABA_P Parameter: Plant Line Value: 35A19
  misc_feature: MA Experiment 108597 PARAMETER Experiment Name: Zm_100uM_ABA_P Parameter: Timepoint (hr) Value: 24
  misc_feature: MA Experiment 108597 PARAMETER Experiment Name: Zm_100uM_ABA_P Parameter: Tissue Value: Aerial
  misc_feature: MA Experiment 108597 PARAMETER Experiment Name: Zm_100uM_ABA_P Parameter: Treatment Value: 100uM ABA vs. No Treatment
  misc_feature: MA Experiment ID: 108689 Result: Up-regulated in Transcription
  misc_feature: MA Experiment 108689 PARAMETER Experiment Name: Zm_Drought_Roots_P Parameter: Age (day) Value: 9
  misc_feature: MA Experiment 108689 PARAMETER Experiment Name: Zm_Drought_Roots_P Parameter: Organism Value: Zea mays
  misc_feature: MA Experiment 108689 PARAMETER Experiment Name: Zm_Drought_Roots_P Parameter: Plant Line Value: 35A19
  misc_feature: MA Experiment 108689 PARAMETER Experiment Name: Zm_Drought_Roots_P Parameter: Timepoint (hr) Value: 24
  misc_feature: MA Experiment 108689 PARAMETER Experiment Name: Zm_Drought_Roots_P Parameter: Tissue Value: Roots
  misc_feature: MA Experiment 108689 PARAMETER Experiment Name: Zm_Drought_Roots_P Parameter: Treatment Value: Drought vs. No Drought
  misc_feature: MA Experiment ID: 20000480 Result: Down-regulated in Transcription
  misc_feature: MA Experiment 20000480 PARAMETER Experiment Name: Zm_Drought_P Parameter: Age (day) Value: 11
  misc_feature: MA Experiment 20000480 PARAMETER Experiment Name: Zm_Drought_P Parameter: Organism Value: Zea mays
  misc_feature: MA Experiment 20000480 PARAMETER Experiment Name: Zm_Drought_P Parameter: Plant Line Value: 35A19
  misc_feature: MA Experiment 20000480 PARAMETER Experiment Name: Zm_Drought_P Parameter: Timepoint (hr) Value: 72
  misc_feature: MA Experiment 20000480 PARAMETER Experiment Name: Zm_Drought_P Parameter: Tissue Value: Aerial
  misc_feature: MA Experiment 20000480 PARAMETER Experiment Name: Zm_Drought_P Parameter: Treatment Value: Drought vs. No Drought
  misc_feature: MA Experiment ID: 20000488 Result: Up-regulated in Transcription
  misc_feature: MA Experiment 20000488 PARAMETER Experiment Name: Zm_50mM_NH4NO3_L_to_H_P Parameter: Organism Value: Zea mays
  misc_feature: MA Experiment 20000488 PARAMETER Experiment Name: Zm_50mM_NH4NO3_L_to_H_P Parameter: Timepoint (hr) Value: 8
  misc_feature: MA Experiment 20000488 PARAMETER Experiment Name: Zm_50mM_NH4NO3_L_to_H_P Parameter: Tissue Value: Leaves
  misc_feature: MA Experiment 20000488 PARAMETER Experiment Name: Zm_50mM_NH4NO3_L_to_H_P Parameter: Treatment Value: 50mM NH4NO3 vs. 100mM Mannitol
  misc_feature: MA Experiment ID: 20000533 Result: Up-regulated in Transcription
  misc_feature: MA Experiment 20000533 PARAMETER Experiment Name: Zm_0.001percent_MeJA_P Parameter: Age (day) Value: 11
  misc_feature: MA Experiment 20000533 PARAMETER Experiment Name: Zm_0.001percent_MeJA_P Parameter: Organism Value: Zea mays
  misc_feature: MA Experiment 20000533 PARAMETER Experiment Name: Zm_0.001percent_MeJA_P Parameter: Plant Line Value: 35A19
  misc_feature: MA Experiment 20000533 PARAMETER Experiment Name: Zm_0.001percent_MeJA_P Parameter: Timepoint (hr) Value: 72
  misc_feature: MA Experiment 20000533 PARAMETER Experiment Name: Zm_0.001percent_MeJA_P Parameter: Tissue Value: Aerial
  misc_feature: MA Experiment 20000533 PARAMETER Experiment Name: Zm_0.001percent_MeJA_P Parameter: Treatment Value: 0.001percent MeJA vs. No Treatment
  misc_feature: MA Experiment ID: 20000535 Result: Up-regulated in Transcription
  misc_feature: MA Experiment 20000535 PARAMETER Experiment Name: Zm_Hybrid_Seed_Dev_P Parameter: DAP Value: 30 vs. 12
  misc_feature: MA Experiment 20000535 PARAMETER Experiment Name: Zm_Hybrid_Seed_Dev_P Parameter: Organism Value: Zea mays
  misc_feature: MA Experiment 20000535 PARAMETER Experiment Name: Zm_Hybrid_Seed_Dev_P Parameter: Plant Line Value: 35A19
  misc_feature: MA Experiment 20000535 PARAMETER Experiment Name: Zm_Hybrid_Seed_Dev_P Parameter: Tissue Value: Embryo vs. Unfert Floret
atcatcctcaacgccatggccgtgctgatgctcccgctctacctcttcgccacccctatcctgcgcttcttccaccaggacgccgagattgccgcgctcgccggccgcctagcgctctacatgatcccgcagctcttcgcctacgccttcaacttccccatccagaagttcctgcaggcgcagagcaaggtgatggccatggcggtcgtgtcggtggcggcgctgctgctccacgtcgccatcagctggctcctcatggggcccatggggatggggatcgtcggcctggccgtcgcgctcaacgcgtcttggtggctcgtcgtgctgggccagctcgcctacattctcatgggctactgccccggcgcctggaacggattcgactggctcgccttctccgacctctccggcttcgcgcgcctgtcgcttggctccgccgtcatgctctgcctggagttctggttctacatgttcctgatcgtcatcgtcggcaacctggagaacgctcaggtcgccgttgctgcagtctccatttgcacgaacctgttcgggtggcagatcatggtgttcttcggattcaacgcggccatcagcgtgcgggtgtcgaacgagctgggcgccgggcggccccgcgcggccaagttcgcgatcctggtggtgctcatgtcttcggtggccatcgggttggccttcttcgtcctcgtcctggccttccgcgacgtgtacggcgcgcccttcacggaaagccccgaggtggtgcgcgccgtgggccagcctcggcgtcgtcttcgccttctcgctgctcctcaacagcgtgcagccggtgctgtcgggcgttgccgtcggggccggctggcagtggctggtggcgtacatcaacctcggctgctactacctcgttggcatccccgtcgggtacatcatcgccttcccgctgcgcggcggggtgcaggggatgtggggcggcatgctcacgggcgtcggcctgcagaccctcatcctggtcgccatcacgctgcgcaccaactgggacaaggaggccagcgaggcccattccaggatacagaaatggggtggatcggcggcggccaaagtttcacatgcatgactagtctgaatgacgcgcgccaccatgagaatacaatacaacagatgccatgcgagcagaatggcatgctgcggtgcgtaagcttgattgtacgtgcaggttgcgttttgggctgcttaagtagttggagacaaagtcatacttaggttgttttgtttccagcagatatatgcttgtaaaacacgtattgtgccatagactgcatgattcttagcagagtttgaaatagaaaataatatatctctactactacttaattacctg

SEQ ID NO: 2155 - protein, 417 aa, Zea mays subsp. mays
  peptide (1)..(417): Ceres Seq. ID no. 12365192
  misc_feature (1)..(254): Homolog of NCBI NO: 16924114 NR Description: putative multidrug efflux protein [Oryza sativa]
  misc_feature (1)..(252): Homolog of NCBI NO: 25402978 NR Description: protein F26F24.14 [imported] - Arabidopsis
  misc_feature (1)..(256): Homolog of NCBI NO: 33867697 NR Description: putative anthocyanin permease [Lycopersicon
  misc_feature (1)..(258): Homolog of NCBI NO: 30686958 NR Description: MATE efflux protein family [Arabidopsis thaliana]
  misc_feature (1)..(253): Homolog of NCBI NO: 15231577 NR Description: integral membrane protein, putative
  misc_feature (1)..(256): Homolog of NCBI NO: 15222119 NR Description: unknown protein; protein id: At1g12950.1
  misc_feature (1)..(256): Homolog of NCBI NO: 15240824 NR Description: putative transmembrane protein
  misc_feature (1)..(252): Homolog of NCBI NO: 15220701 NR Description: conserved hypothetical protein; protein id:
  misc_feature (1)..(255): Homolog of NCBI NO: 16604505 NR Description: At1g47530/F16N3_20 [Arabidopsis thaliana]
  misc_feature (1)..(255): Homolog of NCBI NO: 15220246 NR Description: unknown protein
IILNAMAVLMLPLYLFATPILRFFHQDAEIAALAGRLALYMIPQLFAYAFNFPIQKFLQAQSKVMAMAVVSVAALLLHVAISWLLMGPMGMGIVGLAVALNASWWLVVLGQLAYILMGYCPGAWNGFDWLAFSDLSGFARLSLGSAVMLCLEFWFYMFLIVIVGNLENAQVAVAAVSICTNLFGWQIMVFFGFNAAISVRVSNELGAGRPRAAKFAILVVLMSSVAIGLAFFVLVLAFRDVYGAPFTESPEVVRAVGQPRRRLRLLAAPQQRAAGAVGRCRRGRLAVAGGVHQPRLLLPRWHPRRVHHRLPAARRGAGDVGRHAHGRRPADPHPGRHHAAHQLGQGGQRGPFQDTEMGWIGGGQSFTCMTSLNDARHHENTIQQMPCEQNGMLRCVSLIVRAGCVLGCLSSWRQSHT

SEQ ID NO: 2156 - protein, 412 aa, Zea mays subsp. mays
  peptide (1)..(412): Ceres Seq. ID no. 12365193
  misc_feature (1)..(249): Homolog of NCBI NO: 16924114 NR Description: putative multidrug efflux protein [Oryza sativa]
  misc_feature (1)..(247): Homolog of NCBI NO: 25402978 NR Description: protein F26F24.14 [imported] - Arabidopsis
  misc_feature (1)..(251): Homolog of NCBI NO: 33867697 NR Description: putative anthocyanin permease [Lycopersicon
  misc_feature (1)..(253): Homolog of NCBI NO: 30686958 NR Description: MATE efflux protein family [Arabidopsis thaliana]
  misc_feature (1)..(248): Homolog of NCBI NO: 15231577 NR Description: integral membrane protein, putative
  misc_feature (1)..(251): Homolog of NCBI NO: 15222119 NR Description: unknown protein; protein id: At1g12950.1
  misc_feature (1)..(251): Homolog of NCBI NO: 15240824 NR Description: putative transmembrane protein
  misc_feature (1)..(247): Homolog of NCBI NO: 15220701 NR Description: conserved hypothetical protein; protein id:
  misc_feature (1)..(250): Homolog of NCBI NO: 16604505 NR Description: At1g47530/F16N3_20 [Arabidopsis thaliana]
  misc_feature (1)..(250): Homolog of NCBI NO: 15220246 NR Description: unknown protein
MAVLMLPLYLFATPILRFFHQDAEIAALAGRLALYMIPQLFAYAFNFPIQKFLQAQSKVMAMAVVSVAALLLHVAISWLLMGPMGMGIVGLAVALNASWWLVVLGQLAYILMGYCPGAWNGFDWLAFSDLSGFARLSLGSAVMLCLEFWFYMFLIVIVGNLENAQVAVAAVSICTNLFGWQIMVFFGFNAAISVRVSNELGAGRPRAAKFAILVVLMSSVAIGLAFFVLVLAFRDVYGAPFTESPEVVRAVGQPRRRLRLLAAPQQRAAGAVGRCRRGRLAVAGGVHQPRLLLPRWHPRRVHHRLPAARRGAGDVGRHAHGRRPADPHPGRHHAAHQLGQGGQRGPFQDTEMGWIGGGQSFTCMTSLNDARHHENTIQQMPCEQNGMLRCVSLIVRAGCVLGCLSSWRQSHT

SEQ ID NO: 2157 - protein, 408 aa, Zea mays subsp. mays
  peptide (1)..(408): Ceres Seq. ID no. 12365194
  misc_feature (1)..(247): Homolog of NCBI NO: 15240824 NR Description: putative transmembrane protein
  misc_feature (1)..(243): Homolog of NCBI NO: 15220701 NR Description: conserved hypothetical protein; protein id:
  misc_feature (1)..(246): Homolog of NCBI NO: 16604505 NR Description: At1g47530/F16N3_20 [Arabidopsis thaliana]
  misc_feature (1)..(246): Homolog of NCBI NO: 15220246 NR Description: unknown protein
  misc_feature (1)..(245): Homolog of NCBI NO: 16924114 NR Description: putative multidrug efflux protein [Oryza sativa]
  misc_feature (1)..(243): Homolog of NCBI NO: 25402978 NR Description: protein F26F24.14 [imported] - Arabidopsis
  misc_feature (1)..(247): Homolog of NCBI NO: 33867697 NR Description: putative anthocyanin permease [Lycopersicon
  misc_feature (1)..(249): Homolog of NCBI NO: 30686958 NR Description: MATE efflux protein family [Arabidopsis thaliana]
  misc_feature (1)..(244): Homolog of NCBI NO: 15231577 NR Description: integral membrane protein, putative
  misc_feature (1)..(247): Homolog of NCBI NO: 15222119 NR Description: unknown protein; protein id: At1g12950.1
MLPLYLFATPILRFFHQDAEIAALAGRLALYMIPQLFAYAFNFPIQKFLQAQSKVMAMAVVSVAALLLHVAISWLLMGPMGMGIVGLAVALNASWWLVVLGQLAYILMGYCPGAWNGFDWLAFSDLSGFARLSLGSAVMLCLEFWFYMFLIVIVGNLENAQVAVAAVSICTNLFGWQIMVFFGFNAAISVRVSNELGAGRPRAAKFAILVVLMSSVAIGLAFFVLVLAFRDVYGAPFTESPEVVRAVGQPRRRLRLLAAPQQRAAGAVGRCRRGRLAVAGGVHQPRLLLPRWHPRRVHHRLPAARRGAGDVGRHAHGRRPADPHPGRHHAAHQLGQGGQRGPFQDTEMGWIGGGQSFTCMTSLNDARHHENTIQQMPCEQNGMLRCVSLIVRAGCVLGCLSSWRQSHT

SEQ ID NO: 2158 - DNA, 1377 bp, Zea mays subsp. mays
  misc_feature (1)..(1377): Ceres Seq. ID no. 12355901
  misc_feature: MA Experiment ID: 108522 Result: Down-regulated in Transcription
  misc_feature: MA Experiment 108522 PARAMETER Experiment Name: Zm_42deg_Heat_P Parameter: Age (day) Value: 8
  misc_feature: MA Experiment 108522 PARAMETER Experiment Name: Zm_42deg_Heat_P Parameter: Organism Value: Zea mays
  misc_feature: MA Experiment 108522 PARAMETER Experiment Name: Zm_42deg_Heat_P Parameter: Plant Line Value: 35A19
  misc_feature: MA Experiment 108522 PARAMETER Experiment Name: Zm_42deg_Heat_P Parameter: Temperature (deg C) Value: 42 vs. 22
  misc_feature: MA Experiment 108522 PARAMETER Experiment Name: Zm_42deg_Heat_P Parameter: Timepoint (hr) Value: 1
  misc_feature: MA Experiment 108522 PARAMETER Experiment Name: Zm_42deg_Heat_P Parameter: Tissue Value: Aerial
  misc_feature: MA Experiment ID: 108534 Result: Down-regulated in Transcription
  misc_feature: MA Experiment 108534 PARAMETER Experiment Name: Zm_4deg_Cold_P Parameter: Age (hr) Value: 8
  misc_feature: MA Experiment 108534 PARAMETER Experiment Name: Zm_4deg_Cold_P Parameter: Organism Value: Zea mays
  misc_feature: MA Experiment 108534 PARAMETER Experiment Name: Zm_4deg_Cold_P Parameter: Plant Line Value: 35A19
  misc_feature: MA Experiment 108534 PARAMETER Experiment Name: Zm_4deg_Cold_P Parameter: Temperature (deg C) Value: 4 vs. 22
  misc_feature: MA Experiment 108534 PARAMETER Experiment Name: Zm_4deg_Cold_P Parameter: Timepoint (hr) Value: 6
  misc_feature: MA Experiment 108534 PARAMETER Experiment Name: Zm_4deg_Cold_P Parameter: Tissue Value: Aerial
  misc_feature: MA Experiment ID: 108543 Result: Down-regulated in Transcription
aaaaccgcaaatatcttcttaccccaacgccggcacgccgcccaaaaacccttgcggcgtcgcactcacactagcgaccaacccccaaccccagaccttcctctccggcggcggccggcgcgcgcgcgcgagggagatggaccgcccttccggcacatcgtaccagcgctttccccgcgttcggatccgcgagctcaaggacgactacgccaagttcgaactccgcgacaccgacgctagcatggccaacgccctccgccgcgtcatgatcgccgaagtcccaactgtcgccatcgatctcgtagagatcgaggttaactcctccgtcctcaacgacgagttcatcgcccaccgtctggggctcatcccgctcacctccgccgccgccatgcaaatgcgcttctctcgggactgcgacgcttgcgacggcgacggctcctgcgagtactgctccgtcgagtttcacctctccgtgcacgccaccgactctgaccagacgctcgaggtcacatccaacgacctgagatccatggaccccaaggtctgcccagtcgaccaagcacgcgcctaccagcacgcgctcggaggcaccgacccctttggagccaatgcctcgaacgaaaacaggggcatacttattgtaaagctgcgtcggggacaagaactaaggcttcgtgccatagctaggaaaggaattggcaaggaccatgccaaatggtcaccagctgctaccgtgactttcatgtatgagcctgacatacgtatcaatgaagaactaatggaaacattgacggtggaagagagaataagcttgattgaaagcagccctacaaaagtatttgagcttgattctgccaatcaggtggtggtgaaaaacgcggaggcatacacctacgacgacgaggtgatcaagcacgccgaggccatcgggaagccaggcttggtggagatcaccgccaaggaggacagcttcgtcttcaccgtagaaacaaccggtgccatcacagcctacgagctgatcatgaacgcgatcacggtgctgaggcagaagctggatgccgtccgccttcaggacgacgacggcgaccttggcgagctcggcgcccaccttggtgggccttaggagctttgagcaagaaggaatcgccctgtggcctccctccctcccactgcctacgtaggcctatctaactgccgtgcgtgctagtcgatcgatcgaaaccgaacggttctgataaaccttatggtgtctaaagctccagatttatggattgccaaacacccagcaccgaattccagtttaatttccttgcccgccttgttttcgtgcgggtgacatctgcgccgtgaatttgcatgcttgtgcgtcttgttatt

SEQ ID NO: 2159 - protein, 373 aa, Zea mays subsp. mays
  peptide (1)..(373): Ceres Seq. ID no. 12355902
  misc_feature (101)..(240): Pfam Name: RNA polymerase Rpb3/RpoA insert domain Pfam Description: RNA polymerase Rpb3/RpoA insert domain
  misc_feature (54)..(252): Homolog of NCBI NO: 12837765 NR Description: unnamed protein product [Mus musculus]
  misc_feature (54)..(252): Homolog of NCBI NO: 38511942 NR Description: Polymerase (RNA) II (DNA directed) polypeptide C
  misc_feature (40)..(252): Homolog of NCBI NO: 34851240 NR Description: similar to Polymerase (RNA) II (DNA directed)
  misc_feature (54)..(252): Homolog of NCBI NO: 40645083 NR Description: homologue of DNA-directed RNA polymerase II
  misc_feature (54)..(252): Homolog of NCBI NO: 28278474 NR Description: Similar to polymerase (RNA) II (DNA directed)
  misc_feature (59)..(367): Homolog of NCBI NO: 116575 NR Description: Conjugation stage-specific protein
  misc_feature (51)..(370): Homolog of NCBI NO: 2129725 NR Description: DNA-directed RNA polymerase (EC 2.7.7.6) II 35.5K
  misc_feature (51)..(370): Homolog of NCBI NO: 15226509 NR Description: DNA-directed RNA polymerase II, third largest
  misc_feature (51)..(372): Homolog of NCBI NO: 21593370 NR Description: DNA-directed RNA polymerase II, third largest
  misc_feature (51)..(372): Homolog of NCBI NO: 15226523 NR Description: DNA-directed RNA polymerase II, third largest
KPQISSYPNAGTPPKNPCGVALTLATNPQPQTFLSGGGRRARAREMDRPSGTSYQRFPRVRIRELKDDYAKFELRDTDASMANALRRVMIAEVPTVAIDLVEIEVNSSVLNDEFIAHRLGLIPLTSAAAMQMRFSRDCDACDGDGSCEYCSVEFHLSVHATDSDQTLEVTSNDLRSMDPKVCPVDQARAYQHALGGTDPFGANASNENRGILIVKLRRGQELRLRAIARKGIGKDHAKWSPAATVTFMYEPDIRINEELMETLTVEERISLIESSPTKVFELDSANQVVVKNAEAYTYDDEVIKHAEAIGKPGLVEITAKEDSFVFTVETTGAITAYELIMNAITVLRQKLDAVRLQDDDGDLGELGAHLGGP

SEQ ID NO: 2160 - protein, 328 aa, Zea mays subsp. mays
  peptide (1)..(328): Ceres Seq. ID no. 12355903
  misc_feature (56)..(195): Pfam Name: RNA polymerase Rpb3/RpoA insert domain Pfam Description: RNA polymerase Rpb3/RpoA insert domain
  misc_feature (9)..(207): Homolog of NCBI NO: 12837765 NR Description: unnamed protein product [Mus musculus]
  misc_feature (9)..(207): Homolog of NCBI NO: 38511942 NR Description: Polymerase (RNA) II (DNA directed) polypeptide C
  misc_feature (1)..(207): Homolog of NCBI NO: 34851240 NR Description: similar to Polymerase (RNA) II (DNA directed)
  misc_feature (9)..(207): Homolog of NCBI NO: 40645083 NR Description: homologue of DNA-directed RNA polymerase II
  misc_feature (9)..(207): Homolog of NCBI NO: 28278474 NR Description: Similar to polymerase (RNA) II (DNA directed)
  misc_feature (14)..(322): Homolog of NCBI NO: 116575 NR Description: Conjugation stage-specific protein
  misc_feature (6)..(325): Homolog of NCBI NO: 2129725 NR Description: DNA-directed RNA polymerase (EC 2.7.7.6) II 35.5K
  misc_feature (6)..(325): Homolog of NCBI NO: 15226509 NR Description: DNA-directed RNA polymerase II, third largest
  misc_feature (6)..(327): Homolog of NCBI NO: 21593370 NR Description: DNA-directed RNA polymerase II, third largest
  misc_feature (6)..(327): Homolog of NCBI NO: 15226523 NR Description: DNA-directed RNA polymerase II, third largest
MDRPSGTSYQRFPRVRIRELKDDYAKFELRDTDASMANALRRVMIAEVPTVAIDLVEIEVNSSVLNDEFIAHRLGLIPLTSAAAMQMRFSRDCDACDGDGSCEYCSVEFHLSVHATDSDQTLEVTSNDLRSMDPKVCPVDQARAYQHALGGTDPFGANASNENRGILIVKLRRGQELRLRAIARKGIGKDHAKWSPAATVTFMYEPDIRINEELMETLTVEERISLIESSPTKVFELDSANQVVVKNAEAYTYDDEVIKHAEAIGKPGLVEITAKEDSFVFTVETTGAITAYELIMNAITVLRQKLDAVRLQDDDGDLGELGAHLGGP

SEQ ID NO: 2161 - protein, 293 aa, Zea mays subsp. mays
  peptide (1)..(293): Ceres Seq. ID no. 12355904
  misc_feature (21)..(160): Pfam Name: RNA polymerase Rpb3/RpoA insert domain Pfam Description: RNA polymerase Rpb3/RpoA insert domain
  misc_feature (1)..(172): Homolog of NCBI NO: 12837765 NR Description: unnamed protein product [Mus musculus]
  misc_feature (1)..(172): Homolog of NCBI NO: 38511942 NR Description: Polymerase (RNA) II (DNA directed) polypeptide C
  misc_feature (1)..(172): Homolog of NCBI NO: 34851240 NR Description: similar to Polymerase (RNA) II (DNA directed)
  misc_feature (1)..(172): Homolog of NCBI NO: 40645083 NR Description: homologue of DNA-directed RNA polymerase II
  misc_feature (1)..(172): Homolog of NCBI NO: 28278474 NR Description: Similar to polymerase (RNA) II (DNA directed)
  misc_feature (1)..(287): Homolog of NCBI NO: 116575 NR Description: Conjugation stage-specific protein
  misc_feature (1)..(290): Homolog of NCBI NO: 2129725 NR Description: DNA-directed RNA polymerase (EC 2.7.7.6) II 35.5K
  misc_feature (1)..(290): Homolog of NCBI NO: 15226509 NR Description: DNA-directed RNA polymerase II, third largest
  misc_feature (1)..(292): Homolog of NCBI NO: 21593370 NR Description: DNA-directed RNA polymerase II, third largest
  misc_feature (1)..(292): Homolog of NCBI NO: 15226523 NR Description: DNA-directed RNA polymerase II, third largest
MANALRRVMIAEVPTVAIDLVEIEVNSSVLNDEFIAHRLGLIPLTSAAAMQMRFSRDCDACDGDGSCEYCSVEFHLSVHATDSDQTLEVTSNDLRSMDPKVCPVDQARAYQHALGGTDPFGANASNENRGILIVKLRRGQELRLRAIARKGIGKDHAKWSPAATVTFMYEPDIRINEELMETLTVEERISLIESSPTKVFELDSANQVVVKNAEAYTYDDEVIKHAEAIGKPGLVEITAKEDSFVFTVETTGAITAYELIMNAITVLRQKLDAVRLQDDDGDLGELGAHLGGP

SEQ ID NO: 2162 - DNA, 747 bp, Zea mays subsp. mays
  misc_feature (1)..(747): Ceres Seq. ID no. 13492760
  misc_feature: MA Experiment ID: 108523 Result: Down-regulated in Transcription
  misc_feature: MA Experiment 108523 PARAMETER Experiment Name: Zm_42deg_Heat_P Parameter: Age (day) Value: 8
  misc_feature: MA Experiment 108523 PARAMETER Experiment Name: Zm_42deg_Heat_P Parameter: Organism Value: Zea mays
  misc_feature: MA Experiment 108523 PARAMETER Experiment Name: Zm_42deg_Heat_P Parameter: Plant Line Value: 35A19
  misc_feature: MA Experiment 108523 PARAMETER Experiment Name: Zm_42deg_Heat_P Parameter: Temperature (deg C) Value: 42 vs. 22
  misc_feature: MA Experiment 108523 PARAMETER Experiment Name: Zm_42deg_Heat_P Parameter: Timepoint (hr) Value: 6
  misc_feature: MA Experiment 108523 PARAMETER Experiment Name: Zm_42deg_Heat_P Parameter: Tissue Value: Aerial
  misc_feature: MA Experiment ID: 108528 Result: Down-regulated in Transcription
  misc_feature: MA Experiment 108528 PARAMETER Experiment Name: Zm_Imbibed_Seeds_P Parameter: Age (day) Value: 5 vs. 2
  misc_feature: MA Experiment 108528 PARAMETER Experiment Name: Zm_Imbibed_Seeds_P Parameter: Organism Value: Zea mays
  misc_feature: MA Experiment 108528 PARAMETER Experiment Name: Zm_Imbibed_Seeds_P Parameter: Plant Line Value: 35A19
  misc_feature: MA Experiment 108528 PARAMETER Experiment Name: Zm_Imbibed_Seeds_P Parameter: Tissue Value: Aerial vs. Embryo
  misc_feature: MA Experiment ID: 108535 Result: Down-regulated in Transcription
  misc_feature: MA Experiment 108535 PARAMETER Experiment Name: Zm_Meristem_P Parameter: Age (day) Value: 8
  misc_feature: MA Experiment 108535 PARAMETER Experiment Name: Zm_Meristem_P Parameter: Organism Value: Zea mays
  misc_feature: MA Experiment 108535 PARAMETER Experiment Name: Zm_Meristem_P Parameter: Plant Line Value: 35A19
  misc_feature: MA Experiment 108535 PARAMETER Experiment Name: Zm_Meristem_P Parameter: Tissue Value: Root Meristem vs. Above Root Meristem
  misc_feature: MA Experiment ID: 108542 Result: Up-regulated in Transcription
  misc_feature: MA Experiment 108542 PARAMETER Experiment Name: Zm_150mM_NaCl_P Parameter: Age (day) Value: 8
  misc_feature: MA Experiment 108542 PARAMETER Experiment Name: Zm_150mM_NaCl_P Parameter: Organism Value: Zea mays
  misc_feature: MA Experiment 108542 PARAMETER Experiment Name: Zm_150mM_NaCl_P Parameter: Plant Line Value: 35A19
  misc_feature: MA Experiment 108542 PARAMETER Experiment Name: Zm_150mM_NaCl_P Parameter: Timepoint (hr) Value: 6
  misc_feature: MA Experiment 108542 PARAMETER Experiment Name: Zm_150mM_NaCl_P Parameter: Tissue Value: Aerial
  misc_feature: MA Experiment 108542 PARAMETER Experiment Name: Zm_150mM_NaCl_P Parameter: Treatment Value: 150mM NaCl vs. No Treatment
  misc_feature: MA Experiment ID: 108543 Result: Up-regulated in Transcription
  misc_feature: MA Experiment ID: 108544 Result: Up-regulated in Transcription
  misc_feature: MA Experiment ID: 108545 Result: Down-regulated in Transcription
  misc_feature: MA Experiment 108545 PARAMETER Experiment Name: Zm_Imbibed_Seeds_P Parameter: Age (day) Value: 3 vs. 2
  misc_feature: MA Experiment 108545 PARAMETER Experiment Name: Zm_Imbibed_Seeds_P Parameter: Organism Value: Zea mays
  misc_feature: MA Experiment 108545 PARAMETER Experiment Name: Zm_Imbibed_Seeds_P Parameter: Plant Line Value: 35A19
  misc_feature: MA Experiment 108545 PARAMETER Experiment Name: Zm_Imbibed_Seeds_P Parameter: Tissue Value: Aerial vs. Embryo
  misc_feature: MA Experiment ID: 108687 Result: Down-regulated in Transcription
  misc_feature: MA Experiment 108687 PARAMETER Experiment Name: Zm_Embryos-Flowers__P Parameter: Tissue Value: Embryo vs. Aerial+
  misc_feature: MA Experiment ID: 20000492 Result: Down-regulated in Transcription
  misc_feature: MA Experiment 20000492 PARAMETER Experiment Name: Zm_Hybrid_Seed_Dev_P Parameter: DAP Value: 12
  misc_feature: MA Experiment 20000492 PARAMETER Experiment Name: Zm_Hybrid_Seed_Dev_P Parameter: Organism Value: Zea mays
  misc_feature: MA Experiment 20000492 PARAMETER Experiment Name: Zm_Hybrid_Seed_Dev_P Parameter: Plant Line Value: 35A19
  misc_feature: MA Experiment 20000492 PARAMETER Experiment Name: Zm_Hybrid_Seed_Dev_P Parameter: Tissue Value: Fert Kernel vs. Unfert Floret
  misc_feature: MA Experiment ID: 20000535 Result: Down-regulated in Transcription
  misc_feature: MA Experiment 20000535 PARAMETER Experiment Name: Zm_Hybrid_Seed_Dev_P Parameter: DAP Value: 30 vs. 12
  misc_feature: MA Experiment 20000535 PARAMETER Experiment Name: Zm_Hybrid_Seed_Dev_P Parameter: Organism Value: Zea mays
  misc_feature: MA Experiment 20000535 PARAMETER Experiment Name: Zm_Hybrid_Seed_Dev_P Parameter: Plant Line Value: 35A19
  misc_feature: MA Experiment 20000535 PARAMETER Experiment Name: Zm_Hybrid_Seed_Dev_P Parameter: Tissue Value: Embryo vs. Unfert Floret
  misc_feature: MA Experiment ID: 20001614 Result: Down-regulated in Transcription
  misc_feature: MA Experiment 20001614 PARAMETER Experiment Name: Zm_50ppm_KNO3_L-to-H_P Parameter: Age (day) Value: 21
  misc_feature: MA Experiment 20001614 PARAMETER Experiment Name: Zm_50ppm_KNO3_L-to-H_P Parameter: Organism Value: Zea mays
  misc_feature: MA Experiment 20001614 PARAMETER Experiment Name: Zm_50ppm_KNO3_L-to-H_P Parameter: Plant Line Value: 35A19
  misc_feature: MA Experiment 20001614 PARAMETER Experiment Name: Zm_50ppm_KNO3_L-to-H_P Parameter: Timepoint (hr) Value: 48
  misc_feature: MA Experiment 20001614 PARAMETER Experiment Name: Zm_50ppm_KNO3_L-to-H_P Parameter: Tissue Value: Roots
  misc_feature: MA Experiment 20001614 PARAMETER Experiment Name: Zm_50ppm_KNO3_L-to-H_P Parameter: Treatment Value: 50ppm KNO3 vs. 50ppm KCl
gccgtgtgcatagcagcaaatagtggtcggcctgttggtactctatatcgtcccttccagtgtacccgtcctccagcccattatacatcatacttgctccagataagaccaagagcatcatggccaacgccttgcctctcatcgtcgcgctggtcgccgccgccgggtgcgcggcgctggcttcggccacgtcgtacaccgtcggcgactcgcagggctggacgaccaccggcgtcgactacagcagctgggccagccgcaacactttcgtcgtcggagacacactagtgttcaactacgtgagcaaggcgcacacggtgacggaggtgagcaaggccggctacgacgcctgctccggcgccaacgcgctcagcgacgacgacaccggctccaccaccatcacgctccagaccccgggcacgcactatttcatctgcaacgtccccggccactgcgccagcggcatgaagctagcggtcgccgtctccgcctcgccctcgggcacggccccttccaccggagccctgcaggttccggcgatggcatccgtcgtcgccgcggccgcgggcgctgccatcaagctcgcgctcttctgacggagcacggccgggtcgtctcaggggagagacagtgcatgcagactacgttcttggcggttgatagtttcccgctggcgattgttcgccgcgcagttcatgtacgtatgtatgtgtgtatgctactctgcggtggcgaatgctttttctg

SEQ ID NO: 2163 - protein, 158 aa, Zea mays subsp. mays
  peptide (1)..(158): Ceres Seq. ID no. 13492761
  misc_feature (34)..(108): Pfam Name: Plastocyanin-like domain Pfam Description: Plastocyanin-like domain
  misc_feature (7)..(156): Homolog of NCBI NO: 38636763 NR Description: putative blue copper binding protein
  misc_feature (9)..(140): Homolog of NCBI NO: 34908748 NR Description: uclacyanin-like protein [Oryza sativa (japonica
  misc_feature (9)..(158): Homolog of NCBI NO: 4104058 NR Description: blue copper-binding protein homolog [Triticum
  misc_feature (2)..(140): Homolog of NCBI NO: 38636764 NR Description: putative blue copper binding protein
  misc_feature (8)..(143): Homolog of NCBI NO: 34915492 NR Description: contains ESTs
  misc_feature (4)..(143): Homolog of NCBI NO: 14140127 NR Description: uclacyanin 3-like protein [Oryza sativa]
  misc_feature (1)..(157): Homolog of NCBI NO: 38636838 NR Description: putative blue copper binding protein
  misc_feature (2)..(132): Homolog of NCBI NO: 2493318 NR Description: Blue copper protein precursor
  misc_feature (1)..(140): Homolog of NCBI NO: 38346158 NR Description: OSJNBa0079A21.5 [Oryza sativa (japonica
  misc_feature (1)..(108): Homolog of NCBI NO: 3747044 NR Description: blue copper protein [Zea mays]
MANALPLIVALVAAAGCAALASATSYTVGDSQGWTTTGVDYSSWASRNTFVVGDTLVFNYVSKAHTVTEVSKAGYDACSGANALSDDDTGSTTITLQTPGTHYFICNVPGHCASGMKLAVAVSASPSGTAPSTGALQVPAMASVVAAAAGAAIKLALF

SEQ ID NO: 2164 - protein, 95 aa, Zea mays subsp. mays
  peptide (1)..(95): Ceres Seq. ID no. 13492762
  misc_feature (72)..(95): Homolog of NCBI NO: 1076211 NR Description: hypothetical protein VSP-3 - Chlamydomonas
  misc_feature (13)..(95): Homolog of NCBI NO: 15807127 NR Description: conserved hypothetical protein [Deinococcus
AVCIAANSGRPVGTLYRPFQCTRPPAHYTSYLLQIRPRASWPTPCLSSSRWSPPPGARRWLRPRRTPSATRRAGRPPASTTAAGPAATLSSSETH

SEQ ID NO: 2165 - DNA, 1553 bp, Zea mays subsp. mays
  misc_feature (1)..(1553): Ceres Seq. ID no. 12407344
  misc_feature: MA Experiment ID: 108545 Result: Up-regulated in Transcription
  misc_feature: MA Experiment 108545 PARAMETER Experiment Name: Zm_Imbibed_Seeds_P Parameter: Age (day) Value: 3 vs. 2
  misc_feature: MA Experiment 108545 PARAMETER Experiment Name: Zm_Imbibed_Seeds_P Parameter: Organism Value: Zea mays
  misc_feature: MA Experiment 108545 PARAMETER Experiment Name: Zm_Imbibed_Seeds_P Parameter: Plant Line Value: 35A19
  misc_feature: MA Experiment 108545 PARAMETER Experiment Name: Zm_Imbibed_Seeds_P Parameter: Tissue Value: Aerial vs. Embryo
gcgtgcgtccacctccttggtcttctcttcccttccttctgtgcgaaaagcgagcacccaaaccctatcttactatttgtattcggatctgagctactggatgcgcccctgatctggggcagtattcctcatatttggccaaagaggaatataatacttcccctgatttccagcagcttccggaactttgtaaagaaacgaaagaaaagtttaacacagcgcgcgcgcgcgatcctttccgacaggacagtatagcggatggcttcgtcggtgcgggcgccatcggggtcggtgatcgccgtggcatcgtcctcttcctcagcagccttggccggggtgtgcggcacgggctcgccgtgcgccgcgtgcaagttcctgcgtcgcaagtgccagccggactgcgtgttcgcgccctacttcccaccggacaacccgcagaagttcgtgcgcgtgcaccgcgtcttcggcgcgagcaacgtgaccaagctgatgaacgaaatccacccgttgcagcgcgaggacgccatgaactcgctcgcctacgaggccgacatgcgaattcgcgaccccgtctacggctgcgtgggcgtcatctccatcctccagcacaacctacggcagctccagcaggacctcgcccgcgccaagtacgagctctccaagtaccaggcggcagcggcggcagcatccgcgtcgacggcgccgaccgggccgcaggcgatggcagagttcatcggcagcgcgatgccgaacggcgccgcgcacaacttcatcaaccttggacactcggcggcgctcggctccctcggaggctccaccgccatgttcgggcagcaggagcagttcggcagcaacgcgcagatgctgtccaggagctacgacggcggcgagcccatcgcgaggatagggatgaacaacggcggctacgagttcggttactcgagcgcgacgacgatgggcgggtctgcaggcgctgtctctggcggcctcgggacgctcggcatcagcagcccgccgttcttgaagtctggaaccgccggcggcgacgagaagcccagcggcggtcagtaggcggttccatccgtgtgaccgatccttctatccatccatccatccatcagtcttgtcaggttactgacgcgatgaagaaacggggaggaaaaaaatatccatgaaacgcgtgcaaggacttatcctagacgtccgccgttgtcaggagggggctaatttccagacgattttacatggaaaaagtgcgtcgcttgcgtgcgtgcgtgcttgcttttgttgctagattcattgcttgtttgttaattaccacgctatctaccctccccatccacatcatccacgagatcgtcagatattccatgccagcgtccacagagtggcctatgttcttgttattagttgctgtactgcgaagggagggggacaaaatgcatgcttgtccggcccggacctttttttttaccccactcggaagactagcgcccatttgtactccatgtattattgctaggttggctgtaatatatgaagttgaccttttg

SEQ ID NO: 2166 - protein, 270 aa, Zea mays subsp. mays
  peptide (1)..(270): Ceres Seq. ID no. 12407345
  misc_feature (33)..(133): Pfam Name: Protein of unknown function DUF260 Pfam Description: Protein of unknown function DUF260
  misc_feature (30)..(146): Homolog of NCBI NO: 21618134 NR Description: unknown [Arabidopsis thaliana]
  misc_feature (30)..(146): Homolog of NCBI NO: 18405472 NR Description: expressed protein
  misc_feature (30)..(146): Homolog of NCBI NO: 29427827 NR Description: LOB domain protein 25
  misc_feature (30)..(146): Homolog of NCBI NO: 9294470 NR Description: gb|AAB60912.1~gene_id:MGF10.6~similar to unknown
  misc_feature (32)..(261): Homolog of NCBI NO: 15227870 NR Description: hypothetical protein; protein id: At2g23660.1
  misc_feature (32)..(145): Homolog of NCBI NO: 15242624 NR Description: putative protein
  misc_feature (27)..(204): Homolog of NCBI NO: 15240110 NR Description: putative protein; protein id: At5g66870.1
  misc_feature (1)..(164): Homolog of NCBI NO: 34896184 NR Description: contains ESTs C98868(E3203),C98869(E3203)~similar
  misc_feature (30)..(210): Homolog of NCBI NO: 15218746 NR Description: unknown protein
  misc_feature (2)..(270): Homolog of NCBI NO: 34907508 NR Description: B1099D03.24 [Oryza sativa (japonica
MASSVRAPSGSVIAVASSSSSAALAGVCGTGSPCAACKFLRRKCQPDCVFAPYFPPDNPQKFVRVHRVFGASNVTKLMNEIHPLQREDAMNSLAYEADMRIRDPVYGCVGVISILQHNLRQLQQDLARAKYELSKYQAAAAAASASTAPTGPQAMAEFIGSAMPNGAAHNFINLGHSAALGSLGGSTAMFGQQEQFGSNAQMLSRSYDGGEPIARIGMNNGGYEFGYSSATTMGGSAGAVSGGLGTLGISSPPFLKSGTAGGDEKPSGGQ

SEQ ID NO: 2167 - protein, 193 aa, Zea mays subsp. mays
  peptide (1)..(193): Ceres Seq. ID no. 12407346
  misc_feature (1)..(56): Pfam Name: Protein of unknown function DUF260 Pfam Description: Protein of unknown function DUF260
  misc_feature (1)..(69): Homolog of NCBI NO: 18405472 NR Description: expressed protein
  misc_feature (1)..(69): Homolog of NCBI NO: 29427827 NR Description: LOB domain protein 25
  misc_feature (1)..(69): Homolog of NCBI NO: 21618134 NR Description: unknown [Arabidopsis thaliana]
  misc_feature (1)..(69): Homolog of NCBI NO: 9294470 NR Description: gb|AAB60912.1~gene_id:MGF10.6~similar to unknown
  misc_feature (1)..(184): Homolog of NCBI NO: 15227870 NR Description: hypothetical protein; protein id: At2g23660.1
  misc_feature (1)..(68): Homolog of NCBI NO: 15242624 NR Description: putative protein
  misc_feature (1)..(127): Homolog of NCBI NO: 15240110 NR Description: putative protein; protein id: At5g66870.1
  misc_feature (1)..(87): Homolog of NCBI NO: 34896184 NR Description: contains ESTs C98868(E3203),C98869(E3203)~similar
  misc_feature (1)..(133): Homolog of NCBI NO: 15218746 NR Description: unknown protein
  misc_feature (1)..(193): Homolog of NCBI NO: 34907508 NR Description: B1099D03.24 [Oryza sativa (japonica
MNEIHPLQREDAMNSLAYEADMRIRDPVYGCVGVISILQHNLRQLQQDLARAKYELSKYQAAAAAASASTAPTGPQAMAEFIGSAMPNGAAHNFINLGHSAALGSLGGSTAMFGQQEQFGSNAQMLSRSYDGGEPIARIGMNNGGYEFGYSSATTMGGSAGAVSGGLGTLGISSPPFLKSGTAGGDEKPSGGQ

SEQ ID NO: 2168 - protein, 181 aa, Zea mays subsp. mays
  peptide (1)..(181): Ceres Seq. ID no. 12407347
  misc_feature (1)..(57): Homolog of NCBI NO: 29427827 NR Description: LOB domain protein 25
  misc_feature (1)..(57): Homolog of NCBI NO: 21618134 NR Description: unknown [Arabidopsis thaliana]
  misc_feature (1)..(57): Homolog of NCBI NO: 9294470 NR Description: gb|AAB60912.1~gene_id:MGF10.6~similar to unknown
  misc_feature (1)..(172): Homolog of NCBI NO: 15227870 NR Description: hypothetical protein; protein id: At2g23660.1
  misc_feature (1)..(56): Homolog of NCBI NO: 15242624 NR Description: putative protein
  misc_feature (1)..(115): Homolog of NCBI NO: 15240110 NR Description: putative protein; protein id: At5g66870.1
  misc_feature (1)..(75): Homolog of NCBI NO: 34896184 NR Description: contains ESTs C98868(E3203),C98869(E3203)~similar
  misc_feature (1)..(121): Homolog of NCBI NO: 15218746 NR Description: unknown protein
  misc_feature (1)..(181): Homolog of NCBI NO: 34907508 NR Description: B1099D03.24 [Oryza sativa (japonica
  misc_feature (1)..(57): Homolog of NCBI NO: 18405472 NR Description: expressed protein
MNSLAYEADMRIRDPVYGCVGVISILQHNLRQLQQDLARAKYELSKYQAAAAAASASTAPTGPQAMAEFIGSAMPNGAAHNFINLGHSAALGSLGGSTAMFGQQEQFGSNAQMLSRSYDGGEPIARIGMNNGGYEFGYSSATTMGGSAGAVSGGLGTLGISSPPFLKSGTAGGDEKPSGGQ

SEQ ID NO: 2169 - DNA, 1413 bp, Zea mays subsp. mays
  misc_feature (1)..(1413): Ceres Seq. ID no. 12410874
  misc_feature: MA Experiment ID: 108527 Result: Up-regulated in Transcription
  misc_feature: MA Experiment 108527 PARAMETER Experiment Name: Zm_5mM_NO_P Parameter: Age (day) Value: 8
  misc_feature: MA Experiment 108527 PARAMETER Experiment Name: Zm_5mM_NO_P Parameter: Organism Value: Zea mays
  misc_feature: MA Experiment 108527 PARAMETER Experiment Name: Zm_5mM_NO_P Parameter: Plant Line Value: 35A19
  misc_feature: MA Experiment 108527 PARAMETER Experiment Name: Zm_5mM_NO_P Parameter: Timepoint (hr) Value: 6
  misc_feature: MA Experiment 108527 PARAMETER Experiment Name: Zm_5mM_NO_P Parameter: Tissue Value: Aerial
  misc_feature: MA Experiment 108527 PARAMETER Experiment Name: Zm_5mM_NO_P Parameter: Treatment Value: 5mM NO vs. No Treatment
  misc_feature: MA Experiment ID: 108529 Result: Up-regulated in Transcription
  misc_feature: MA Experiment 108529 PARAMETER Experiment Name: Zm_Imbibed_Seeds_P Parameter: Age (day) Value: 5 vs. 2
  misc_feature: MA Experiment 108529 PARAMETER Experiment Name: Zm_Imbibed_Seeds_P Parameter: Organism Value: Zea mays
  misc_feature: MA Experiment 108529 PARAMETER Experiment Name: Zm_Imbibed_Seeds_P Parameter: Plant Line Value: 35A19
  misc_feature: MA Experiment 108529 PARAMETER Experiment Name: Zm_Imbibed_Seeds_P Parameter: Tissue Value: Roots vs. Embryo
  misc_feature: MA Experiment ID: 108536 Result: Up-regulated in Transcription
  misc_feature: MA Experiment 108536 PARAMETER Experiment Name: Zm_Meristem_P Parameter: Age (day) Value: 8
  misc_feature: MA Experiment 108536 PARAMETER Experiment Name: Zm_Meristem_P Parameter: Organism Value: Zea mays
  misc_feature: MA Experiment 108536 PARAMETER Experiment Name: Zm_Meristem_P Parameter: Plant Line Value: 35A19
  misc_feature: MA Experiment 108536 PARAMETER Experiment Name: Zm_Meristem_P Parameter: Tissue Value: Shoot Meristem vs. Above Shoot Meristem
  misc_feature: MA Experiment ID: 108544 Result: Up-regulated in Transcription
  misc_feature: MA Experiment ID: 108545 Result: Down-regulated in Transcription
  misc_feature: MA Experiment 108545 PARAMETER Experiment Name: Zm_Imbibed_Seeds_P Parameter: Age (day) Value: 3 vs. 2
  misc_feature: MA Experiment 108545 PARAMETER Experiment Name: Zm_Imbibed_Seeds_P Parameter: Organism Value: Zea mays
  misc_feature: MA Experiment 108545 PARAMETER Experiment Name: Zm_Imbibed_Seeds_P Parameter: Plant Line Value: 35A19
  misc_feature: MA Experiment 108545 PARAMETER Experiment Name: Zm_Imbibed_Seeds_P Parameter: Tissue Value: Aerial vs. Embryo
  misc_feature: MA Experiment ID: 108546 Result: Up-regulated in Transcription
  misc_feature: MA Experiment 108546 PARAMETER Experiment Name: Zm_Imbibed_Seeds_P Parameter: Age (day) Value: 3 vs. 2
  misc_feature: MA Experiment 108546 PARAMETER Experiment Name: Zm_Imbibed_Seeds_P Parameter: Organism Value: Zea mays
  misc_feature: MA Experiment 108546 PARAMETER Experiment Name: Zm_Imbibed_Seeds_P Parameter: Plant Line Value: 35A19
  misc_feature: MA Experiment 108546 PARAMETER Experiment Name: Zm_Imbibed_Seeds_P Parameter: Tissue Value: Roots vs. Embryo
  misc_feature: MA Experiment ID: 108547 Result: Down-regulated in Transcription
  misc_feature: MA Experiment 108547 PARAMETER Experiment Name: Zm_Imbibed_Seeds_P Parameter: Age (day) Value: 4 vs. 2
  misc_feature: MA Experiment 108547 PARAMETER Experiment Name: Zm_Imbibed_Seeds_P Parameter: Organism Value: Zea mays
  misc_feature: MA Experiment 108547 PARAMETER Experiment Name: Zm_Imbibed_Seeds_P Parameter: Plant Line Value: 35A19
  misc_feature: MA Experiment 108547 PARAMETER Experiment Name: Zm_Imbibed_Seeds_P Parameter: Tissue Value: Aerial vs. Embryo
  misc_feature: MA Experiment ID: 108559 Result: Up-regulated in Transcription
  misc_feature: MA Experiment 108559 PARAMETER Experiment Name: Zm_5mM_NO_P Parameter: Age (day) Value: 8
  misc_feature: MA Experiment 108559 PARAMETER Experiment Name: Zm_5mM_NO_P Parameter: Organism Value: Zea mays
  misc_feature: MA Experiment 108559 PARAMETER Experiment Name: Zm_5mM_NO_P Parameter: Plant Line Value: 35A19
  misc_feature: MA Experiment 108559 PARAMETER Experiment Name: Zm_5mM_NO_P Parameter: Timepoint (hr) Value: 12
  misc_feature: MA Experiment 108559 PARAMETER Experiment Name: Zm_5mM_NO_P Parameter: Tissue Value: Aerial
  misc_feature: MA Experiment 108559 PARAMETER Experiment Name: Zm_5mM_NO_P Parameter: Treatment Value: 5mM NO vs. No Treatment
  misc_feature: MA Experiment ID: 108688 Result: Down-regulated in Transcription
  misc_feature: MA Experiment 108688 PARAMETER Experiment Name: Zm_Embryos-Flowers__P Parameter: Tissue Value: Immature Flowers vs. Aerial+
  misc_feature: MA Experiment ID: 20000535 Result: Down-regulated in Transcription
  misc_feature: MA Experiment 20000535 PARAMETER Experiment Name: Zm_Hybrid_Seed_Dev_P Parameter: DAP Value: 30 vs. 12
  misc_feature: MA Experiment 20000535 PARAMETER Experiment Name: Zm_Hybrid_Seed_Dev_P Parameter: Organism Value: Zea mays
  misc_feature: MA Experiment 20000535 PARAMETER Experiment Name: Zm_Hybrid_Seed_Dev_P Parameter: Plant Line Value: 35A19
  misc_feature: MA Experiment 20000535 PARAMETER Experiment Name: Zm_Hybrid_Seed_Dev_P Parameter: Tissue Value: Embryo vs. Unfert Floret
  misc_feature: MA Experiment ID: 20001612 Result: Up-regulated in Transcription
  misc_feature: MA Experiment 20001612 PARAMETER Experiment Name: Zm_50ppm_KNO3_L-to-H_P Parameter: Age (day) Value: 19
  misc_feature: MA Experiment 20001612 PARAMETER Experiment Name: Zm_50ppm_KNO3_L-to-H_P Parameter: Organism Value: Zea mays
  misc_feature: MA Experiment 20001612 PARAMETER Experiment Name: Zm_50ppm_KNO3_L-to-H_P Parameter: Plant Line Value: 35A19
  misc_feature: MA Experiment 20001612 PARAMETER Experiment Name: Zm_50ppm_KNO3_L-to-H_P Parameter: Timepoint (hr) Value: 8
  misc_feature: MA Experiment 20001612 PARAMETER Experiment Name: Zm_50ppm_KNO3_L-to-H_P Parameter: Tissue Value: Roots
  misc_feature: MA Experiment 20001612 PARAMETER Experiment Name: Zm_50ppm_KNO3_L-to-H_P Parameter: Treatment Value: 50ppm KNO3 vs. 50ppm KCl
atccattgcgatacttgagacgcttcgctctctctcttgttcttctcgccttctgcccgagtgatggccagcctcaccgacctcgtcaacctcgacctgagtgactgcaccgacaggatcatcgccgagtacatctggattggaggaaccgggatagacctcaggagcaaagcgaggacggtgaaaggccccatcaccgacccgatccagctgccgaaatggaactacgacggctccagcaccgggcaggctcccggagaggacagcgaagtcatcctctaccctcaagccattttcaaggacccgttcaggaagggtaaccacatccttgtgatgtgtgactgctacacgccacaaggcgagccaatccccaccaacaagaggtacagcgccgccaaggttttcagccaccccgacgtcgcagctgaggtgccgtggtacggtattgagcaggagtacaccctccttcagaaggacgtgagctggcccctcggctggcccgttggtggataccctggtccccagggaccatactactgcgccgccggtgccgacaaggcctttgggcgcgacgtggttgacgcccactacaaggcctgcctctacgccggcatcaacatcagcggcatcaacggcgaagtcatgcctggacagtgggagttccaagtggggccgtccgttgggatctctgccggcgacgagatatgggtcgcccgctacattctcgagaggatcaccgagatggccggaatcgtcctctccctcgacccgaagccgatcaagggcgactggaacggcgccggcgcccacaccaactacagcaccaagtcgatgagggaggccgggggatacgaggtcatcaaggcggcgatcgacaagctggggaagaggcacaaggagcacatcgccgcgtacggcgagggcaacgagcgccgcctcacgggccgccacgagaccgccgacatcaacaccttcaaatggggcgtggcgaaccgcggcgcgtccatccgcgtcggccgcgacaccgagagggagggcaagggctacttcgaggaccgcaggccggcgtccaacatggacccctacgtcgtcaccggcatgatcgccgagaccaccatcctgtggaatggaaactgatcaagcatgtgcattctcgagggagcccactgtttttcttctgcacaacgcatccgccgtggtgtcgctttggttttgaaatttagattccgttgtcctaaaatttatcactacggtctccagtgtattgctcgggaacgaatgaataacgactgcgatgtttgtttttttttttgctggcgtagtagatgtacgtttggctgtgcttccagtttattgggtaaatgaaaaaatgtaatggtctaccggtcttaaaatagtagtcattttagctct

SEQ ID NO: 2170 - protein, 357 aa, Zea mays subsp. mays
  peptide (1)..(357): Ceres Seq. ID no. 12410875
  misc_feature (103)..(355): Pfam Name: Glutamine synthetase, catalytic domain Pfam Description: Glutamine synthetase, catalytic domain
  misc_feature (103)..(355): Pfam Name: Glutamine synthetase, catalytic domain Pfam Description: Glutamine synthetase, catalytic domain
  misc_feature (1)..(354): Homolog of NCBI NO: 121368 NR Description: Glutamine synthetase, cytosolic isozyme
  misc_feature (1)..(354): Homolog of NCBI NO: 13924490 NR Description: cytosolic glutamine synthetase [Populus x
  misc_feature (1)..(355): Homolog of NCBI NO: 1076474 NR Description: Gln 1.2 protein - radish
  misc_feature (1)..(357): Homolog of NCBI NO: 121332 NR Description: GLUTAMINE SYNTHETASE ROOT ISOZYME
  misc_feature (1)..(354): Homolog of NCBI NO: 121368 NR Description: Glutamine synthetase, cytosolic isozyme
  misc_feature (1)..(355): Homolog of NCBI NO: 1076474 NR Description: Gln 1.2 protein - radish
  misc_feature (1)..(357): Homolog of NCBI NO: 1169926 NR Description: GLUTAMINE SYNTHETASE ROOT ISOZYME 5
  misc_feature (1)..(357): Homolog of NCBI NO: 699623 NR Description: glutamine synthetase [Zea mays]
  misc_feature (1)..(357): Homolog of NCBI NO: 585201 NR Description: GLUTAMINE SYNTHETASE ROOT ISOZYME 1
  misc_feature (1)..(357): Homolog of NCBI NO: 699621 NR Description: glutamine synthetase [Zea mays]
  misc_feature (1)..(357): Homolog of NCBI NO: 121332 NR Description: GLUTAMINE SYNTHETASE ROOT ISOZYME
  misc_feature (1)..(354): Homolog of NCBI NO: 13924490 NR Description: cytosolic glutamine synthetase [Populus x
  misc_feature (1)..(357): Homolog of NCBI NO: 1169926 NR Description: GLUTAMINE SYNTHETASE ROOT ISOZYME 5
  misc_feature (1)..(357): Homolog of NCBI NO: 699621 NR Description: glutamine synthetase [Zea mays]
  misc_feature (1)..(357): Homolog of NCBI NO: 699623 NR Description: glutamine synthetase [Zea mays]
  misc_feature (1)..(357): Homolog of NCBI NO: 585201 NR Description: GLUTAMINE SYNTHETASE ROOT ISOZYME 1
MASLTDLVNLDLSDCTDRIIAEYIWIGGTGIDLRSKARTVKGPITDPIQLPKWNYDGSSTGQAPGEDSEVILYPQAIFKDPFRKGNHILVMCDCYTPQGEPIPTNKRYSAAKVFSHPDVAAEVPWYGIEQEYTLLQKDVSWPLGWPVGGYPGPQGPYYCAAGADKAFGRDVVDAHYKACLYAGINISGINGEVMPGQWEFQVGPSVGISAGDEIWVARYILERITEMAGIVLSLDPKPIKGDWNGAGAHTNYSTKSMREAGGYEVIKAAIDKLGKRHKEHIAAYGEGNERRLTGRHETADINTFKWGVANRGASIRVGRDTEREGKGYFEDRRPASNMDPYVVTGMIAETTILWNGN

SEQ ID NO: 2171 - protein, 267 aa, Zea mays subsp. mays
  peptide (1)..(267): Ceres Seq. ID no. 12410876
  misc_feature (13)..(265): Pfam Name: Glutamine synthetase, catalytic domain Pfam Description: Glutamine synthetase, catalytic domain
  misc_feature (13)..(265): Pfam Name: Glutamine synthetase, catalytic domain Pfam Description: Glutamine synthetase, catalytic domain
  misc_feature (1)..(264): Homolog of NCBI NO: 121368 NR Description: Glutamine synthetase, cytosolic isozyme
  misc_feature (1)..(264): Homolog of NCBI NO: 13924490 NR Description: cytosolic glutamine synthetase [Populus x
  misc_feature (1)..(265): Homolog of NCBI NO: 1076474 NR Description: Gln 1.2 protein - radish
  misc_feature (1)..(267): Homolog of NCBI NO: 121332 NR Description: GLUTAMINE SYNTHETASE ROOT ISOZYME
  misc_feature (1)..(264): Homolog of NCBI NO: 121368 NR Description: Glutamine synthetase, cytosolic isozyme
  misc_feature (1)..(265): Homolog of NCBI NO: 1076474 NR Description: Gln 1.2 protein - radish
  misc_feature (1)..(267): Homolog of NCBI NO: 1169926 NR Description: GLUTAMINE SYNTHETASE ROOT ISOZYME 5
  misc_feature (1)..(267): Homolog of NCBI NO: 699623 NR Description: glutamine synthetase [Zea mays]
  misc_feature (1)..(267): Homolog of NCBI NO: 585201 NR Description: GLUTAMINE SYNTHETASE ROOT ISOZYME 1
  misc_feature (1)..(267): Homolog of NCBI NO: 699621 NR Description: glutamine synthetase [Zea mays]
  misc_feature (1)..(267): Homolog of NCBI NO: 121332 NR Description: GLUTAMINE SYNTHETASE ROOT ISOZYME
  misc_feature (1)..(264): Homolog of NCBI NO: 13924490 NR Description: cytosolic glutamine synthetase [Populus x
  misc_feature (1)..(267): Homolog of NCBI NO: 1169926 NR Description: GLUTAMINE SYNTHETASE ROOT ISOZYME 5
  misc_feature (1)..(267): Homolog of NCBI NO: 699621 NR Description: glutamine synthetase [Zea mays]
  misc_feature (1)..(267): Homolog of NCBI NO: 699623 NR Description: glutamine synthetase [Zea mays]
  misc_feature (1)..(267): Homolog of NCBI NO: 585201 NR Description: GLUTAMINE SYNTHETASE ROOT ISOZYME 1
MCDCYTPQGEPIPTNKRYSAAKVFSHPDVAAEVPWYGIEQEYTLLQKDVSWPLGWPVGGYPGPQGPYYCAAGADKAFGRDVVDAHYKACLYAGINISGINGEVMPGQWEFQVGPSVGISAGDEIWVARYILERITEMAGIVLSLDPKPIKGDWNGAGAHTNYSTKSMREAGGYEVIKAAIDKLGKRHKEHIAAYGEGNERRLTGRHETADINTFKWGVANRGASIRVGRDTEREGKGYFEDRRPASNMDPYVVTGMIAETTILWNGN

SEQ ID NO: 2172 - DNA, 1829 bp, Zea mays subsp. mays
  misc_feature (1)..(1829): Ceres Seq. ID no. 12365195
  misc_feature: MA Experiment ID: 20000535 Result: Down-regulated in Transcription
  misc_feature: MA Experiment 20000535 PARAMETER Experiment Name: Zm_Hybrid_Seed_Dev_P Parameter: DAP Value: 30 vs. 12
  misc_feature: MA Experiment 20000535 PARAMETER Experiment Name: Zm_Hybrid_Seed_Dev_P Parameter: Organism Value: Zea mays
  misc_feature: MA Experiment 20000535 PARAMETER Experiment Name: Zm_Hybrid_Seed_Dev_P Parameter: Plant Line Value: 35A19
  misc_feature: MA Experiment 20000535 PARAMETER Experiment Name: Zm_Hybrid_Seed_Dev_P Parameter: Tissue Value: Embryo vs. Unfert Floret
ttcttctcccccagatctctctcttcttctcttgcgaagtcgccaaggccagtccccaatccccatccagccagaccgccggcgatgacggaccaccgcgacgtgatgttgcccttgtccctccaatacatagccacccgtgccctcctcctgctcgtcatcgcgtccgccgtttcctgctcttccttgccgccggaggacggcatccgggtcgtctctgcagagaaaagaatcgacctcacgggtcccatcgtcaaagtcttcctaacattgaaggttgagaatgctcccacggcctctgaagcatcacgagttctcctcgccttcacgcccacagagtttcaacatctctctattgtcaaggccacaagagcggaggggaagcgcaagaagaaggcattcgtacccctctcggtccaagcctctgagctcgccaccaccgctcccgacgcccctcgcctctactctgttctgctcagcactcctctgaaaccgggcgatgcaaccactctagaagtgctatacatgctcactcactctttagagcccttccccgctgagattagccagtcagagtcccagttggtttactaccgtgacagtgcggtgcttctctcgccctaccatgtcctggagcaggttacctacatcaaaatgccaagcaataggatcgaatccttcacaagggtcgatcctaccacacgagctggttctgaagtgaaatatggcacatacagtaaccagatgccaaactcctatttgccagttcttgtgcattatgagaataaccgcccatttgctgttgttgaggagcttgtacgcaaggtggagatttctcactggggaaacatccaaatcaccgagcagtataaactgaaacacggtggtgctcgtcacaaaggagtcttttccaggcttgagtatcaatctaggccatctatcagtggagcttcgtcctttaagaatcttcttgcaaggctgccacctcgggttcattcagtttactatcgtgatgagattggtaacatctcctcatcccatctgcgcactgattcacacaagtccgatctagaaattgagcccagatatccgttatttggtgggtggcactgcacgttcaccattggctatggtcttccattgcaagattttgtctttgagtcagttgatggccggcgctacatcaaccttacttttggttgccctctattggatactgtggttgacgatcttacagttaaagttgtgcttcctgaaggatcaaaaaatccagagcatgtagttccttttgtgacagagaaacatcttgagactagttattcataccttgacgttgttggaaggacgacggttgtactgaagaagaaaaatgttgtaggggagcacaacgttcctttccaggtgtactatgaattcaatccgatcttcatgctggcggaaccattgatgctgatatctgcagtgttgctgtttttcgttgccttcattgcgtatcttcacatggatctttccatcagaaaatcatcataggcctgttggcaattctgtccaccacagtattttttgaggcacatgttctgctaactgtgattgatgaagtaacaatccttgttctagcgcactagttgaactgtttatcagtgcaccatccccaatggagaaggacgatgtttttttttttgtgtgtgtgtgggtggaatatgattgcttcatgtagggctcacaacgatcagaaacgatatcatctataggaaaacgattgcctagaaatttagctggtttcataattaatcaacgtggtgactacaatacgatattgatatatgttc

SEQ ID NO: 2173 - protein, 509 aa, Zea mays subsp. mays
  peptide (1)..(509): Ceres Seq. ID no. 12365196
  misc_feature (69)..(500): Pfam Name: Ribophorin I Pfam Description: Ribophorin I
  misc_feature (49)..(507): Homolog of NCBI NO: 38512106 NR Description: Ribophorin I [Rattus norvegicus]
  misc_feature (78)..(507): Homolog of NCBI NO: 14124942 NR Description: Similar to ribophorin I [Homo sapiens]
  misc_feature (49)..(507): Homolog of NCBI NO: 4506675 NR Description: ribophorin I [Homo sapiens]
  misc_feature (49)..(507): Homolog of NCBI NO: 9857227 NR Description: ribophorin I [Sus scrofa]
  misc_feature (50)..(507): Homolog of NCBI NO: 28175644 NR Description: Similar to ribophorin I [Xenopus laevis]
  misc_feature (52)..(507): Homolog of NCBI NO: 40674542 NR Description: Unknown (protein for MGC:76266) [Silurana
  misc_feature (48)..(507): Homolog of NCBI NO: 28277278 NR Description: Similar to ribophorin I [Xenopus laevis]
  misc_feature (49)..(509): Homolog of NCBI NO: 15223039 NR Description: putative ribophorin I
  misc_feature (49)..(509): Homolog of NCBI NO: 7489438 NR Description: ribophorin I homolog - barley (fragment)
  misc_feature (44)..(507): Homolog of NCBI NO: 15226341 NR Description: putative ribophorin I; protein id: At2g01720.1
FFSPRSLSSSLAKSPRPVPNPHPARPPAMTDHRDVMLPLSLQYIATRALLLLVIASAVSCSSLPPEDGIRVVSAEKRIDLTGPIVKVFLTLKVENAPTASEASRVLLAFTPTEFQHLSIVKATRAEGKRKKKAFVPLSVQASELATTAPDAPRLYSVLLSTPLKPGDATTLEVLYMLTHSLEPFPAEISQSESQLVYYRDSAVLLSPYHVLEQVTYIKMPSNRIESFTRVDPTTRAGSEVKYGTYSNQMPNSYLPVLVHYENNRPFAVVEELVRKVEISHWGNIQITEQYKLKHGGARHKGVFSRLEYQSRPSISGASSFKNLLARLPPRVHSVYYRDEIGNISSSHLRTDSHKSDLEIEPRYPLFGGWHCTFTIGYGLPLQDFVFESVDGRRYINLTFGCPLLDTVVDDLTVKVVLPEGSKNPEHVVPFVTEKHLETSYSYLDVVGRTTVVLKKKNVVGEHNVPFQVYYEFNPIFMLAEPLMLISAVLLFFVAFIAYLHMDLSIRKSS

SEQ ID NO: 2174 - protein, 481 aa, Zea mays subsp. mays
  peptide (1)..(481): Ceres Seq. ID no. 12365197
  misc_feature (41)..(472): Pfam Name: Ribophorin I Pfam Description: Ribophorin I
  misc_feature (21)..(479): Homolog of NCBI NO: 38512106 NR Description: Ribophorin I [Rattus norvegicus]
  misc_feature (50)..(479): Homolog of NCBI NO: 14124942 NR Description: Similar to ribophorin I [Homo sapiens]
  misc_feature (21)..(479): Homolog of NCBI NO: 4506675 NR Description: ribophorin I [Homo sapiens]
  misc_feature (21)..(479): Homolog of NCBI NO: 9857227 NR Description: ribophorin I [Sus scrofa]
  misc_feature (22)..(479): Homolog of NCBI NO: 28175644 NR Description: Similar to ribophorin I [Xenopus laevis]
  misc_feature (24)..(479): Homolog of NCBI NO: 40674542 NR Description: Unknown (protein for MGC:76266) [Silurana
  misc_feature (20)..(479): Homolog of NCBI NO: 28277278 NR Description: Similar to ribophorin I [Xenopus laevis]
  misc_feature (21)..(481): Homolog of NCBI NO: 15223039 NR Description: putative ribophorin I
  misc_feature (21)..(481): Homolog of NCBI NO: 7489438 NR Description: ribophorin I homolog - barley (fragment)
  misc_feature (16)..(479): Homolog of NCBI NO: 15226341 NR Description: putative ribophorin I; protein id: At2g01720.1
MTDHRDVMLPLSLQYIATRALLLLVIASAVSCSSLPPEDGIRVVSAEKRIDLTGPIVKVFLTLKVENAPTASEASRVLLAFTPTEFQHLSIVKATRAEGKRKKKAFVPLSVQASELATTAPDAPRLYSVLLSTPLKPGDATTLEVLYMLTHSLEPFPAEISQSESQLVYYRDSAVLLSPYHVLEQVTYIKMPSNRIESFTRVDPTTRAGSEVKYGTYSNQMPNSYLPVLVHYENNRPFAVVEELVRKVEISHWGNIQITEQYKLKHGGARHKGVFSRLEYQSRPSISGASSFKNLLARLPPRVHSVYYRDEIGNISSSHLRTDSHKSDLEIEPRYPLFGGWHCTFTIGYGLPLQDFVFESVDGRRYINLTFGCPLLDTVVDDLTVKVVLPEGSKNPEHVVPFVTEKHLETSYSYLDVVGRTTVVLKKKNVVGEHNVPFQVYYEFNPIFMLAEPLMLISAVLLFFVAFIAYLHMDLSIRKSS

SEQ ID NO: 2175 - protein, 474 aa, Zea mays subsp. mays
  peptide (1)..(474): Ceres Seq. ID no. 12365198
  misc_feature (34)..(465): Pfam Name: Ribophorin I Pfam Description: Ribophorin I
  misc_feature (14)..(472): Homolog of NCBI NO: 38512106 NR Description: Ribophorin I [Rattus norvegicus]
  misc_feature (43)..(472): Homolog of NCBI NO: 14124942 NR Description: Similar to ribophorin I [Homo sapiens]
  misc_feature (14)..(472): Homolog of NCBI NO: 4506675 NR Description: ribophorin I [Homo sapiens]
  misc_feature (14)..(472): Homolog of NCBI NO: 9857227 NR Description: ribophorin I [Sus scrofa]
  misc_feature (15)..(472): Homolog of NCBI NO: 28175644 NR Description: Similar to ribophorin I [Xenopus laevis]
  misc_feature (17)..(472): Homolog of NCBI NO: 40674542 NR Description: Unknown (protein for MGC:76266) [Silurana
  misc_feature (13)..(472): Homolog of NCBI NO: 28277278 NR Description: Similar to ribophorin I [Xenopus laevis]
  misc_feature (14)..(474): Homolog of NCBI NO: 15223039 NR Description: putative ribophorin I
  misc_feature (14)..(474): Homolog of NCBI NO: 7489438 NR Description: ribophorin I homolog - barley (fragment)
  misc_feature (9)..(472): Homolog of NCBI NO: 15226341 NR Description: putative ribophorin I; protein id: At2g01720.1
MLPLSLQYIATRALLLLVIASAVSCSSLPPEDGIRVVSAEKRIDLTGPIVKVFLTLKVENAPTASEASRVLLAFTPTEFQHLSIVKATRAEGKRKKKAFVPLSVQASELATTAPDAPRLYSVLLSTPLKPGDATTLEVLYMLTHSLEPFPAEISQSESQLVYYRDSAVLLSPYHVLEQVTYIKMPSNRIESFTRVDPTTRAGSEVKYGTYSNQMPNSYLPVLVHYENNRPFAVVEELVRKVEISHWGNIQITEQYKLKHGGARHKGVFSRLEYQSRPSISGASSFKNLLARLPPRVHSVYYRDEIGNISSSHLRTDSHKSDLEIEPRYPLFGGWHCTFTIGYGLPLQDFVFESVDGRRYINLTFGCPLLDTVVDDLTVKVVLPEGSKNPEHVVPFVTEKHLETSYSYLDVVGRTTVVLKKKNVVGEHNVPFQVYYEFNPIFMLAEPLMLISAVLLFFVAFIAYLHMDLSIRKSS

SEQ ID NO: 2176 - DNA, 1484 bp, Zea mays subsp. mays
  misc_feature (1)..(1484): Ceres Seq. ID no. 12410870
  misc_feature: MA Experiment ID: 108534 Result: Up-regulated in Transcription
  misc_feature: MA Experiment 108534 PARAMETER Experiment Name: Zm_4deg_Cold_P Parameter: Age (hr) Value: 8
  misc_feature: MA Experiment 108534 PARAMETER Experiment Name: Zm_4deg_Cold_P Parameter: Organism Value: Zea mays
  misc_feature: MA Experiment 108534 PARAMETER Experiment Name: Zm_4deg_Cold_P Parameter: Plant Line Value: 35A19
  misc_feature: MA Experiment 108534 PARAMETER Experiment Name: Zm_4deg_Cold_P Parameter: Temperature (deg C) Value: 4 vs. 22
  misc_feature: MA Experiment 108534 PARAMETER Experiment Name: Zm_4deg_Cold_P Parameter: Timepoint (hr) Value: 6
  misc_feature: MA Experiment 108534 PARAMETER Experiment Name: Zm_4deg_Cold_P Parameter: Tissue Value: Aerial
  misc_feature: MA Experiment ID: 108556 Result: Down-regulated in Transcription
  misc_feature: MA Experiment 108556 PARAMETER Experiment Name: Zm_Drought_P Parameter: Age (day) Value: 9
  misc_feature: MA Experiment 108556 PARAMETER Experiment Name: Zm_Drought_P Parameter: Organism Value: Zea mays
  misc_feature: MA Experiment 108556 PARAMETER Experiment Name: Zm_Drought_P Parameter: Plant Line Value: 35A19
  misc_feature: MA Experiment 108556 PARAMETER Experiment Name: Zm_Drought_P Parameter: Timepoint (hr) Value: 24
  misc_feature: MA Experiment 108556 PARAMETER Experiment Name: Zm_Drought_P Parameter: Tissue Value: Aerial
  misc_feature: MA Experiment 108556 PARAMETER Experiment Name: Zm_Drought_P Parameter: Treatment Value: Drought vs. No Drought
agtatccagactctctctcgggcctctcggctctcctctccccgatttccttccccacccgctgtcagtctcactccccccgcgcgcgctctctctttcctcgccttcgccgccggcgacgagcttgagctcgagctggttcctcgtatagaagacgacggccgcggtatggagcccatgaacgtagacaacggcggctgcggaggccttgacgcgcagatcgaacagctgatgcagtgccgcccgctcgccgagcaagaggttaaggcactgtgcgagaaggccaaggagatattgatggaggaaagcaacgttcagcctgtcaagagtccagtgacaatatgtggtgatatacatggacaattccatgatcttgtagagcttttccgaattggcgggaagtgtccagacaccaattacttatttatgggagattatgtagatcgtggctactattctgttgagactgtcacgatgctagtagcactaaaagtgaggtatccacatcgaattacaatccttcgtggaaaccacgagagtcggcagatcacacaggtgtatggattctacgacgaatgcctacgaaagtatggcaatgcaaatgtatggaagacatttacggatctttttgattattttcctctgacagctctggtggaatctgagattttctgccttcacggtggtctatctccatcaattgaaaatcttgatagtgtgcgcagcttagatcgagtccaagaggttccccatgagggacctatgtgcgatctcttatggtcagatccagacgaccgatgtggttggggcatctcccctcgcggtgctggctacactttcgggcaggacatatcagagcagtttaatcacacaaacaatctcaaactcgtagctcgggctcatcaattagttatggagggatataactgggctcatgagcaaaaggttgtcaccatattcagtgctccaaattactgctatcgatgcggcaatatggcatccattttggaagttgacgactgcaacagccacacattcatccagtttgaaccagcccctaggagaggtgagccagatgtgacgcgaagaacaccggattatttcctttgagctgtcgatgttaccgtttcccagcctgtgtcgtgataatcgatgccaacgtctgctggatcaagggccagacagaaataacaggggaatgccgaagcactatgcccagagtttcacccttttcaggcgacagagaagggcggccatccacctacaactctggccgccctctgttttatgcactttttacagagtcgtggaactggccaaaaagaccggagtaccatttgcacctgtgtagcgtaagcttgtactacaaataggcgtgtgctaatctgtatcaccattcatcaattgcaacgaactgttgaactccttccatcagtaaagtaaattttggtaaaagaacggcttacagtgtcggtaatgacact

SEQ ID NO: 2177 - protein, 369 aa, Zea mays subsp. mays
  peptide (1)..(369): Ceres Seq. ID no. 12410871
  misc_feature (110)..(305): Pfam Name: Calcineurin-like phosphoesterase Pfam Description: Calcineurin-like phosphoesterase
  misc_feature (70)..(369): Homolog of NCBI NO: 7248363 NR Description: type 2A protein phosphatase-3 [Vicia faba]
  misc_feature (70)..(369): Homolog of NCBI NO: 548441 NR Description: SERINE/THREONINE PROTEIN PHOSPHATASE PP2A
  misc_feature (57)..(369): Homolog of NCBI NO: 11133821 NR Description: Serine/threonine protein phosphatase PP2A
  misc_feature (70)..(369): Homolog of NCBI NO: 18405985 NR Description: protein phosphatase 2A (PP2A)
  misc_feature (70)..(369): Homolog of NCBI NO: 418777 NR Description: phosphoprotein phosphatase (EC 3.1.3.16) 2A-alpha
  misc_feature (70)..(369): Homolog of NCBI NO: 18410971 NR Description: protein phosphatase PP2A catalytic subunit
  misc_feature (68)..(369): Homolog of NCBI NO: 11134218 NR Description: Serine/threonine protein phosphatase PP2A-2
  misc_feature (64)..(369): Homolog of NCBI NO: 11134154 NR Description: Serine/threonine protein phosphatase PP2A-4
  misc_feature (57)..(113): Homolog of NCBI NO: 19071628 NR Description: serine/threonine protein phosphatase PP2A-4
  misc_feature (107)..(369): Homolog of NCBI NO: 19071628 NR Description: serine/threonine protein phosphatase PP2A-4
SIQTLSRASRLSSPRFPSPPAVSLTPPARALSFLAFAAGDELELELVPRIEDDGRGMEPMNVDNGGCGGLDAQIEQLMQCRPLAEQEVKALCEKAKEILMEESNVQPVKSPVTICGDIHGQFHDLVELFRIGGKCPDTNYLFMGDYVDRGYYSVETVTMLVALKVRYPHRITILRGNHESRQITQVYGFYDECLRKYGNANVWKTFTDLFDYFPLTALVESEIFCLHGGLSPSIENLDSVRSLDRVQEVPHEGPMCDLLWSDPDDRCGWGISPRGAGYTFGQDISEQFNHTNNLKLVARAHQLVMEGYNWAHEQKVVTIFSAPNYCYRCGNMASILEVDDCNSHTFIQFEPAPRRGEPDVTRRTPDYFL

SEQ ID NO: 2178 - protein, 313 aa, Zea mays subsp. mays
  peptide (1)..(313): Ceres Seq. ID no. 12410872
  misc_feature (54)..(249): Pfam Name: Calcineurin-like phosphoesterase Pfam Description: Calcineurin-like phosphoesterase
  misc_feature (14)..(313): Homolog of NCBI NO: 7248363 NR Description: type 2A protein phosphatase-3 [Vicia faba]
  misc_feature (14)..(313): Homolog of NCBI NO: 548441 NR Description: SERINE/THREONINE PROTEIN PHOSPHATASE PP2A
  misc_feature (1)..(313): Homolog of NCBI NO: 11133821 NR Description: Serine/threonine protein phosphatase PP2A
  misc_feature (14)..(313): Homolog of NCBI NO: 18405985 NR Description: protein phosphatase 2A (PP2A)
  misc_feature (14)..(313): Homolog of NCBI NO: 418777 NR Description: phosphoprotein phosphatase (EC 3.1.3.16) 2A-alpha
  misc_feature (14)..(313): Homolog of NCBI NO: 18410971 NR Description: protein phosphatase PP2A catalytic subunit
  misc_feature (12)..(313): Homolog of NCBI NO: 11134218 NR Description: Serine/threonine protein phosphatase PP2A-2
  misc_feature (8)..(313): Homolog of NCBI NO: 11134154 NR Description: Serine/threonine protein phosphatase PP2A-4
  misc_feature (1)..(57): Homolog of NCBI NO: 19071628 NR Description: serine/threonine protein phosphatase PP2A-4
  misc_feature (51)..(313): Homolog of NCBI NO: 19071628 NR Description: serine/threonine protein phosphatase PP2A-4
MEPMNVDNGGCGGLDAQIEQLMQCRPLAEQEVKALCEKAKEILMEESNVQPVKSPVTICGDIHGQFHDLVELFRIGGKCPDTNYLFMGDYVDRGYYSVETVTMLVALKVRYPHRITILRGNHESRQITQVYGFYDECLRKYGNANVWKTFTDLFDYFPLTALVESEIFCLHGGLSPSIENLDSVRSLDRVQEVPHEGPMCDLLWSDPDDRCGWGISPRGAGYTFGQDISEQFNHTNNLKLVARAHQLVMEGYNWAHEQKVVTIFSAPNYCYRCGNMASILEVDDCNSHTFIQFEPAPRRGEPDVTRRTPDYFL

SEQ ID NO: 2179 - protein, 310 aa, Zea mays subsp. mays
  peptide (1)..(310): Ceres Seq. ID no. 12410873
  misc_feature (51)..(246): Pfam Name: Calcineurin-like phosphoesterase Pfam Description: Calcineurin-like phosphoesterase
  misc_feature (11)..(310): Homolog of NCBI NO: 7248363 NR Description: type 2A protein phosphatase-3 [Vicia faba]
  misc_feature (11)..(310): Homolog of NCBI NO: 548441 NR Description: SERINE/THREONINE PROTEIN PHOSPHATASE PP2A
  misc_feature (1)..(310): Homolog of NCBI NO: 11133821 NR Description: Serine/threonine protein phosphatase PP2A
  misc_feature (11)..(310): Homolog of NCBI NO: 18405985 NR Description: protein phosphatase 2A (PP2A)
  misc_feature (11)..(310): Homolog of NCBI NO: 418777 NR Description: phosphoprotein phosphatase (EC 3.1.3.16) 2A-alpha
  misc_feature (11)..(310): Homolog of NCBI NO: 18410971 NR Description: protein phosphatase PP2A catalytic subunit
  misc_feature (9)..(310): Homolog of NCBI NO: 11134218 NR Description: Serine/threonine protein phosphatase PP2A-2
  misc_feature (5)..(310): Homolog of NCBI NO: 11134154 NR Description: Serine/threonine protein phosphatase PP2A-4
  misc_feature (1)..(54): Homolog of NCBI NO: 19071628 NR Description: serine/threonine protein phosphatase PP2A-4
  misc_feature (48)..(310): Homolog of NCBI NO: 19071628 NR Description: serine/threonine protein phosphatase PP2A-4
MNVDNGGCGGLDAQIEQLMQCRPLAEQEVKALCEKAKEILMEESNVQPVKSPVTICGDIHGQFHDLVELFRIGGKCPDTNYLFMGDYVDRGYYSVETVTMLVALKVRYPHRITILRGNHESRQITQVYGFYDECLRKYGNANVWKTFTDLFDYFPLTALVESEIFCLHGGLSPSIENLDSVRSLDRVQEVPHEGPMCDLLWSDPDDRCGWGISPRGAGYTFGQDISEQFNHTNNLKLVARAHQLVMEGYNWAHEQKVVTIFSAPNYCYRCGNMASILEVDDCNSHTFIQFEPAPRRGEPDVTRRTPDYFL

SEQ ID NO: 2180 - DNA, 1102 bp, Zea mays subsp. mays
  misc_feature (1)..(1102): Ceres Seq. ID no. 12412419
  misc_feature: MA Experiment ID: 108559 Result: Up-regulated in Transcription
  misc_feature: MA Experiment 108559 PARAMETER Experiment Name: Zm_5mM_NO_P Parameter: Age (day) Value: 8
  misc_feature: MA Experiment 108559 PARAMETER Experiment Name: Zm_5mM_NO_P Parameter: Organism Value: Zea mays
  misc_feature: MA Experiment 108559 PARAMETER Experiment Name: Zm_5mM_NO_P Parameter: Plant Line Value: 35A19
  misc_feature: MA Experiment 108559 PARAMETER Experiment Name: Zm_5mM_NO_P Parameter: Timepoint (hr) Value: 12
  misc_feature: MA Experiment 108559 PARAMETER Experiment Name: Zm_5mM_NO_P Parameter: Tissue Value: Aerial
  misc_feature: MA Experiment 108559 PARAMETER Experiment Name: Zm_5mM_NO_P Parameter: Treatment Value: 5mM NO vs. No Treatment
  misc_feature: MA Experiment ID: 20000534 Result: Down-regulated in Transcription
  misc_feature: MA Experiment 20000534 PARAMETER Experiment Name: Zm_Hybrid_Pollen_P Parameter: Age (day) Value: 8
  misc_feature: MA Experiment 20000534 PARAMETER Experiment Name: Zm_Hybrid_Pollen_P Parameter: Organism Value: Zea mays
  misc_feature: MA Experiment 20000534 PARAMETER Experiment Name: Zm_Hybrid_Pollen_P Parameter: Plant Line Value: 35A19
  misc_feature: MA Experiment 20000534 PARAMETER Experiment Name: Zm_Hybrid_Pollen_P Parameter: Tissue Value: Pollen vs. Aerial
actgtgtgttccttctccggggaaaccacgaatccaagtactgcacgtcagtatatggtttcgagaaggaggtaatgactaaatacaaagatcagggccctcaaatttaccggaagtttttaagatgttttgaggaccttcctctggcgacaataatagcaggatgtgtgtacactgcacacggcggtatcttccgtggaacaattgtagtgccatcaaagaaatcaaaaaagggaaagaagggtcacaaatacaaggcgaattttactgttgatctgacttccatgaaacttggatccttggatgagttattgaaagcaaggagaactgttctcgaccctccttgggaaggctcaaatttgatccctggggatgtgctgtggtctgacccttccttgcagatgggtctttctccgaataaagaacgaggcataggtttgctttggggtcctgatatcactcagcagtttctgaggacaaatcatttgaagctaatcatcaggtcacatgaaaggtccagacgcgagagacaaagcgacacgatctcttaggaatggataaaggatatacgattgatcatgaagtagaatgtgggaaactaattactctcttcagtgctccggactacccacagtttcaggcttcagaggagcgatacaacaatcgtggagcatatattgtccttagtccacctgattttgctacccctgttttccatagcttcggagctgtaaagcctcgacctgcggcccatccgttctatgattttgaacaagtgatcgactcagatgaagaattggatttaatcgccatggacagcggcacgtcgagcctgtcatgacgactcgccatgtaccttttgcacttagggttgtatttattattatcgctccaattgttgccatggaagcgtggcatcaaggttttttgctgtcgttgttgtaagctaatgccaacgtagtaacgttgcaggtttctggatggcctgagtcctgacatgcacacgccaaatctgatctgttggtttggttgaggttgatttgtatctaaaactaagtgagcgtgagatgtcatctaaaggctgaaggaagtcagcggttgc

SEQ ID NO: 2181 - protein, 182 aa, Zea mays subsp. mays
  peptide (1)..(182): Ceres Seq. ID no. 12412420
  misc_feature (2)..(170): Pfam Name: Calcineurin-like phosphoesterase Pfam Description: Calcineurin-like phosphoesterase
  misc_feature (94)..(182): Homolog of NCBI NO: 15238894 NR Description: serine/threonine protein phosphatase; protein id:
  misc_feature (2)..(164): Homolog of NCBI NO: 18424758 NR Description: ser/thr protein phosphatase catalytic subunit
  misc_feature (2)..(175): Homolog of NCBI NO: 25405918 NR Description: protein F21D18.16 [imported] - Arabidopsis
  misc_feature (2)..(170): Homolog of NCBI NO: 39586060 NR Description: Hypothetical protein CBG15166 [Caenorhabditis
  misc_feature (88)..(170): Homolog of NCBI NO: 19347799 NR Description: putative phosphoprotein phosphatase [Arabidopsis
  misc_feature (2)..(65): Homolog of NCBI NO: 15238894 NR Description: serine/threonine protein phosphatase; protein id:
  misc_feature (2)..(64): Homolog of NCBI NO: 19347799 NR Description: putative phosphoprotein phosphatase [Arabidopsis
  misc_feature (2)..(175): Homolog of NCBI NO: 15221080 NR Description: serine/threonine phosphatase PP7, putative
  misc_feature (2)..(178): Homolog of NCBI NO: 30697908 NR Description: ser/thr protein phosphatase catalytic subunit
  misc_feature (2)..(178): Homolog of NCBI NO: 11358619 NR Description: phosphoprotein phosphatase (EC 3.1.3.16) PP7
CVFLLRGNHESKYCTSVYGFEKEVMTKYKDQGPQIYRKFLRCFEDLPLATIIAGCVYTAHGGIFRGTIVVPSKKSKKGKKGHKYKANFTVDLTSMKLGSLDELLKARRTVLDPPWEGSNLIPGDVLWSDPSLQMGLSPNKERGIGLLWGPDITQQFLRTNHLKLIIRSHERSRRERQSDTIS

SEQ ID NO: 2182 - protein, 158 aa, Zea mays subsp. mays
  peptide (1)..(158): Ceres Seq. ID no. 12412421
  misc_feature (1)..(146): Pfam Name: Calcineurin-like phosphoesterase Pfam Description: Calcineurin-like phosphoesterase
  misc_feature (1)..(146): Homolog of NCBI NO: 39586060 NR Description: Hypothetical protein CBG15166 [Caenorhabditis
  misc_feature (1)..(40): Homolog of NCBI NO: 19347799 NR Description: putative phosphoprotein phosphatase [Arabidopsis
  misc_feature (64)..(146): Homolog of NCBI NO: 19347799 NR Description: putative phosphoprotein phosphatase [Arabidopsis
  misc_feature (1)..(41): Homolog of NCBI NO: 15238894 NR Description: serine/threonine protein phosphatase; protein id:
  misc_feature (70)..(158): Homolog of NCBI NO: 15238894 NR Description: serine/threonine protein phosphatase; protein id:
  misc_feature (1)..(140): Homolog of NCBI NO: 18424758 NR Description: ser/thr protein phosphatase catalytic subunit
  misc_feature (1)..(151): Homolog of NCBI NO: 25405918 NR Description: protein F21D18.16 [imported] - Arabidopsis
  misc_feature (1)..(151): Homolog of NCBI NO: 15221080 NR Description: serine/threonine phosphatase PP7, putative
  misc_feature (1)..(154): Homolog of NCBI NO: 30697908 NR Description: ser/thr protein phosphatase catalytic subunit
  misc_feature (1)..(154): Homolog of NCBI NO: 11358619 NR Description: phosphoprotein phosphatase (EC 3.1.3.16) PP7
MTKYKDQGPQIYRKFLRCFEDLPLATIIAGCVYTAHGGIFRGTIVVPSKKSKKGKKGHKYKANFTVDLTSMKLGSLDELLKARRTVLDPPWEGSNLIPGDVLWSDPSLQMGLSPNKERGIGLLWGPDITQQFLRTNHLKLIIRSHERSRRERQSDTIS

SEQ ID NO: 2183 - protein, 95 aa, Zea mays subsp. mays
  peptide (1)..(95): Ceres Seq. ID no. 12412422
  misc_feature (1)..(57): Homolog of NCBI NO: 15238894 NR Description: serine/threonine protein phosphatase; protein id:
  misc_feature (1)..(82): Homolog of NCBI NO: 25405918 NR Description: protein F21D18.16 [imported] - Arabidopsis
  misc_feature (1)..(82): Homolog of NCBI NO: 15221080 NR Description: serine/threonine phosphatase PP7, putative
  misc_feature (1)..(89): Homolog of NCBI NO: 30697908 NR Description: ser/thr protein phosphatase catalytic subunit
  misc_feature (1)..(89): Homolog of NCBI NO: 11358619 NR Description: phosphoprotein phosphatase (EC 3.1.3.16) PP7
MDKGYTIDHEVECGKLITLFSAPDYPQFQASEERYNNRGAYIVLSPPDFATPVFHSFGAVKPRPAAHPFYDFEQVIDSDEELDLIAMDSGTSSLS

SEQ ID NO: 2184 - DNA, 950 bp, Zea mays subsp. mays
  misc_feature (1)..(950): Ceres Seq. ID no. 12352680
  misc_feature: MA Experiment ID: 108535 Result: Up-regulated in Transcription
  misc_feature: MA Experiment 108535 PARAMETER Experiment Name: Zm_Meristem_P Parameter: Age (day) Value: 8
  misc_feature: MA Experiment 108535 PARAMETER Experiment Name: Zm_Meristem_P Parameter: Organism Value: Zea mays
  misc_feature: MA Experiment 108535 PARAMETER Experiment Name: Zm_Meristem_P Parameter: Plant Line Value: 35A19
  misc_feature: MA Experiment 108535 PARAMETER Experiment Name: Zm_Meristem_P Parameter: Tissue Value: Root Meristem vs. Above Root Meristem
gccgcaatacacactactgttcctccgattaacggaccggccggcgacgtgcatagcaggtacgcagcagctctagctagcaatggcgcctccccgccggccgagcatggggcggcagaagatcgagatccggcgcatagagagcgacgaggcgcggcaggtgtgcttctcgaagcgccgcgcggggctgttcaagaaggccagcgagctgtccatcctctgcggcgccgacgtggccgccgtcgtcttctcccccgccggcaaggccttctccttcggccacccgtccgtggagtccgtcgtcgagcgcttcctcgcctcgtcgtccccctcgcctgccggtgccggtgccggccactccgccagcggcggcgaggaccgcgcggtctcggagctgaaccgccagcacggcgagctgcgcgcgcagctggacgccgtgaaggcgaggcaggagcgcgcggacgaggcgatccggaaggagcgcgaggcggggagcccggcgatggcgtggatcgacgcggaactgagcgggggcgcgatggggcacgacgacctggtcgcgttctgggccgcgcttgcgggcgtgcaggccgccgtggcggccagcgccgaccggctgctgcgcgacgcgctgctcgtcgggcgcaggggccggcagcagcagcagccggcccagcttgccgggggtggtggcgtggcctttgacgtcggcgcgtttggcggcgttggcgtgcaggtgcagccgcctccgggattcgccggcgtcgtcgacctgcaggggttcggggggcaggctgcggccatcctcggcgccggcggtccctcatgagtgatcgaatgcgtgtgtgcatacttcactcaagttgtttggagataacgtcgcaaataaatttgcgacaaatgttttggttaatttgttcgtatgcattgttcgttctcaccttgctctc

SEQ ID NO: 2185 - protein, 248 aa, Zea mays subsp. mays
  peptide (1)..(248): Ceres Seq. ID no. 12352681
  misc_feature (17)..(67): Pfam Name: SRF-type transcription factor (DNA-binding and Pfam Description: SRF-type transcription factor (DNA-binding and
  misc_feature (9)..(135): Homolog of NCBI NO: 3253153 NR Description: MADS-box protein [Ceratopteris richardii]
  misc_feature (9)..(128): Homolog of NCBI NO: 34015383 NR Description: putative transcription factor
  misc_feature (6)..(221): Homolog of NCBI NO: 15218647 NR Description: MADS-box protein; protein id: At1g65360.1
  misc_feature (6)..(135): Homolog of NCBI NO: 15234456 NR Description: MADS-box protein
  misc_feature (9)..(130): Homolog of NCBI NO: 15226309 NR Description: MADS-box protein; protein id: At2g34440.1
  misc_feature (6)..(85): Homolog of NCBI NO: 32402436 NR Description: MADS-box protein AGL62 [Arabidopsis thaliana]
  misc_feature (6)..(181): Homolog of NCBI NO: 15239333 NR Description: MADS-box protein; protein id: At5g60440.1
  misc_feature (5)..(143): Homolog of NCBI NO: 25412255 NR Description: probable MADS-box protein [imported] -
  misc_feature (1)..(143): Homolog of NCBI NO: 30682571 NR Description: MADS-box protein [Arabidopsis thaliana]
  misc_feature (2)..(189): Homolog of NCBI NO: 34906076 NR Description: P0459B04.16 [Oryza sativa (japonica
MAPPRRPSMGRQKIEIRRIESDEARQVCFSKRRAGLFKKASELSILCGADVAAVVFSPAGKAFSFGHPSVESVVERFLASSSPSPAGAGAGHSASGGEDRAVSELNRQHGELRAQLDAVKARQERADEAIRKEREAGSPAMAWIDAELSGGAMGHDDLVAFWAALAGVQAAVAASADRLLRDALLVGRRGRQQQQPAQLAGGGGVAFDVGAFGGVGVQVQPPPGFAGVVDLQGFGGQAAAILGAGGPS

SEQ ID NO: 2186 - protein, 240 aa, Zea mays subsp. mays
  peptide (1)..(240): Ceres Seq. ID no. 12352682
  misc_feature (9)..(59): Pfam Name: SRF-type transcription factor (DNA-binding and Pfam Description: SRF-type transcription factor (DNA-binding and
  misc_feature (1)..(127): Homolog of NCBI NO: 3253153 NR Description: MADS-box protein [Ceratopteris richardii]
  misc_feature (1)..(120): Homolog of NCBI NO: 34015383 NR Description: putative transcription factor
  misc_feature (1)..(213): Homolog of NCBI NO: 15218647 NR Description: MADS-box protein; protein id: At1g65360.1
  misc_feature (1)..(127): Homolog of NCBI NO: 15234456 NR Description: MADS-box protein
  misc_feature (1)..(122): Homolog of NCBI NO: 15226309 NR Description: MADS-box protein; protein id: At2g34440.1
  misc_feature (1)..(77): Homolog of NCBI NO: 32402436 NR Description: MADS-box protein AGL62 [Arabidopsis thaliana]
  misc_feature (1)..(173): Homolog of NCBI NO: 15239333 NR Description: MADS-box protein; protein id: At5g60440.1
  misc_feature (1)..(135): Homolog of NCBI NO: 25412255 NR Description: probable MADS-box protein [imported] -
  misc_feature (1)..(135): Homolog of NCBI NO: 30682571 NR Description: MADS-box protein [Arabidopsis thaliana]
  misc_feature (1)..(181): Homolog of NCBI NO: 34906076 NR Description: P0459B04.16 [Oryza sativa (japonica
MGRQKIEIRRIESDEARQVCFSKRRAGLFKKASELSILCGADVAAVVFSPAGKAFSFGHPSVESVVERFLASSSPSPAGAGAGHSASGGEDRAVSELNRQHGELRAQLDAVKARQERADEAIRKEREAGSPAMAWIDAELSGGAMGHDDLVAFWAALAGVQAAVAASADRLLRDALLVGRRGRQQQQPAQLAGGGGVAFDVGAFGGVGVQVQPPPGFAGVVDLQGFGGQAAAILGAGGPS

SEQ ID NO: 2187 - protein, 234 aa, Zea mays subsp. mays
  peptide (1)..(234): Ceres Seq. ID no. 12352683
  misc_feature (76)..(218): Pfam Name: HlyD family secretion protein Pfam Description: HlyD family secretion protein
AAIHTTVPPINGPAGDVHSRYAAALASNGASPPAEHGAAEDRDPAHRERRGAAGVLLEAPRGAVQEGQRAVHPLRRRRGRRRLLPRRQGLLLRPPVRGVRRRALPRLVVPLACRCRCRPLRQRRRGPRGLGAEPPARRAARAAGRREGEAGARGRGDPEGARGGEPGDGVDRRGTERGRDGARRPGRVLGRACGRAGRRGGQRRPAAARRAARRAQGPAAAAAGPACRGWWRGL

SEQ ID NO: 2188 - DNA, 1232 bp, Zea mays subsp. mays
  misc_feature (1)..(1232): Ceres Seq. ID no. 13635672
  misc_feature: MA Experiment ID: 108523 Result: Up-regulated in Transcription
  misc_feature: MA Experiment 108523 PARAMETER Experiment Name: Zm_42deg_Heat_P Parameter: Age (day) Value: 8
  misc_feature: MA Experiment 108523 PARAMETER Experiment Name: Zm_42deg_Heat_P Parameter: Organism Value: Zea mays
  misc_feature: MA Experiment 108523 PARAMETER Experiment Name: Zm_42deg_Heat_P Parameter: Plant Line Value: 35A19
  misc_feature: MA Experiment 108523 PARAMETER Experiment Name: Zm_42deg_Heat_P Parameter: Temperature (deg C) Value: 42 vs. 22
  misc_feature: MA Experiment 108523 PARAMETER Experiment Name: Zm_42deg_Heat_P Parameter: Timepoint (hr) Value: 6
  misc_feature: MA Experiment 108523 PARAMETER Experiment Name: Zm_42deg_Heat_P Parameter: Tissue Value: Aerial
  misc_feature: MA Experiment ID: 108527 Result: Up-regulated in Transcription
  misc_feature: MA Experiment 108527 PARAMETER Experiment Name: Zm_5mM_NO_P Parameter: Age (day) Value: 8
  misc_feature: MA Experiment 108527 PARAMETER Experiment Name: Zm_5mM_NO_P Parameter: Organism Value: Zea mays
  misc_feature: MA Experiment 108527 PARAMETER Experiment Name: Zm_5mM_NO_P Parameter: Plant Line Value: 35A19
  misc_feature: MA Experiment 108527 PARAMETER Experiment Name: Zm_5mM_NO_P Parameter: Timepoint (hr) Value: 6
  misc_feature: MA Experiment 108527 PARAMETER Experiment Name: Zm_5mM_NO_P Parameter: Tissue Value: Aerial
  misc_feature: MA Experiment 108527 PARAMETER Experiment Name: Zm_5mM_NO_P Parameter: Treatment Value: 5mM NO vs. No Treatment
  misc_feature: MA Experiment ID: 108543 Result: Down-regulated in Transcription
gcacgagaccattacctagaacatcctaatcaaaaaacaagtagatctcgcggtgttattcctcccgagtcgcctccccctcaagttccacaaacgcaagccccaatctcgccgtcaccacctcaatccagcaaacgcaaaccccatctcgccgccgccgcgatgtctcgccgctatgacagccgcacgacgatcttctcgccggaggggcgtctctaccaggtggagtacgcgatggaggcgatcggcaacgccggngtcagccctcgggatcctagcggccgacggcgtggtcctcgtcggcgagaagaaggtgacctccaagctcctccagacctcgcgctccgccgagaagatgtacaagatcgactcccacctggcgtgcgccgtggccgggatcatgtccgacgccaacatcctcatcaacaccgcccgcctccacgcccaacgctacgcgctctcctaccaggaacccatccccgtcgagcagctcgtccagtccctctgcgacaccaagcaggggtacacccagttcggaggcctccgccccttcggggtctccttcctattcgctgggtgggacaagcaccacggcttccagctctacatgagcgacccatccgggaactacggcgggtggaaggccgccgctgttggggccaacagccaggccgcgcagtccatgctcaagcaggactacaaggacggcttgacccgcgaggaggccgtcgccctcgcgcttaaggtcctcagcaagaccatggactccaccagcctgactgccgagaagctggagctggccgaggtgtttctgcagccgggctccggggaggtacagtaccaggtgtgctctcctgaagcgctggggaagctgcttgcaaagtccggcctgacacagccaacacccgaggcataatgctctgttttgctgtggcttgtgatgcctactactgctcttagacatggtttaagcatttgtgcttctgttgtgtgaacttgaatattcgacgattatgtggtctaattttatgttgagcatcctagatacgttaatgtttcatctgtaactgtggattgccttgaactggttgcaaattggtgatttctatctgctctgcttgattattgtcgtgattagggagcatgtgggataatggaacaggcaaaattaggtttggttctaacgcatctggatgataccgactgtatttagtgaccatggcaaaattttc

SEQ ID NO: 2189 - protein, 247 aa, Zea mays subsp. mays
  peptide (1)..(247): Ceres Seq. ID no. 15220349
  misc_feature (55)..(86): Homolog of NCBI NO: 34898416 NR Description: ESTs AU058081(E30812),AU058365(E50679), correspond to a region of the predicted gene.~Similar to Spinacia
  misc_feature (55)..(86): Homolog of NCBI NO: 34898458 NR Description: ESTs AU058081(E3082),AU075427(E30384) correspond a region of the predicted gene.~Similar to Spinacia oleracea
  misc_feature (55)..(86): Homolog of NCBI NO: 1709761 NR Description: Proteasome subunit alpha type 4 (20S proteasome
  misc_feature (55)..(86): Homolog of NCBI NO: 15233268 NR Description: 20S proteasome alpha subunit C (PAC1) thaliana] >gi|12643237|sp|O81148|PSA4_ARATH Proteasome subunit type 4 (20S proteasome alpha subunit C) (Proteasome 27 kDa
  misc_feature (55)..(86): Homolog of NCBI NO: 2511584 NR Description: multicatalytic endopeptidase [Arabidopsis
  misc_feature (55)..(86): Homolog of NCBI NO: 12229904 NR Description: Proteasome subunit alpha type 4 (20S proteasome
  misc_feature (63)..(88): Homolog of NCBI NO: 6984140 NR Description: proteasome 27 kDa subunit [Euphorbia esula]
  misc_feature (55)..(86): Homolog of NCBI NO: 23394356 NR Description: proteasome subunit [Phytophthora infestans]
  misc_feature (55)..(88): Homolog of NCBI NO: 32410633 NR Description: hypothetical protein [Neurospora crassa]
  misc_feature (55)..(88): Homolog of NCBI NO: 40744887 NR Description: conserved hypothetical protein [Aspergillus
  misc_feature (55)..(86): Homolog of NCBI NO: 34898416 NR Description: ESTs AU058081(E30812),AU058365(E50679), correspond to a region of the predicted gene.~Similar to Spinacia
  misc_feature (55)..(86): Homolog of NCBI NO: 34898458 NR Description: ESTs AU058081(E3082),AU075427(E30384) correspond a region of the predicted gene.~Similar to Spinacia oleracea
  misc_feature (55)..(86): Homolog of NCBI NO: 1709761 NR Description: Proteasome subunit alpha type 4 (20S proteasome
  misc_feature (55)..(86): Homolog of NCBI NO: 15233268 NR Description: 20S proteasome alpha subunit C (PAC1) thaliana] >gi|12643237|sp|O81148|PSA4_ARATH Proteasome subunit type 4 (20S proteasome alpha subunit C) (Proteasome 27 kDa
  misc_feature (55)..(86): Homolog of NCBI NO: 2511584 NR Description: multicatalytic endopeptidase [Arabidopsis
  misc_feature (55)..(86): Homolog of NCBI NO: 12229904 NR Description: Proteasome subunit alpha type 4 (20S proteasome
  misc_feature (63)..(88): Homolog of NCBI NO: 6984140 NR Description: proteasome 27 kDa subunit [Euphorbia esula]
  misc_feature (55)..(86): Homolog of NCBI NO: 23394356 NR Description: proteasome subunit [Phytophthora infestans]
  misc_feature (55)..(88): Homolog of NCBI NO: 32410633 NR Description: hypothetical protein [Neurospora crassa]
  misc_feature (55)..(88): Homolog of NCBI NO: 40744887 NR Description: conserved hypothetical protein [Aspergillus
  misc_feature (86)..(86): Xaa is any aa, unknown or other
ARDHYLEHPNQKTSRSRGVIPPESPPPQVPQTQAPISPSPPQSSKRKPHLAAAAMSRRYDSRTTIFSPEGRLYQVEYAMEAIGNAXVSPRDPSGRRRGPRRREEGDLQAPPDLALRREDVQDRLPPGVRRGRDHVRRQHPHQHRPPPRPTLRALLPGTHPRRAARPVPLRHQAGVHPVRRPPPLRGLLPIRWVGQAPRLPALHERPIRELRRVEGRRCWGQQPGRAVHAQAGLQGRLDPRGGRRPRA

SEQ ID NO: 2190 - protein, 246 aa, Zea mays subsp. mays
  peptide (1)..(246): Ceres Seq. ID no. 15220350
  misc_feature (29)..(211): Pfam Name: Proteasome A-type and B-type Pfam Description: Proteasome A-type and B-type
  misc_feature (29)..(211): Pfam Name: Proteasome A-type and B-type Pfam Description: Proteasome A-type and B-type
  misc_feature (29)..(246): Homolog of NCBI NO: 34898416 NR Description: ESTs AU058081(E30812),AU058365(E50679), correspond to a region of the predicted gene.~Similar to Spinacia
  misc_feature (29)..(246): Homolog of NCBI NO: 34898458 NR Description: ESTs AU058081(E3082),AU075427(E30384) correspond a region of the predicted gene.~Similar to Spinacia oleracea
  misc_feature (29)..(245): Homolog of NCBI NO: 1709761 NR Description: Proteasome subunit alpha type 4 (20S proteasome
  misc_feature (29)..(245): Homolog of NCBI NO: 15233268 NR Description: 20S proteasome alpha subunit C (PAC1) thaliana] >gi|12643237|sp|O81148|PSA4_ARATH Proteasome subunit type 4 (20S proteasome alpha subunit C) (Proteasome 27 kDa
  misc_feature (29)..(245): Homolog of NCBI NO: 2511584 NR Description: multicatalytic endopeptidase [Arabidopsis
  misc_feature (29)..(246): Homolog of NCBI NO: 34898458 NR Description: ESTs AU058081(E3082),AU075427(E30384) correspond a region of the predicted gene.~Similar to Spinacia oleracea
  misc_feature (29)..(245): Homolog of NCBI NO: 15233268 NR Description: 20S proteasome alpha subunit C (PAC1) thaliana] >gi|12643237|sp|O81148|PSA4_ARATH Proteasome subunit type 4 (20S proteasome alpha subunit C) (Proteasome 27 kDa
  misc_feature (29)..(241): Homolog of NCBI NO: 32410633 NR Description: hypothetical protein [Neurospora crassa]
  misc_feature (29)..(237): Homolog of NCBI NO: 23394356 NR Description: proteasome subunit [Phytophthora infestans]
  misc_feature (55)..(246): Homolog of NCBI NO: 14039743 NR Description: 20S proteasome subunit alpha 3 [Lolium perenne]
  misc_feature (29)..(246): Homolog of NCBI NO: 6984140 NR Description: proteasome 27 kDa subunit [Euphorbia esula]
  misc_feature (29)..(245): Homolog of NCBI NO: 12229904 NR Description: Proteasome subunit alpha type 4 (20S proteasome
  misc_feature (29)..(245): Homolog of NCBI NO: 2511584 NR Description: multicatalytic endopeptidase [Arabidopsis
  misc_feature (29)..(245): Homolog of NCBI NO: 1709761 NR Description: Proteasome subunit alpha type 4 (20S proteasome
  misc_feature (29)..(246): Homolog of NCBI NO: 34898416 NR Description: ESTs AU058081(E30812),AU058365(E50679), correspond to a region of the predicted gene.~Similar to Spinacia
  misc_feature (29)..(245): Homolog of NCBI NO: 12229904 NR Description: Proteasome subunit alpha type 4 (20S proteasome
  misc_feature (29)..(246): Homolog of NCBI NO: 6984140 NR Description: proteasome 27 kDa subunit [Euphorbia esula]
  misc_feature (55)..(246): Homolog of NCBI NO: 14039743 NR Description: 20S proteasome subunit alpha 3 [Lolium perenne]
  misc_feature (29)..(237): Homolog of NCBI NO: 23394356 NR Description: proteasome subunit [Phytophthora infestans]
  misc_feature (29)..(241): Homolog of NCBI NO: 32410633 NR Description: hypothetical protein [Neurospora crassa]
  misc_feature (28)..(28): Xaa is any aa, unknown or other
MTAARRSSRRRGVSTRWSTRWRRSATPXSALGILAADGVVLVGEKKVTSKLLQTSRSAEKMYKIDSHLACAVAGIMSDANILINTARLHAQRYALSYQEPIPVEQLVQSLCDTKQGYTQFGGLRPFGVSFLFAGWDKHHGFQLYMSDPSGNYGGWKAAAVGANSQAAQSMLKQDYKDGLTREEAVALALKVLSKTMDSTSLTAEKLELAEVFLQPGSGEVQYQVCSPEALGKLLAKSGLTQPTPEA

SEQ ID NO: 2191 - protein, 193 aa, Zea mays subsp. mays
  peptide (1)..(193): Ceres Seq. ID no. 15220351
  misc_feature (1)..(32): Homolog of NCBI NO: 34898416 NR Description: ESTs AU058081(E30812),AU058365(E50679), correspond to a region of the predicted gene.~Similar to Spinacia
  misc_feature (1)..(32): Homolog of NCBI NO: 34898458 NR Description: ESTs AU058081(E3082),AU075427(E30384) correspond a region of the predicted gene.~Similar to Spinacia oleracea
  misc_feature (1)..(32): Homolog of NCBI NO: 1709761 NR Description: Proteasome subunit alpha type 4 (20S proteasome
  misc_feature (1)..(32): Homolog of NCBI NO: 15233268 NR Description: 20S proteasome alpha subunit C (PAC1) thaliana] >gi|12643237|sp|O81148|PSA4_ARATH Proteasome subunit type 4 (20S proteasome alpha subunit C) (Proteasome 27 kDa
  misc_feature (1)..(32): Homolog of NCBI NO: 2511584 NR Description: multicatalytic endopeptidase [Arabidopsis
  misc_feature (1)..(32): Homolog of NCBI NO: 12229904 NR Description: Proteasome subunit alpha type 4 (20S proteasome
  misc_feature (9)..(34): Homolog of NCBI NO: 6984140 NR Description: proteasome 27 kDa subunit [Euphorbia esula]
  misc_feature (1)..(32): Homolog of NCBI NO: 23394356 NR Description: proteasome subunit [Phytophthora infestans]
  misc_feature (1)..(34): Homolog of NCBI NO: 32410633 NR Description: hypothetical protein [Neurospora crassa]
  misc_feature (1)..(34): Homolog of NCBI NO: 40744887 NR Description: conserved hypothetical protein [Aspergillus
  misc_feature (1)..(32): Homolog of NCBI NO: 34898416 NR Description: ESTs AU058081(E30812),AU058365(E50679), correspond to a region of the predicted gene.~Similar to Spinacia
  misc_feature (1)..(32): Homolog of NCBI NO: 34898458 NR Description: ESTs AU058081(E3082),AU075427(E30384) correspond a region of the predicted gene.~Similar to Spinacia oleracea
  misc_feature (1)..(32): Homolog of NCBI NO: 1709761 NR Description: Proteasome subunit alpha type 4 (20S proteasome
  misc_feature (1)..(32): Homolog of NCBI NO: 15233268 NR Description: 20S proteasome alpha subunit C (PAC1) thaliana] >gi|12643237|sp|O81148|PSA4_ARATH Proteasome subunit type 4 (20S proteasome alpha subunit C) (Proteasome 27 kDa
  misc_feature (1)..(32): Homolog of NCBI NO: 2511584 NR Description: multicatalytic endopeptidase [Arabidopsis
  misc_feature (1)..(32): Homolog of NCBI NO: 12229904 NR Description: Proteasome subunit alpha type 4 (20S proteasome
  misc_feature (9)..(34): Homolog of NCBI NO: 6984140 NR Description: proteasome 27 kDa subunit [Euphorbia esula]
  misc_feature (1)..(32): Homolog of NCBI NO: 23394356 NR Description: proteasome subunit [Phytophthora infestans]
  misc_feature (1)..(34): Homolog of NCBI NO: 32410633 NR Description: hypothetical protein [Neurospora crassa]
  misc_feature (1)..(34): Homolog of NCBI NO: 40744887 NR Description: conserved hypothetical protein [Aspergillus
  misc_feature (32)..(32): Xaa is any aa, unknown or other
MSRRYDSRTTIFSPEGRLYQVEYAMEAIGNAXVSPRDPSGRRRGPRRREEGDLQAPPDLALRREDVQDRLPPGVRRGRDHVRRQHPHQHRPPPRPTLRALLPGTHPRRAARPVPLRHQAGVHPVRRPPPLRGLLPIRWVGQAPRLPALHERPIRELRRVEGRRCWGQQPGRAVHAQAGLQGRLDPRGGRRPRA

SEQ ID NO: 2192 - DNA, 1856 bp, Zea mays subsp. mays
  misc_feature (1)..(1856): Ceres Seq. ID no. 12373912
  misc_feature: MA Experiment ID: 108522 Result: Up-regulated in Transcription
  misc_feature: MA Experiment 108522 PARAMETER Experiment Name: Zm_42deg_Heat_P Parameter: Age (day) Value: 8
  misc_feature: MA Experiment 108522 PARAMETER Experiment Name: Zm_42deg_Heat_P Parameter: Organism Value: Zea mays
  misc_feature: MA Experiment 108522 PARAMETER Experiment Name: Zm_42deg_Heat_P Parameter: Plant Line Value: 35A19
  misc_feature: MA Experiment 108522 PARAMETER Experiment Name: Zm_42deg_Heat_P Parameter: Temperature (deg C) Value: 42 vs. 22
  misc_feature: MA Experiment 108522 PARAMETER Experiment Name: Zm_42deg_Heat_P Parameter: Timepoint (hr) Value: 1
  misc_feature: MA Experiment 108522 PARAMETER Experiment Name: Zm_42deg_Heat_P Parameter: Tissue Value: Aerial
  misc_feature: MA Experiment ID: 108528 Result: Up-regulated in Transcription
  misc_feature: MA Experiment 108528 PARAMETER Experiment Name: Zm_Imbibed_Seeds_P Parameter: Age (day) Value: 5 vs. 2
  misc_feature: MA Experiment 108528 PARAMETER Experiment Name: Zm_Imbibed_Seeds_P Parameter: Organism Value: Zea mays
  misc_feature: MA Experiment 108528 PARAMETER Experiment Name: Zm_Imbibed_Seeds_P Parameter: Plant Line Value: 35A19
  misc_feature: MA Experiment 108528 PARAMETER Experiment Name: Zm_Imbibed_Seeds_P Parameter: Tissue Value: Aerial vs. Embryo
  misc_feature: MA Experiment ID: 108529 Result: Up-regulated in Transcription
  misc_feature: MA Experiment 108529 PARAMETER Experiment Name: Zm_Imbibed_Seeds_P Parameter: Age (day) Value: 5 vs. 2
  misc_feature: MA Experiment 108529 PARAMETER Experiment Name: Zm_Imbibed_Seeds_P Parameter: Organism Value: Zea mays
  misc_feature: MA Experiment 108529 PARAMETER Experiment Name: Zm_Imbibed_Seeds_P Parameter: Plant Line Value: 35A19
  misc_feature: MA Experiment 108529 PARAMETER Experiment Name: Zm_Imbibed_Seeds_P Parameter: Tissue Value: Roots vs. Embryo
  misc_feature: MA Experiment ID: 108530 Result: Up-regulated in Transcription
  misc_feature: MA Experiment 108530 PARAMETER Experiment Name: Zm_Imbibed_Seeds_P Parameter: Age (day) Value: 6 vs. 2
  misc_feature: MA Experiment 108530 PARAMETER Experiment Name: Zm_Imbibed_Seeds_P Parameter: Organism Value: Zea mays
  misc_feature: MA Experiment 108530 PARAMETER Experiment Name: Zm_Imbibed_Seeds_P Parameter: Plant Line Value: 35A19
  misc_feature: MA Experiment 108530 PARAMETER Experiment Name: Zm_Imbibed_Seeds_P Parameter: Tissue Value: Aerial vs. Embryo
  misc_feature: MA Experiment ID: 108535 Result: Down-regulated in Transcription
  misc_feature: MA Experiment 108535 PARAMETER Experiment Name: Zm_Meristem_P Parameter: Age (day) Value: 8
  misc_feature: MA Experiment 108535 PARAMETER Experiment Name: Zm_Meristem_P Parameter: Organism Value: Zea mays
  misc_feature: MA Experiment 108535 PARAMETER Experiment Name: Zm_Meristem_P Parameter: Plant Line Value: 35A19
  misc_feature: MA Experiment 108535 PARAMETER Experiment Name: Zm_Meristem_P Parameter: Tissue Value: Root Meristem vs. Above Root Meristem
  misc_feature: MA Experiment ID: 108547 Result: Up-regulated in Transcription
  misc_feature: MA Experiment 108547 PARAMETER Experiment Name: Zm_Imbibed_Seeds_P Parameter: Age (day) Value: 4 vs. 2
  misc_feature: MA Experiment 108547 PARAMETER Experiment Name: Zm_Imbibed_Seeds_P Parameter: Organism Value: Zea mays
  misc_feature: MA Experiment 108547 PARAMETER Experiment Name: Zm_Imbibed_Seeds_P Parameter: Plant Line Value: 35A19
  misc_feature: MA Experiment 108547 PARAMETER Experiment Name: Zm_Imbibed_Seeds_P Parameter: Tissue Value: Aerial vs. Embryo
  misc_feature: MA Experiment ID: 20000478 Result: Up-regulated in Transcription
  misc_feature: MA Experiment 20000478 PARAMETER Experiment Name: Zm_5mM_SA_P Parameter: Age (day) Value: 11
  misc_feature: MA Experiment 20000478 PARAMETER Experiment Name: Zm_5mM_SA_P Parameter: Organism Value: Zea mays
  misc_feature: MA Experiment 20000478 PARAMETER Experiment Name: Zm_5mM_SA_P Parameter: Plant Line Value: 35A19
  misc_feature: MA Experiment 20000478 PARAMETER Experiment Name: Zm_5mM_SA_P Parameter: Timepoint (hr) Value: 72
  misc_feature: MA Experiment 20000478 PARAMETER Experiment Name: Zm_5mM_SA_P Parameter: Tissue Value: Aerial
  misc_feature: MA Experiment 20000478 PARAMETER Experiment Name: Zm_5mM_SA_P Parameter: Treatment Value: 5mM SA vs. No Treatment
  misc_feature: MA Experiment ID: 20000479 Result: Up-regulated in Transcription
  misc_feature: MA Experiment 20000479 PARAMETER Experiment Name: Zm_Drought_P Parameter: Age (day) Value: 10
  misc_feature: MA Experiment 20000479 PARAMETER Experiment Name: Zm_Drought_P Parameter: Organism Value: Zea mays
  misc_feature: MA Experiment 20000479 PARAMETER Experiment Name: Zm_Drought_P Parameter: Plant Line Value: 35A19
  misc_feature: MA Experiment 20000479 PARAMETER Experiment Name: Zm_Drought_P Parameter: Timepoint (hr) Value: 48
  misc_feature: MA Experiment 20000479 PARAMETER Experiment Name: Zm_Drought_P Parameter: Tissue Value: Aerial
  misc_feature: MA Experiment 20000479 PARAMETER Experiment Name: Zm_Drought_P Parameter: Treatment Value: Drought vs. No Drought
  misc_feature: MA Experiment ID: 20000480 Result: Up-regulated in Transcription
  misc_feature: MA Experiment 20000480 PARAMETER Experiment Name: Zm_Drought_P Parameter: Age (day) Value: 11
  misc_feature: MA Experiment 20000480 PARAMETER Experiment Name: Zm_Drought_P Parameter: Organism Value: Zea mays
  misc_feature: MA Experiment 20000480 PARAMETER Experiment Name: Zm_Drought_P Parameter: Plant Line Value: 35A19
  misc_feature: MA Experiment 20000480 PARAMETER Experiment Name: Zm_Drought_P Parameter: Timepoint (hr) Value: 72
  misc_feature: MA Experiment 20000480 PARAMETER Experiment Name: Zm_Drought_P Parameter: Tissue Value: Aerial
  misc_feature: MA Experiment 20000480 PARAMETER Experiment Name: Zm_Drought_P Parameter: Treatment Value: Drought vs. No Drought
cttcttccgtctgtccgcttctccctctctccctccctcccccaccccgcgagaccgccggcgaatttgttgcagtgcactgaagccaacagctgcaggacaggaggaggaggaggagctgtttcaacaattatcccccgcgcgcccaggccagccccgcccccgcccgcccactctcccgaggtgagcaacccctttcctccagcggctgtctgtttaatttgggtctacagctcttccccccctcgtggtctcgtctatggaattcccggttcaatttggacttgggctcctcccttgtttactgtaaccgtgtgcttgctactgtatcgaagaaatcccagcgtcaatcatgctgctgcgcgaggtctctcgatgatggatgacagataatgatggttgttgtatgatgatgatggcgcatggcggctgccaacgcctgtttttccccgctgcagtacctttgcttcactgatattagcaacctctatccaggattccaggttctcaacacaacagacaacaccgctcaccgcatatatatatatatagatgggttccgaggggccttctcccgtcaccgtccacgtcaccggattcaagaggttccatggagtcgccgagaacccgacggagaggatcgtgcgcggtctccagccattcatggagacgagagggttgcccaagggccttgttctcgggagctgcaccgtccttgaggccgccgggcagggcgcgcttggcccgctgtatgaactgctggagtcgaccgtctccggccgggaacgtcaggagcgagtaattctgctccattttggcgccaacagtggttcacataggtttgctcttgagaatcaagctgttaatgaagctactttccgttgccctgatgagctaggatggaaaccacagaggacacctatcatatcgtcagatggaagcatcttacacgcaagacaggtatattttaacagttactacctcgataaatcattgagaatctctaagcatcctacttggaagactagtatttcatattatgctgcttacctactgacttactgtcctacatatcctccgttttaatgaacatgctgtcagtcgattgaatccttttcgtttccaacagtagaaacagagtatcgattttccatcattaaacttagatgtaatactttcgatacaccactctcattaaccactgtgcatacagattcgtcctccttaaaaggtcttcgagtaaggaggtttccccaaggaaatactgcgattgatctctaatgttctccagcttctagatcaatgattaatttgcacagctgcctgtattctgtcagttatcttgtcatgtgcatcatctgctgaactacgttttgtttcataataaccaagcagactacactgccagtggaggagataagcaagtctctccaacagatgggatacgacgtggtgccttcagacgacgctggtcgatttgtgtgcaactacgtctactaccactcactcaagtttgcagagaagcatgggatcgggtctctgtttgtccatttccccctcttcctggcaatcgacgaggaagtccagatgcagtttgtcgcttcccttctagaggtcctcgcttccttgaacttccagtgaacctagtggtagatctaccacttcccggtggtgtattgttcccagattatttgggaaaggtttaagttgttcccaacttacctgtggagaataagatcgaggaatcattcgtggaattatgtgtgtggttcaaaatgtgtaggggaacaaaaacaagtcttctcaaagaacatgtacatgcagtccagatgttaatatcccaagcggtttatatg

SEQ ID NO: 2193 - protein, 177 aa, Zea mays subsp. mays
  peptide (1)..(177): Ceres Seq. ID no. 12373913
  misc_feature (11)..(149): Pfam Name: Pyroglutamyl peptidase Pfam Description: Pyroglutamyl peptidase
  misc_feature (1)..(85): Homolog of NCBI NO: 15220751 NR Description: hypothetical protein; protein id: At1g23430.1
  misc_feature (1)..(85): Homolog of NCBI NO: 9295697 NR Description: F26F24.31 [Arabidopsis thaliana]
  misc_feature (86)..(136): Homolog of NCBI NO: 15220753 NR Description: hypothetical protein; protein id: At1g23440.1
  misc_feature (88)..(136): Homolog of NCBI NO: 8778575 NR Description: F28C11.8 [Arabidopsis thaliana]
  misc_feature (1)..(85): Homolog of NCBI NO: 8778575 NR Description: F28C11.8 [Arabidopsis thaliana]
  misc_feature (1)..(136): Homolog of NCBI NO: 13430708 NR Description: unknown protein [Arabidopsis thaliana]
  misc_feature (1)..(148): Homolog of NCBI NO: 18405940 NR Description: expressed protein
  misc_feature (1)..(149): Homolog of NCBI NO: 38175741 NR Description: pyrrolidone carboxyl peptidase-like protein
  misc_feature (1)..(149): Homolog of NCBI NO: 12039349 NR Description: putative pyrrolidone carboxyl peptidase [Oryza
MGSEGPSPVTVHVTGFKRFHGVAENPTERIVRGLQPFMETRGLPKGLVLGSCTVLEAAGQGALGPLYELLESTVSGRERQERVILLHFGANSGSHRFALENQAVNEATFRCPDELGWKPQRTPIISSDGSILHARQVYFNSYYLDKSLRISKHPTWKTSISYYAAYLLTYCPTYPPF

SEQ ID NO: 2194 - protein, 140 aa, Zea mays subsp. mays
  peptide (1)..(140): Ceres Seq. ID no. 12373914
  misc_feature (1)..(112): Pfam Name: Pyroglutamyl peptidase Pfam Description: Pyroglutamyl peptidase
  misc_feature (49)..(99): Homolog of NCBI NO: 15220753 NR Description: hypothetical protein; protein id: At1g23440.1
  misc_feature (51)..(99): Homolog of NCBI NO: 8778575 NR Description: F28C11.8 [Arabidopsis thaliana]
  misc_feature (1)..(48): Homolog of NCBI NO: 8778575 NR Description: F28C11.8 [Arabidopsis thaliana]
  misc_feature (1)..(99): Homolog of NCBI NO: 13430708 NR Description: unknown protein [Arabidopsis thaliana]
  misc_feature (1)..(48): Homolog of NCBI NO: 9295697 NR Description: F26F24.31 [Arabidopsis thaliana]
  misc_feature (1)..(48): Homolog of NCBI NO: 15220751 NR Description: hypothetical protein; protein id: At1g23430.1
  misc_feature (1)..(111): Homolog of NCBI NO: 18405940 NR Description: expressed protein
  misc_feature (1)..(112): Homolog of NCBI NO: 38175741 NR Description: pyrrolidone carboxyl peptidase-like protein
  misc_feature (1)..(112): Homolog of NCBI NO: 12039349 NR Description: putative pyrrolidone carboxyl peptidase [Oryza
METRGLPKGLVLGSCTVLEAAGQGALGPLYELLESTVSGRERQERVILLHFGANSGSHRFALENQAVNEATFRCPDELGWKPQRTPIISSDGSILHARQVYFNSYYLDKSLRISKHPTWKTSISYYAAYLLTYCPTYPPF

SEQ ID NO: 2195 - protein, 130 aa, Zea mays subsp. mays
  peptide (1)..(130): Ceres Seq. ID no. 12373915
LLPSVRFSLSPSLPHPARPPANLLQCTEANSCRTGGGGGAVSTIIPRAPRPAPPPPAHSPEVSNPFPPAAVCLIWVYSSSPPRGLVYGIPGSIWTWAPPLFTVTVCLLLYRRNPSVNHAAARGLSMMDDR

SEQ ID NO: 2196 - DNA, 1469 bp, Zea mays subsp. mays
  misc_feature (1)..(1469): Ceres Seq. ID no. 12405815
  misc_feature: MA Experiment ID: 108534 Result: Up-regulated in Transcription
  misc_feature: MA Experiment 108534 PARAMETER Experiment Name: Zm_4deg_Cold_P Parameter: Age (hr) Value: 8
  misc_feature: MA Experiment 108534 PARAMETER Experiment Name: Zm_4deg_Cold_P Parameter: Organism Value: Zea mays
  misc_feature: MA Experiment 108534 PARAMETER Experiment Name: Zm_4deg_Cold_P Parameter: Plant Line Value: 35A19
  misc_feature: MA Experiment 108534 PARAMETER Experiment Name: Zm_4deg_Cold_P Parameter: Temperature (deg C) Value: 4 vs. 22
  misc_feature: MA Experiment 108534 PARAMETER Experiment Name: Zm_4deg_Cold_P Parameter: Timepoint (hr) Value: 6
  misc_feature: MA Experiment 108534 PARAMETER Experiment Name: Zm_4deg_Cold_P Parameter: Tissue Value: Aerial
  misc_feature: MA Experiment ID: 20000492 Result: Down-regulated in Transcription
  misc_feature: MA Experiment 20000492 PARAMETER Experiment Name: Zm_Hybrid_Seed_Dev_P Parameter: DAP Value: 12
  misc_feature: MA Experiment 20000492 PARAMETER Experiment Name: Zm_Hybrid_Seed_Dev_P Parameter: Organism Value: Zea mays
  misc_feature: MA Experiment 20000492 PARAMETER Experiment Name: Zm_Hybrid_Seed_Dev_P Parameter: Plant Line Value: 35A19
  misc_feature: MA Experiment 20000492 PARAMETER Experiment Name: Zm_Hybrid_Seed_Dev_P Parameter: Tissue Value: Fert Kernel vs. Unfert Floret
  misc_feature: MA Experiment ID: 20000535 Result: Down-regulated in Transcription
  misc_feature: MA Experiment 20000535 PARAMETER Experiment Name: Zm_Hybrid_Seed_Dev_P Parameter: DAP Value: 30 vs. 12
  misc_feature: MA Experiment 20000535 PARAMETER Experiment Name: Zm_Hybrid_Seed_Dev_P Parameter: Organism Value: Zea mays
  misc_feature: MA Experiment 20000535 PARAMETER Experiment Name: Zm_Hybrid_Seed_Dev_P Parameter: Plant Line Value: 35A19
  misc_feature: MA Experiment 20000535 PARAMETER Experiment Name: Zm_Hybrid_Seed_Dev_P Parameter: Tissue Value: Embryo vs. Unfert Floret
  misc_feature: MA Experiment ID: 20000626 Result: Down-regulated in Transcription
  misc_feature: MA Experiment 20000626 PARAMETER Experiment Name: Zm_Herbicide-Treatments_P Parameter: Timepoint (hr) Value: 12
  misc_feature: MA Experiment 20000626 PARAMETER Experiment Name: Zm_Herbicide-Treatments_P Parameter: Tissue Value: Aerial
  misc_feature: MA Experiment 20000626 PARAMETER Experiment Name: Zm_Herbicide-Treatments_P Parameter: Treatment Value: Roundup vs. No Treatment
aggcgcgcgtgccgcctctctcgctcgctcctccggttaatcccccatcgccaggagcccaggactcgcagccagcccttcacattattcgcgcgcgcgcgaacggccgtagcgtgtgggtggcgtcgccgtgcggtctcttggtgccggtgcgggccgcgtgacggtgtgtgagtgtgtgacgcccacgcggaggaggtcgttctgttggttggttggtccgcggccatgatggcggtacgcggccggagaggcggtctccgtagcgctcctcttctccctcgttttcttctggcgcccgcttcctgctcgacctcctcgtctacaagccattggcagtctaccttttcaacactaaagcttctaagttgatgagtgatgaggccaggcaagcaaagattgtcaaattctcggagtccatttggaaacttacatactatgcttctgttcaagcatgggtcctcatgataataaagcaagaaccatggtcgttggatatggtgcagtactttgatggctggccaaatcaacccatcgtgtcctcgttgatgcttttctatatgtgccagtgtggattttatatctacagcattggtgctcttgttgcttgggaaacccgcagaaaagattttgctgtaatgatgtctcatcatgtaataacatctactcttattggagtttcatatctgacaggattttttcgaattgggaccatcgttcttgctcttcatgatacaagtgatgtgtttcttgagactgccaaattgtgcaagtacacagaaaaggagttgggggctagcttgtttttcggtctcttcgctatctcctggcttctattgcgtttgatttacttcccgttttggataatcaaagcctctagctatcattccatcacattctggaggaagctggatgaattccctacagctttgtactatatcttcaatacaatgcttctcacattgcttgtattccatatgtactggtggaaactcatatgtttgatgataatgagacaattgaataataaaggacaggttacagatgatgttcgatctgattctgaggatgacgagtaatgggggagattcattctttgacatctgcaatgtgtcatttcttcgccaatacttatctacgcctgcttccagaattgattgttttgatcgtggcaagtctcgggcatggataggaaagtttatcctctgtatattgccttgtgatatcaaacatggctagaacgagaatggagcaggtcctatacattacgggtatagctagcaagcttacttgaaggttccttcaaaaaattttggttcaccttttctgatatatggggaaagatatgagagggcgtacagcttttttcctgaaacttacagaacccctctgtaccatgttcagtatacttcactcgtgagtagatttagttctaattgacggtaataaactgattctttttgactggg

SEQ ID NO: 2197 - protein, 235 aa, Zea mays subsp. mays; identical to SEQ ID NO: 1985
  peptide (1)..(235): Ceres Seq. ID no. 12405816
  misc_feature (31)..(235): Pfam Name: Longevity-assurance protein (LAG1) Pfam Description: Longevity-assurance protein (LAG1)
  misc_feature (1)..(233): Homolog of NCBI NO: 21358551 NR Description: Longevity assurance gene 1 CG3576-PB
  misc_feature (3)..(235): Homolog of NCBI NO: 27769146 NR Description: Similar to RIKEN cDNA 0610013I17 gene [Xenopus
  misc_feature (1)..(171): Homolog of NCBI NO: 30683361 NR Description: longevity assurance protein -related [Arabidopsis
  misc_feature (1)..(235): Homolog of NCBI NO: 7688742 NR Description: ASC1 [Lycopersicon esculentum]
  misc_feature (1)..(234): Homolog of NCBI NO: 16974114 NR Description: putative resistance protein [Lycopersicon
  misc_feature (1)..(235): Homolog of NCBI NO: 18404559 NR Description: expressed protein
  misc_feature (1)..(235): Homolog of NCBI NO: 25518747 NR Description: hypothetical protein F13B4.7 - Arabidopsis
  misc_feature (1)..(235): Homolog of NCBI NO: 7658241 NR Description: LAG1 homolog 2 [Arabidopsis thaliana]
  misc_feature (1)..(235): Homolog of NCBI NO: 15230323 NR Description: longevity factor-like protein
  misc_feature (1)..(235): Homolog of NCBI NO: 34901974 NR Description: unknown protein [Oryza sativa (japonica

SEQ ID NO: 2198 - protein, 204 aa, Zea mays subsp. mays; identical to SEQ ID NO: 1986
  peptide (1)..(204): Ceres Seq. ID no. 12405817
  misc_feature (1)..(204): Pfam Name: Longevity-assurance protein (LAG1) Pfam Description: Longevity-assurance protein (LAG1)
  misc_feature (1)..(202): Homolog of NCBI NO: 21358551 NR Description: Longevity assurance gene 1 CG3576-PB
  misc_feature (1)..(204): Homolog of NCBI NO: 27769146 NR Description: Similar to RIKEN cDNA 0610013I17 gene [Xenopus
  misc_feature (1)..(140): Homolog of NCBI NO: 30683361 NR Description: longevity assurance protein -related [Arabidopsis
  misc_feature (1)..(204): Homolog of NCBI NO: 7688742 NR Description: ASC1 [Lycopersicon esculentum]
  misc_feature (1)..(203): Homolog of NCBI NO: 16974114 NR Description: putative resistance protein [Lycopersicon
  misc_feature (1)..(204): Homolog of NCBI NO: 18404559 NR Description: expressed protein
  misc_feature (1)..(204): Homolog of NCBI NO: 25518747 NR Description: hypothetical protein F13B4.7 - Arabidopsis
  misc_feature (1)..(204): Homolog of NCBI NO: 7658241 NR Description: LAG1 homolog 2 [Arabidopsis thaliana]
  misc_feature (1)..(204): Homolog of NCBI NO: 15230323 NR Description: longevity factor-like protein
  misc_feature (1)..(204): Homolog of NCBI NO: 34901974 NR Description: unknown protein [Oryza sativa (japonica

SEQ ID NO: 2199 - protein, 193 aa, Zea mays subsp. mays
  peptide (1)..(193): Ceres Seq. ID no. 12405818
  misc_feature (1)..(193): Pfam Name: Longevity-assurance protein (LAG1) Pfam Description: Longevity-assurance protein (LAG1)
  misc_feature (1)..(191): Homolog of NCBI NO: 21358551 NR Description: Longevity assurance gene 1 CG3576-PB
  misc_feature (1)..(193): Homolog of NCBI NO: 27769146 NR Description: Similar to RIKEN cDNA 0610013I17 gene [Xenopus
  misc_feature (1)..(129): Homolog of NCBI NO: 30683361 NR Description: longevity assurance protein -related [Arabidopsis
  misc_feature (1)..(193): Homolog of NCBI NO: 7688742 NR Description: ASC1 [Lycopersicon esculentum]
  misc_feature (1)..(192): Homolog of NCBI NO: 16974114 NR Description: putative resistance protein [Lycopersicon
  misc_feature (1)..(193): Homolog of NCBI NO: 18404559 NR Description: expressed protein
  misc_feature (1)..(193): Homolog of NCBI NO: 25518747 NR Description: hypothetical protein F13B4.7 - Arabidopsis
  misc_feature (1)..(193): Homolog of NCBI NO: 7658241 NR Description: LAG1 homolog 2 [Arabidopsis thaliana]
  misc_feature (1)..(193): Homolog of NCBI NO: 15230323 NR Description: longevity factor-like protein
  misc_feature (1)..(193): Homolog of NCBI NO: 34901974 NR Description: unknown protein [Oryza sativa (japonica
MVQYFDGWPNQPIVSSLMLFYMCQCGFYIYSIGALVAWETRRKDFAVMMSHHVITSTLIGVSYLTGFFRIGTIVLALHDTSDVFLETAKLCKYTEKELGASLFFGLFAISWLLLRLIYFPFWIIKASSYHSITFWRKLDEFPTALYYIFNTMLLTLLVFHMYWWKLICLMIMRQLNNKGQVTDDVRSDSEDDE

SEQ ID NO: 2200 - DNA, 1136 bp, Zea mays subsp. mays
  misc_feature (1)..(1136): Ceres Seq. ID no. 12355990
  misc_feature: MA Experiment ID: 108528 Result: Down-regulated in Transcription
  misc_feature: MA Experiment 108528 PARAMETER Experiment Name: Zm_Imbibed_Seeds_P Parameter: Age (day) Value: 5 vs. 2
  misc_feature: MA Experiment 108528 PARAMETER Experiment Name: Zm_Imbibed_Seeds_P Parameter: Organism Value: Zea mays
  misc_feature: MA Experiment 108528 PARAMETER Experiment Name: Zm_Imbibed_Seeds_P Parameter: Plant Line Value: 35A19
  misc_feature: MA Experiment 108528 PARAMETER Experiment Name: Zm_Imbibed_Seeds_P Parameter: Tissue Value: Aerial vs. Embryo
  misc_feature: MA Experiment ID: 108530 Result: Down-regulated in Transcription
  misc_feature: MA Experiment 108530 PARAMETER Experiment Name: Zm_Imbibed_Seeds_P Parameter: Age (day) Value: 6 vs. 2
  misc_feature: MA Experiment 108530 PARAMETER Experiment Name: Zm_Imbibed_Seeds_P Parameter: Organism Value: Zea mays
  misc_feature: MA Experiment 108530 PARAMETER Experiment Name: Zm_Imbibed_Seeds_P Parameter: Plant Line Value: 35A19
  misc_feature: MA Experiment 108530 PARAMETER Experiment Name: Zm_Imbibed_Seeds_P Parameter: Tissue Value: Aerial vs. Embryo
  misc_feature: MA Experiment ID: 108535 Result: Up-regulated in Transcription
  misc_feature: MA Experiment 108535 PARAMETER Experiment Name: Zm_Meristem_P Parameter: Age (day) Value: 8
  misc_feature: MA Experiment 108535 PARAMETER Experiment Name: Zm_Meristem_P Parameter: Organism Value: Zea mays
  misc_feature: MA Experiment 108535 PARAMETER Experiment Name: Zm_Meristem_P Parameter: Plant Line Value: 35A19
  misc_feature: MA Experiment 108535 PARAMETER Experiment Name: Zm_Meristem_P Parameter: Tissue Value: Root Meristem vs. Above Root Meristem
  misc_feature: MA Experiment ID: 108536 Result: Up-regulated in Transcription
  misc_feature: MA Experiment 108536 PARAMETER Experiment Name: Zm_Meristem_P Parameter: Age (day) Value: 8
  misc_feature: MA Experiment 108536 PARAMETER Experiment Name: Zm_Meristem_P Parameter: Organism Value: Zea mays
  misc_feature: MA Experiment 108536 PARAMETER Experiment Name: Zm_Meristem_P Parameter: Plant Line Value: 35A19
  misc_feature: MA Experiment 108536 PARAMETER Experiment Name: Zm_Meristem_P Parameter: Tissue Value: Shoot Meristem vs. Above Shoot Meristem
  misc_feature: MA Experiment ID: 108544 Result: Down-regulated in Transcription
  misc_feature: MA Experiment ID: 108545 Result: Down-regulated in Transcription
  misc_feature: MA Experiment 108545 PARAMETER Experiment Name: Zm_Imbibed_Seeds_P Parameter: Age (day) Value: 3 vs. 2
  misc_feature: MA Experiment 108545 PARAMETER Experiment Name: Zm_Imbibed_Seeds_P Parameter: Organism Value: Zea mays
  misc_feature: MA Experiment 108545 PARAMETER Experiment Name: Zm_Imbibed_Seeds_P Parameter: Plant Line Value: 35A19
  misc_feature: MA Experiment 108545 PARAMETER Experiment Name: Zm_Imbibed_Seeds_P Parameter: Tissue Value: Aerial vs. Embryo
  misc_feature: MA Experiment ID: 108556 Result: Down-regulated in Transcription
  misc_feature: MA Experiment 108556 PARAMETER Experiment Name: Zm_Drought_P Parameter: Age (day) Value: 9
  misc_feature: MA Experiment 108556 PARAMETER Experiment Name: Zm_Drought_P Parameter: Organism Value: Zea mays
  misc_feature: MA Experiment 108556 PARAMETER Experiment Name: Zm_Drought_P Parameter: Plant Line Value: 35A19
  misc_feature: MA Experiment 108556 PARAMETER Experiment Name: Zm_Drought_P Parameter: Timepoint (hr) Value: 24
  misc_feature: MA Experiment 108556 PARAMETER Experiment Name: Zm_Drought_P Parameter: Tissue Value: Aerial
  misc_feature: MA Experiment 108556 PARAMETER Experiment Name: Zm_Drought_P Parameter: Treatment Value: Drought vs. No Drought
  misc_feature: MA Experiment ID: 108559 Result: Up-regulated in Transcription
  misc_feature: MA Experiment 108559 PARAMETER Experiment Name: Zm_5mM_NO_P Parameter: Age (day) Value: 8
  misc_feature: MA Experiment 108559 PARAMETER Experiment Name: Zm_5mM_NO_P Parameter: Organism Value: Zea mays
  misc_feature: MA Experiment 108559 PARAMETER Experiment Name: Zm_5mM_NO_P Parameter: Plant Line Value: 35A19
  misc_feature: MA Experiment 108559 PARAMETER Experiment Name: Zm_5mM_NO_P Parameter: Timepoint (hr) Value: 12
  misc_feature: MA Experiment 108559 PARAMETER Experiment Name: Zm_5mM_NO_P Parameter: Tissue Value: Aerial
  misc_feature: MA Experiment 108559 PARAMETER Experiment Name: Zm_5mM_NO_P Parameter: Treatment Value: 5mM NO vs. No Treatment
  misc_feature: MA Experiment ID: 108689 Result: Down-regulated in Transcription
  misc_feature: MA Experiment 108689 PARAMETER Experiment Name: Zm_Drought_Roots_P Parameter: Age (day) Value: 9
  misc_feature: MA Experiment 108689 PARAMETER Experiment Name: Zm_Drought_Roots_P Parameter: Organism Value: Zea mays
  misc_feature: MA Experiment 108689 PARAMETER Experiment Name: Zm_Drought_Roots_P Parameter: Plant Line Value: 35A19
  misc_feature: MA Experiment 108689 PARAMETER Experiment Name: Zm_Drought_Roots_P Parameter: Timepoint (hr) Value: 24
  misc_feature: MA Experiment 108689 PARAMETER Experiment Name: Zm_Drought_Roots_P Parameter: Tissue Value: Roots
  misc_feature: MA Experiment 108689 PARAMETER Experiment Name: Zm_Drought_Roots_P Parameter: Treatment Value: Drought vs. No Drought
  misc_feature: MA Experiment ID: 20000108 Result: Up-regulated in Transcription
  misc_feature: MA Experiment 20000108 PARAMETER Experiment Name: Zm_Root-Tips_P Parameter: Age (day) Value: 12
  misc_feature: MA Experiment 20000108 PARAMETER Experiment Name: Zm_Root-Tips_P Parameter: Organism Value: Zea mays
  misc_feature: MA Experiment 20000108 PARAMETER Experiment Name: Zm_Root-Tips_P Parameter: Tissue Value: Root tips vs. Root mid region    35
  misc_feature: MA Experiment 20000108 PARAMETER Experiment Name: Zm_Root-Tips_P Parameter: Tissue Value: Root tips vs. Root mid region   Sequence Listing-Misc Features (4)
  misc_feature: MA Experiment ID: 20000478 Result: Down-regulated in Transcription
  misc_feature: MA Experiment 20000478 PARAMETER Experiment Name: Zm_5mM_SA_P Parameter: Age (day) Value: 11
  misc_feature: MA Experiment 20000478 PARAMETER Experiment Name: Zm_5mM_SA_P Parameter: Organism Value: Zea mays
  misc_feature: MA Experiment 20000478 PARAMETER Experiment Name: Zm_5mM_SA_P Parameter: Plant Line Value: 35A19
  misc_feature: MA Experiment 20000478 PARAMETER Experiment Name: Zm_5mM_SA_P Parameter: Timepoint (hr) Value: 72
  misc_feature: MA Experiment 20000478 PARAMETER Experiment Name: Zm_5mM_SA_P Parameter: Tissue Value: Aerial
  misc_feature: MA Experiment 20000478 PARAMETER Experiment Name: Zm_5mM_SA_P Parameter: Treatment Value: 5mM SA vs. No Treatment
  misc_feature: MA Experiment ID: 20000479 Result: Down-regulated in Transcription
  misc_feature: MA Experiment 20000479 PARAMETER Experiment Name: Zm_Drought_P Parameter: Age (day) Value: 10
  misc_feature: MA Experiment 20000479 PARAMETER Experiment Name: Zm_Drought_P Parameter: Organism Value: Zea mays
  misc_feature: MA Experiment 20000479 PARAMETER Experiment Name: Zm_Drought_P Parameter: Plant Line Value: 35A19
  misc_feature: MA Experiment 20000479 PARAMETER Experiment Name: Zm_Drought_P Parameter: Timepoint (hr) Value: 48
  misc_feature: MA Experiment 20000479 PARAMETER Experiment Name: Zm_Drought_P Parameter: Tissue Value: Aerial
  misc_feature: MA Experiment 20000479 PARAMETER Experiment Name: Zm_Drought_P Parameter: Treatment Value: Drought vs. No Drought
  misc_feature: MA Experiment ID: 20000480 Result: Down-regulated in Transcription
  misc_feature: MA Experiment 20000480 PARAMETER Experiment Name: Zm_Drought_P Parameter: Age (day) Value: 11
  misc_feature: MA Experiment 20000480 PARAMETER Experiment Name: Zm_Drought_P Parameter: Organism Value: Zea mays
  misc_feature: MA Experiment 20000480 PARAMETER Experiment Name: Zm_Drought_P Parameter: Plant Line Value: 35A19
  misc_feature: MA Experiment 20000480 PARAMETER Experiment Name: Zm_Drought_P Parameter: Timepoint (hr) Value: 72
  misc_feature: MA Experiment 20000480 PARAMETER Experiment Name: Zm_Drought_P Parameter: Tissue Value: Aerial
  misc_feature: MA Experiment 20000480 PARAMETER Experiment Name: Zm_Drought_P Parameter: Treatment Value: Drought vs. No Drought
  misc_feature: MA Experiment ID: 20000533 Result: Up-regulated in Transcription
  misc_feature: MA Experiment 20000533 PARAMETER Experiment Name: Zm_0.001percent_MeJA_P Parameter: Age (day) Value: 11
  misc_feature: MA Experiment 20000533 PARAMETER Experiment Name: Zm_0.001percent_MeJA_P Parameter: Organism Value: Zea mays
  misc_feature: MA Experiment 20000533 PARAMETER Experiment Name: Zm_0.001percent_MeJA_P Parameter: Plant Line Value: 35A19
  misc_feature: MA Experiment 20000533 PARAMETER Experiment Name: Zm_0.001percent_MeJA_P Parameter: Timepoint (hr) Value: 72
  misc_feature: MA Experiment 20000533 PARAMETER Experiment Name: Zm_0.001percent_MeJA_P Parameter: Tissue Value: Aerial
  misc_feature: MA Experiment 20000533 PARAMETER Experiment Name: Zm_0.001percent_MeJA_P Parameter: Treatment Value: 0.001percent MeJA vs. No Treatment
  misc_feature: MA Experiment ID: 20000535 Result: Up-regulated in Transcription
  misc_feature: MA Experiment 20000535 PARAMETER Experiment Name: Zm_Hybrid_Seed_Dev_P Parameter: DAP Value: 30 vs. 12
  misc_feature: MA Experiment 20000535 PARAMETER Experiment Name: Zm_Hybrid_Seed_Dev_P Parameter: Organism Value: Zea mays
  misc_feature: MA Experiment 20000535 PARAMETER Experiment Name: Zm_Hybrid_Seed_Dev_P Parameter: Plant Line Value: 35A19
  misc_feature: MA Experiment 20000535 PARAMETER Experiment Name: Zm_Hybrid_Seed_Dev_P Parameter: Tissue Value: Embryo vs. Unfert Floret
  misc_feature: MA Experiment ID: 20000632 Result: Down-regulated in Transcription
  misc_feature: MA Experiment 20000632 PARAMETER Experiment Name: Zm_Herbicide-Treatments_P Parameter: Timepoint (hr) Value: 4
  misc_feature: MA Experiment 20000632 PARAMETER Experiment Name: Zm_Herbicide-Treatments_P Parameter: Tissue Value: Aerial
  misc_feature: MA Experiment 20000632 PARAMETER Experiment Name: Zm_Herbicide-Treatments_P Parameter: Treatment Value: Glean vs. No Treatment
  misc_feature: MA Experiment ID: 20000633 Result: Down-regulated in Transcription
  misc_feature: MA Experiment 20000633 PARAMETER Experiment Name: Zm_Herbicide-Treatments_P Parameter: Timepoint (hr) Value: 4
  misc_feature: MA Experiment 20000633 PARAMETER Experiment Name: Zm_Herbicide-Treatments_P Parameter: Tissue Value: Aerial
  misc_feature: MA Experiment 20000633 PARAMETER Experiment Name: Zm_Herbicide-Treatments_P Parameter: Treatment Value: Trimec vs. No Treatment
  misc_feature: MA Experiment ID: 20001605 Result: Up-regulated in Transcription
  misc_feature: MA Experiment 20001605 PARAMETER Experiment Name: Zm_50ppm_KNO3_L-to-H_P Parameter: Age (day) Value: 19
  misc_feature: MA Experiment 20001605 PARAMETER Experiment Name: Zm_50ppm_KNO3_L-to-H_P Parameter: Organism Value: Zea mays
  misc_feature: MA Experiment 20001605 PARAMETER Experiment Name: Zm_50ppm_KNO3_L-to-H_P Parameter: Plant Line Value: 35A19
  misc_feature: MA Experiment 20001605 PARAMETER Experiment Name: Zm_50ppm_KNO3_L-to-H_P Parameter: Timepoint (hr) Value: 4
  misc_feature: MA Experiment 20001605 PARAMETER Experiment Name: Zm_50ppm_KNO3_L-to-H_P Parameter: Tissue Value: Shoots
  misc_feature: MA Experiment 20001605 PARAMETER Experiment Name: Zm_50ppm_KNO3_L-to-H_P Parameter: Treatment Value: 50ppm KNO3 vs. 50ppm KCl
gcaccttgctttgctttgctgatcgctgattttgcccgacctaccctacgctagtactttgaagtagtaggagctagcgagatctccatatatataaagcgaccttctttgcactcagctcgtagatccacacctgcagctgccacagcgggtggtgcttagcttaggctagcctagctgcgcctgcgcatgctcgtgaccaatggcgtccagcaaggtgccactgttcctcgtcctcaacctcctgctcttcgcggcggccaacgcctgcccttactgcccgggcaacaatggccacggtagcagcgggcaccatggcggcagtgggcatggcggcggtggcaccggcggttccggtggcggcagcgggccaggtgggggcagcagcggcggagggtacggtccgatcggtggtggtggtggcagcggcggcggaggagggtacggtccgatcggtgatggtggcagcggcggtgggatcggacccatcggaggcggcagcggggggatcggacccataggaggtggcagcggtggtgggtacggccccatcggtggcggtggcggtggaggtgggagcggtggcggtggcggtggcaacgatggcacgagcggctggtacggccattgcccgacaaacgcgctgaagctcggcgtgtgcgccaacgtgctggatctgatcaaggccaaggtcggcgtgccggtgaacgagccgtgctgcccgctgctgaacgggctcgtggagctcgaagccgccgtgtgcctctgcacggccatcaaggccaacgtgctggggctcaacctcaacatccccgtcaacctcagcctcgtcctcaacttctgcggcaagggcgtccccacgggcttcaagtgcctttaaccatgcatgcacatcatgtgtgcgtgcgtgccgtacgtacgtagtatccaagaccacgcgatgcgtgagtatgacgaagaatacgcgcgtgcgccatgcttgccggccggggatacggtgtttgtggtaatgctgttagtttcgtttcttcagtgtagtatgtagccagggcatgcatgtgtccaagtccaagttcgactttgggttgcttgtacttctccatttcataattgaaatcatatttcagatttgagtc

SEQ ID NO: 2201 - protein, 225 aa, Zea mays subsp. mays
  peptide (1)..(225): Ceres Seq. ID no. 12355991
  misc_feature (143)..(224): Pfam Name: Protease inhibitor/seed storage/LTP family Pfam Description: Protease inhibitor/seed storage/LTP family
  misc_feature (88)..(224): Homolog of NCBI NO: 7489138 NR Description: glycine-rich protein 16K - common tobacco
  misc_feature (3)..(224): Homolog of NCBI NO: 7489011 NR Description: glycine-rich protein Tfm5 - tomato
MASSKVPLFLVLNLLLFAAANACPYCPGNNGHGSSGHHGGSGHGGGGTGGSGGGSGPGGGSSGGGYGPIGGGGGSGGGGGYGPIGDGGSGGGIGPIGGGSGGIGPIGGGSGGGYGPIGGGGGGGGSGGGGGGNDGTSGWYGHCPTNALKLGVCANVLDLIKAKVGVPVNEPCCPLLNGLVELEAAVCLCTAIKANVLGLNLNIPVNLSLVLNFCGKGVPTGFKCL

SEQ ID NO: 2202 - DNA, 1800 bp, Zea mays subsp. mays
  misc_feature (1)..(1800): Ceres Seq. ID no. 12351993
  misc_feature: MA Experiment ID: 108530 Result: Up-regulated in Transcription
  misc_feature: MA Experiment 108530 PARAMETER Experiment Name: Zm_Imbibed_Seeds_P Parameter: Age (day) Value: 6 vs. 2
  misc_feature: MA Experiment 108530 PARAMETER Experiment Name: Zm_Imbibed_Seeds_P Parameter: Organism Value: Zea mays
  misc_feature: MA Experiment 108530 PARAMETER Experiment Name: Zm_Imbibed_Seeds_P Parameter: Plant Line Value: 35A19
  misc_feature: MA Experiment 108530 PARAMETER Experiment Name: Zm_Imbibed_Seeds_P Parameter: Tissue Value: Aerial vs. Embryo
  misc_feature: MA Experiment ID: 108535 Result: Down-regulated in Transcription
  misc_feature: MA Experiment 108535 PARAMETER Experiment Name: Zm_Meristem_P Parameter: Age (day) Value: 8
  misc_feature: MA Experiment 108535 PARAMETER Experiment Name: Zm_Meristem_P Parameter: Organism Value: Zea mays
  misc_feature: MA Experiment 108535 PARAMETER Experiment Name: Zm_Meristem_P Parameter: Plant Line Value: 35A19
  misc_feature: MA Experiment 108535 PARAMETER Experiment Name: Zm_Meristem_P Parameter: Tissue Value: Root Meristem vs. Above Root Meristem
  misc_feature: MA Experiment ID: 108543 Result: Up-regulated in Transcription
  misc_feature: MA Experiment ID: 108544 Result: Up-regulated in Transcription
  misc_feature: MA Experiment ID: 108687 Result: Down-regulated in Transcription
  misc_feature: MA Experiment 108687 PARAMETER Experiment Name: Zm_Embryos-Flowers__P Parameter: Tissue Value: Embryo vs. Aerial+
  misc_feature: MA Experiment ID: 20000535 Result: Down-regulated in Transcription
  misc_feature: MA Experiment 20000535 PARAMETER Experiment Name: Zm_Hybrid_Seed_Dev_P Parameter: DAP Value: 30 vs. 12
  misc_feature: MA Experiment 20000535 PARAMETER Experiment Name: Zm_Hybrid_Seed_Dev_P Parameter: Organism Value: Zea mays
  misc_feature: MA Experiment 20000535 PARAMETER Experiment Name: Zm_Hybrid_Seed_Dev_P Parameter: Plant Line Value: 35A19
  misc_feature: MA Experiment 20000535 PARAMETER Experiment Name: Zm_Hybrid_Seed_Dev_P Parameter: Tissue Value: Embryo vs. Unfert Floret
atctagacggcgccacacgactgacggcttcatccgattggtgtggcctatttatctcccagtcccccactcgagctctccaccagctttccccttctctccggtccgggaatcggaagctcagggcagaagaatcaacctgaacaagaagagactggacaaggaagctttgactgctgcgaaattggcgaagaaggagagccaccttcgaaggtctgtgggtgctgaccagtatctcagtgcctcaactgatgacatagtccctttggacaactacctggacacccagtactttggacagatcagcatcggcacgccaccacagaacttcacagtgatattcgacactggaagctccaacttgtgggttccctcatccaagtgctacttttcgatagcgtgctacttacaccacagatacaagtcaaccaagtcgaagacttacacaaagaatggagaatcttgtacgataacatatggttctgggcaaatcgctggcttcttcagtgaggacaatgtgttggttggtaaccttgttgtgcaaaatcagaaatttattgagacaactcgagaaaccagccctactttcatcattgggaagtttgatggaattcttggtctcggatttcctgaaatttctgtaggaggagcccctccaatttggcagagcatgaaacagcagaaactggtcgcaaaggatgtcttctctttctggcttaatcgtgaccctgatgcatctgctggaggcgagcttgtctttggtggtgttgacccaaaacactacaaaggggaccatacatatgttcctgttacacgcaaaggctactggcagtttgacatgggagatcttattattggtggccactcaactggtttctgtgctggtggctgtgctgctattgtggactcagggacttcattgcttgctggtccaactaccatagtggctcaagtcaatcatgcaattggggctgagggaatcatcagtacagaatgcaaagaagtggtgagcgagtatggagagatgatccttgagttgctcatatcgcagacaagcccacagaaagtgtgcactcagattggtctctgtgtatttgatggtgcccattctgtcagcaatccaattgaatctgttgttgagaaacagaagcgtggttctgatcttttctgtactgcttgtgagatggctgttgtctggatacagaatcagctccgtgaaaacaagacaaaagaactcattttgaattatgctaatcagctctgtgagcgtctccctagccccaatggcgagtcaactgttgattgccatcagatctcaaagatgccaaatcttgcattcaccatagcaaacaagactttcaccttaacaccagagcagtacatagtgaagctggagcaagcaggacaaactatctgcatcagtgggtttatggcatttgacgtaccgcctcctcgtggtcctctctggatacttggtgatgtttttatgggtgcctaccacactgtttttgacttcggcgagaacaggattgggtttgccaaatctgcatgaggactggagttctgcgctttagtagcatgtccagtttgttatcccagtattgtacatatatatgttgccaactggtgtaatccgcagtgtttaatagtatatattcatgcagaaatctagaagattgtggcatgatatgtgtttgcaaatggagctatgctatgtatggagctccaggacctagagttttatgtaaagggagacgatgaggattagggcttttaacctattctcatcacgttattgtc

SEQ ID NO: 2203 - protein, 516 aa, Zea mays subsp. mays
  peptide (1)..(516): Ceres Seq. ID no. 12351994
  misc_feature (44)..(371): Pfam Name: Eukaryotic aspartyl protease Pfam Description: Eukaryotic aspartyl protease
  misc_feature (30)..(516): Homolog of NCBI NO: 1076696 NR Description: cyprosin (EC 3.4.23.-) - cardoon
  misc_feature (32)..(516): Homolog of NCBI NO: 15221141 NR Description: putative aspartic proteinase
  misc_feature (34)..(516): Homolog of NCBI NO: 13897888 NR Description: putative aspartic protease [Ipomoea batatas]
  misc_feature (44)..(516): Homolog of NCBI NO: 5822248 NR Description: Chain A, Crystal Structure Of Prophytepsin, A
  misc_feature (44)..(516): Homolog of NCBI NO: 2499819 NR Description: Aspartic proteinase oryzasin 1 precursor
  misc_feature (33)..(516): Homolog of NCBI NO: 12231174 NR Description: aspartic proteinase 2 [Nepenthes alata]
  misc_feature (38)..(516): Homolog of NCBI NO: 1168536 NR Description: Phytepsin precursor (Aspartic proteinase)
  misc_feature (44)..(516): Homolog of NCBI NO: 21616051 NR Description: aspartic proteinase [Theobroma cacao]
  misc_feature (44)..(516): Homolog of NCBI NO: 7435839 NR Description: aspartic proteinase precursor, wound-induced -
  misc_feature (44)..(516): Homolog of NCBI NO: 1168537 NR Description: Aspartic proteinase precursor
SRRRHTTDGFIRLVWPIYLPVPHSSSPPAFPFSPVRESEAQGRRINLNKKRLDKEALTAAKLAKKESHLRRSVGADQYLSASTDDIVPLDNYLDTQYFGQISIGTPPQNFTVIFDTGSSNLWVPSSKCYFSIACYLHHRYKSTKSKTYTKNGESCTITYGSGQIAGFFSEDNVLVGNLVVQNQKFIETTRETSPTFIIGKFDGILGLGFPEISVGGAPPIWQSMKQQKLVAKDVFSFWLNRDPDASAGGELVFGGVDPKHYKGDHTYVPVTRKGYWQFDMGDLIIGGHSTGFCAGGCAAIVDSGTSLLAGPTTIVAQVNHAIGAEGIISTECKEVVSEYGEMILELLISQTSPQKVCTQIGLCVFDGAHSVSNPIESVVEKQKRGSDLFCTACEMAVVWIQNQLRENKTKELILNYANQLCERLPSPNGESTVDCHQISKMPNLAFTIANKTFTLTPEQYIVKLEQAGQTICISGFMAFDVPPPRGPLWILGDVFMGAYHTVFDFGENRIGFAKSA

SEQ ID NO: 2204 - protein, 293 aa, Zea mays subsp. mays
  peptide (1)..(293): Ceres Seq. ID no. 12351995
  misc_feature (1)..(148): Pfam Name: Eukaryotic aspartyl protease Pfam Description: Eukaryotic aspartyl protease
  misc_feature (1)..(293): Homolog of NCBI NO: 1076696 NR Description: cyprosin (EC 3.4.23.-) - cardoon
  misc_feature (1)..(293): Homolog of NCBI NO: 15221141 NR Description: putative aspartic proteinase
  misc_feature (1)..(293): Homolog of NCBI NO: 13897888 NR Description: putative aspartic protease [Ipomoea batatas]
  misc_feature (1)..(293): Homolog of NCBI NO: 5822248 NR Description: Chain A, Crystal Structure Of Prophytepsin, A
  misc_feature (1)..(293): Homolog of NCBI NO: 2499819 NR Description: Aspartic proteinase oryzasin 1 precursor
  misc_feature (1)..(293): Homolog of NCBI NO: 12231174 NR Description: aspartic proteinase 2 [Nepenthes alata]
  misc_feature (1)..(293): Homolog of NCBI NO: 1168536 NR Description: Phytepsin precursor (Aspartic proteinase)
  misc_feature (1)..(293): Homolog of NCBI NO: 21616051 NR Description: aspartic proteinase [Theobroma cacao]
  misc_feature (1)..(293): Homolog of NCBI NO: 7435839 NR Description: aspartic proteinase precursor, wound-induced -
  misc_feature (1)..(293): Homolog of NCBI NO: 1168537 NR Description: Aspartic proteinase precursor
MKQQKLVAKDVFSFWLNRDPDASAGGELVFGGVDPKHYKGDHTYVPVTRKGYWQFDMGDLIIGGHSTGFCAGGCAAIVDSGTSLLAGPTTIVAQVNHAIGAEGIISTECKEVVSEYGEMILELLISQTSPQKVCTQIGLCVFDGAHSVSNPIESVVEKQKRGSDLFCTACEMAVVWIQNQLRENKTKELILNYANQLCERLPSPNGESTVDCHQISKMPNLAFTIANKTFTLTPEQYIVKLEQAGQTICISGFMAFDVPPPRGPLWILGDVFMGAYHTVFDFGENRIGFAKSA

SEQ ID NO: 2205 - DNA, 1408 bp, Zea mays subsp. mays
  misc_feature (1)..(1408): Ceres Seq. ID no. 12358591
  misc_feature: MA Experiment ID: 108522 Result: Up-regulated in Transcription
  misc_feature: MA Experiment 108522 PARAMETER Experiment Name: Zm_42deg_Heat_P Parameter: Age (day) Value: 8
  misc_feature: MA Experiment 108522 PARAMETER Experiment Name: Zm_42deg_Heat_P Parameter: Organism Value: Zea mays
  misc_feature: MA Experiment 108522 PARAMETER Experiment Name: Zm_42deg_Heat_P Parameter: Plant Line Value: 35A19
  misc_feature: MA Experiment 108522 PARAMETER Experiment Name: Zm_42deg_Heat_P Parameter: Temperature (deg C) Value: 42 vs. 22
  misc_feature: MA Experiment 108522 PARAMETER Experiment Name: Zm_42deg_Heat_P Parameter: Timepoint (hr) Value: 1
  misc_feature: MA Experiment 108522 PARAMETER Experiment Name: Zm_42deg_Heat_P Parameter: Tissue Value: Aerial
  misc_feature: MA Experiment ID: 108526 Result: Up-regulated in Transcription
  misc_feature: MA Experiment 108526 PARAMETER Experiment Name: Zm_5mM_NO_P Parameter: Age (day) Value: 8
  misc_feature: MA Experiment 108526 PARAMETER Experiment Name: Zm_5mM_NO_P Parameter: Organism Value: Zea mays
  misc_feature: MA Experiment 108526 PARAMETER Experiment Name: Zm_5mM_NO_P Parameter: Plant Line Value: 35A19
  misc_feature: MA Experiment 108526 PARAMETER Experiment Name: Zm_5mM_NO_P Parameter: Timepoint (hr) Value: 1
  misc_feature: MA Experiment 108526 PARAMETER Experiment Name: Zm_5mM_NO_P Parameter: Tissue Value: Aerial
  misc_feature: MA Experiment 108526 PARAMETER Experiment Name: Zm_5mM_NO_P Parameter: Treatment Value: 5mM NO vs. No Treatment
  misc_feature: MA Experiment ID: 108527 Result: Up-regulated in Transcription
  misc_feature: MA Experiment 108527 PARAMETER Experiment Name: Zm_5mM_NO_P Parameter: Age (day) Value: 8
  misc_feature: MA Experiment 108527 PARAMETER Experiment Name: Zm_5mM_NO_P Parameter: Organism Value: Zea mays
  misc_feature: MA Experiment 108527 PARAMETER Experiment Name: Zm_5mM_NO_P Parameter: Plant Line Value: 35A19
  misc_feature: MA Experiment 108527 PARAMETER Experiment Name: Zm_5mM_NO_P Parameter: Timepoint (hr) Value: 6
  misc_feature: MA Experiment 108527 PARAMETER Experiment Name: Zm_5mM_NO_P Parameter: Tissue Value: Aerial
  misc_feature: MA Experiment 108527 PARAMETER Experiment Name: Zm_5mM_NO_P Parameter: Treatment Value: 5mM NO vs. No Treatment
  misc_feature: MA Experiment ID: 108529 Result: Up-regulated in Transcription
  misc_feature: MA Experiment 108529 PARAMETER Experiment Name: Zm_Imbibed_Seeds_P Parameter: Age (day) Value: 5 vs. 2
  misc_feature: MA Experiment 108529 PARAMETER Experiment Name: Zm_Imbibed_Seeds_P Parameter: Organism Value: Zea mays
  misc_feature: MA Experiment 108529 PARAMETER Experiment Name: Zm_Imbibed_Seeds_P Parameter: Plant Line Value: 35A19
  misc_feature: MA Experiment 108529 PARAMETER Experiment Name: Zm_Imbibed_Seeds_P Parameter: Tissue Value: Roots vs. Embryo
  misc_feature: MA Experiment ID: 108559 Result: Up-regulated in Transcription
  misc_feature: MA Experiment 108559 PARAMETER Experiment Name: Zm_5mM_NO_P Parameter: Age (day) Value: 8
  misc_feature: MA Experiment 108559 PARAMETER Experiment Name: Zm_5mM_NO_P Parameter: Organism Value: Zea mays
  misc_feature: MA Experiment 108559 PARAMETER Experiment Name: Zm_5mM_NO_P Parameter: Plant Line Value: 35A19
  misc_feature: MA Experiment 108559 PARAMETER Experiment Name: Zm_5mM_NO_P Parameter: Timepoint (hr) Value: 12
  misc_feature: MA Experiment 108559 PARAMETER Experiment Name: Zm_5mM_NO_P Parameter: Tissue Value: Aerial
  misc_feature: MA Experiment 108559 PARAMETER Experiment Name: Zm_5mM_NO_P Parameter: Treatment Value: 5mM NO vs. No Treatment
  misc_feature: MA Experiment ID: 20000626 Result: Up-regulated in Transcription
  misc_feature: MA Experiment 20000626 PARAMETER Experiment Name: Zm_Herbicide-Treatments_P Parameter: Timepoint (hr) Value: 12
  misc_feature: MA Experiment 20000626 PARAMETER Experiment Name: Zm_Herbicide-Treatments_P Parameter: Tissue Value: Aerial
  misc_feature: MA Experiment 20000626 PARAMETER Experiment Name: Zm_Herbicide-Treatments_P Parameter: Treatment Value: Roundup vs. No Treatment
gcttttggattctggtttctctcgtctttctcctccctctcctgacttttcttctagacatctcgcgggtcttatcgactccaacaagaacacactacacaccagccagcgagatagcgaacgctaggaacccagtggccatctttggagcggccatgacgctggatcagaaccatgccatgccgatgcagcccccggccctgcagcccggaagagcatatggagcagagggcagtgctgtggtgcatggttccatcagaacagtaggaagaagcgacctcgcagatcacgagatgggcctacgtcagtggcagctgtcatccagcggtgggctgagcgcaacaagcatttggagtatgaggaatctgaggaggcaaagcgaccaagaaaagcacctggcaaagggttcaaagaagggctgtatgaagggaaaaggggggcctgacaatactcaatgtggataccgtggagtgaggcagcgtacttgggggaagtgggttgctgaaataagagagccaaatcgtgtcgacagactctggctgggtaccttcccaaccgcggaggatgcagctagggcctatgatgaggcagccagagcgatgtatggagacttggcacggactaacttccccggacaggatgcaacaacctctgcccaagctgctctatcatcgacctctgcccaggctgctccaacagctgttgaagctcttcagactggcacgtcatgcgagtcgacaacgacatcaaatcactcggacatcgcatccacctcacacaagcttgaagcctctgacatctcgagctacctaaaggaaaaatgtccagctggatcatgtggtatccaagacggcacacccattgtagctgacaaggaggtctttgggccgttggagcctatcacaaatcttccagatggtggtgatggttttgatatcggtgagatgctgaggatgatggaaagcgatccacataatgcaggtggagccgacgctggcatgggacagccctggtatcttgatgagctggattcgagtgtcttagagagcatgctccagccggagccggagccagagccagagccattcctgatgtctgaagaaccggacatgtttcttgctggcttcgaaagcgctggtttcgtcgagggtctggagcggctaaactgaatttctgatgtttgaccgttgatcctcatcccacttcatgtctgagcttgtgaattcggaggcaaacattggcagaacttataagctctagcaattctaggctttacattcctctgtgatagttctctatgcatgggaactgggtttgcttcacaatttttgtaagaccagaagtgatgtaaatagttcccaccttgtggaaggacaagaaaaaaataaataaaaagagtgcttgcttt

SEQ ID NO: 2206 - protein, 388 aa, Zea mays subsp. mays
  peptide (1)..(388): Ceres Seq. ID no. 12358592
  misc_feature (151)..(215): Pfam Name: AP2 domain Pfam Description: AP2 domain
  misc_feature (117)..(224): Homolog of NCBI NO: 25989383 NR Description: DREB1 [Oryza sativa]
  misc_feature (117)..(224): Homolog of NCBI NO: 22594971 NR Description: DRE binding protein 2 [Oryza sativa]
  misc_feature (125)..(258): Homolog of NCBI NO: 15228427 NR Description: DRE binding protein (DREB2B)
  misc_feature (117)..(267): Homolog of NCBI NO: 15488459 NR Description: AP2-containing protein [Triticum aestivum]
  misc_feature (107)..(265): Homolog of NCBI NO: 38099059 NR Description: dehydration-responsive element binding protein 2
  misc_feature (133)..(245): Homolog of NCBI NO: 15239107 NR Description: DRE binding protein (DREB2A)
  misc_feature (133)..(306): Homolog of NCBI NO: 27960757 NR Description: AP2 domain protein [Hordeum vulgare]
  misc_feature (61)..(138): Homolog of NCBI NO: 30313898 NR Description: AP2 transcriptional activator DRF1.1 [Hordeum
  misc_feature (133)..(323): Homolog of NCBI NO: 30313898 NR Description: AP2 transcriptional activator DRF1.1 [Hordeum
  misc_feature (133)..(323): Homolog of NCBI NO: 27960760 NR Description: dehydration-responsive AP2 domain transcriptional
FWILVSLVFLLPLLTFLLDISRVLSTPTRTHYTPASEIANARNPVAIFGAAMTLDQNHAMPMQPPALQPGRAYGAEGSAVVHGSIRTVGRSDLADHEMGLRQWQLSSSGGLSATSIWSMRNLRRQSDQEKHLAKGSKKGCMKGKGGPDNTQCGYRGVRQRTWGKWVAEIREPNRVDRLWLGTFPTAEDAARAYDEAARAMYGDLARTNFPGQDATTSAQAALSSTSAQAAPTAVEALQTGTSCESTTTSNHSDIASTSHKLEASDISSYLKEKCPAGSCGIQDGTPIVADKEVFGPLEPITNLPDGGDGFDIGEMLRMMESDPHNAGGADAGMGQPWYLDELDSSVLESMLQPEPEPEPEPFLMSEEPDMFLAGFESAGFVEGLERLN

SEQ ID NO: 2207 - protein, 337 aa, Zea mays subsp. mays
  peptide (1)..(337): Ceres Seq. ID no. 12358593
  misc_feature (100)..(164): Pfam Name: AP2 domain Pfam Description: AP2 domain
  misc_feature (66)..(173): Homolog of NCBI NO: 25989383 NR Description: DREB1 [Oryza sativa]
  misc_feature (66)..(173): Homolog of NCBI NO: 22594971 NR Description: DRE binding protein 2 [Oryza sativa]
  misc_feature (74)..(207): Homolog of NCBI NO: 15228427 NR Description: DRE binding protein (DREB2B)
  misc_feature (66)..(216): Homolog of NCBI NO: 15488459 NR Description: AP2-containing protein [Triticum aestivum]
  misc_feature (56)..(214): Homolog of NCBI NO: 38099059 NR Description: dehydration-responsive element binding protein 2
  misc_feature (82)..(194): Homolog of NCBI NO: 15239107 NR Description: DRE binding protein (DREB2A)
  misc_feature (82)..(255): Homolog of NCBI NO: 27960757 NR Description: AP2 domain protein [Hordeum vulgare]
  misc_feature (10)..(87): Homolog of NCBI NO: 30313898 NR Description: AP2 transcriptional activator DRF1.1 [Hordeum
  misc_feature (82)..(272): Homolog of NCBI NO: 30313898 NR Description: AP2 transcriptional activator DRF1.1 [Hordeum
  misc_feature (82)..(272): Homolog of NCBI NO: 27960760 NR Description: dehydration-responsive AP2 domain transcriptional
MTLDQNHAMPMQPPALQPGRAYGAEGSAVVHGSIRTVGRSDLADHEMGLRQWQLSSSGGLSATSIWSMRNLRRQSDQEKHLAKGSKKGCMKGKGGPDNTQCGYRGVRQRTWGKWVAEIREPNRVDRLWLGTFPTAEDAARAYDEAARAMYGDLARTNFPGQDATTSAQAALSSTSAQAAPTAVEALQTGTSCESTTTSNHSDIASTSHKLEASDISSYLKEKCPAGSCGIQDGTPIVADKEVFGPLEPITNLPDGGDGFDIGEMLRMMESDPHNAGGADAGMGQPWYLDELDSSVLESMLQPEPEPEPEPFLMSEEPDMFLAGFESAGFVEGLERLN

SEQ ID NO: 2208 - protein, 329 aa, Zea mays subsp. mays
  peptide (1)..(329): Ceres Seq. ID no. 12358594
  misc_feature (92)..(156): Pfam Name: AP2 domain Pfam Description: AP2 domain
  misc_feature (58)..(165): Homolog of NCBI NO: 25989383 NR Description: DREB1 [Oryza sativa]
  misc_feature (58)..(165): Homolog of NCBI NO: 22594971 NR Description: DRE binding protein 2 [Oryza sativa]
  misc_feature (66)..(199): Homolog of NCBI NO: 15228427 NR Description: DRE binding protein (DREB2B)
  misc_feature (58)..(208): Homolog of NCBI NO: 15488459 NR Description: AP2-containing protein [Triticum aestivum]
  misc_feature (48)..(206): Homolog of NCBI NO: 38099059 NR Description: dehydration-responsive element binding protein 2
  misc_feature (74)..(186): Homolog of NCBI NO: 15239107 NR Description: DRE binding protein (DREB2A)
  misc_feature (74)..(247): Homolog of NCBI NO: 27960757 NR Description: AP2 domain protein [Hordeum vulgare]
  misc_feature (2)..(79): Homolog of NCBI NO: 30313898 NR Description: AP2 transcriptional activator DRF1.1 [Hordeum
  misc_feature (74)..(264): Homolog of NCBI NO: 30313898 NR Description: AP2 transcriptional activator DRF1.1 [Hordeum
  misc_feature (74)..(264): Homolog of NCBI NO: 27960760 NR Description: dehydration-responsive AP2 domain transcriptional
MPMQPPALQPGRAYGAEGSAVVHGSIRTVGRSDLADHEMGLRQWQLSSSGGLSATSIWSMRNLRRQSDQEKHLAKGSKKGCMKGKGGPDNTQCGYRGVRQRTWGKWVAEIREPNRVDRLWLGTFPTAEDAARAYDEAARAMYGDLARTNFPGQDATTSAQAALSSTSAQAAPTAVEALQTGTSCESTTTSNHSDIASTSHKLEASDISSYLKEKCPAGSCGIQDGTPIVADKEVFGPLEPITNLPDGGDGFDIGEMLRMMESDPHNAGGADAGMGQPWYLDELDSSVLESMLQPEPEPEPEPFLMSEEPDMFLAGFESAGFVEGLERLN

SEQ ID NO: 2209 - DNA, 1133 bp, Zea mays subsp. mays
  misc_feature (1)..(1133): Ceres Seq. ID no. 12384197
  misc_feature: MA Experiment ID: 108528 Result: Up-regulated in Transcription
  misc_feature: MA Experiment 108528 PARAMETER Experiment Name: Zm_Imbibed_Seeds_P Parameter: Age (day) Value: 5 vs. 2
  misc_feature: MA Experiment 108528 PARAMETER Experiment Name: Zm_Imbibed_Seeds_P Parameter: Organism Value: Zea mays
  misc_feature: MA Experiment 108528 PARAMETER Experiment Name: Zm_Imbibed_Seeds_P Parameter: Plant Line Value: 35A19
  misc_feature: MA Experiment 108528 PARAMETER Experiment Name: Zm_Imbibed_Seeds_P Parameter: Tissue Value: Aerial vs. Embryo
  misc_feature: MA Experiment ID: 108530 Result: Up-regulated in Transcription
  misc_feature: MA Experiment 108530 PARAMETER Experiment Name: Zm_Imbibed_Seeds_P Parameter: Age (day) Value: 6 vs. 2
  misc_feature: MA Experiment 108530 PARAMETER Experiment Name: Zm_Imbibed_Seeds_P Parameter: Organism Value: Zea mays
  misc_feature: MA Experiment 108530 PARAMETER Experiment Name: Zm_Imbibed_Seeds_P Parameter: Plant Line Value: 35A19
  misc_feature: MA Experiment 108530 PARAMETER Experiment Name: Zm_Imbibed_Seeds_P Parameter: Tissue Value: Aerial vs. Embryo
  misc_feature: MA Experiment ID: 108545 Result: Up-regulated in Transcription
  misc_feature: MA Experiment 108545 PARAMETER Experiment Name: Zm_Imbibed_Seeds_P Parameter: Age (day) Value: 3 vs. 2
  misc_feature: MA Experiment 108545 PARAMETER Experiment Name: Zm_Imbibed_Seeds_P Parameter: Organism Value: Zea mays
  misc_feature: MA Experiment 108545 PARAMETER Experiment Name: Zm_Imbibed_Seeds_P Parameter: Plant Line Value: 35A19
  misc_feature: MA Experiment 108545 PARAMETER Experiment Name: Zm_Imbibed_Seeds_P Parameter: Tissue Value: Aerial vs. Embryo
  misc_feature: MA Experiment ID: 108547 Result: Up-regulated in Transcription
  misc_feature: MA Experiment 108547 PARAMETER Experiment Name: Zm_Imbibed_Seeds_P Parameter: Age (day) Value: 4 vs. 2
  misc_feature: MA Experiment 108547 PARAMETER Experiment Name: Zm_Imbibed_Seeds_P Parameter: Organism Value: Zea mays
  misc_feature: MA Experiment 108547 PARAMETER Experiment Name: Zm_Imbibed_Seeds_P Parameter: Plant Line Value: 35A19
  misc_feature: MA Experiment 108547 PARAMETER Experiment Name: Zm_Imbibed_Seeds_P Parameter: Tissue Value: Aerial vs. Embryo
  misc_feature: MA Experiment ID: 20001608 Result: Up-regulated in Transcription
  misc_feature: MA Experiment 20001608 PARAMETER Experiment Name: Zm_50ppm_KNO3_L-to-H_P Parameter: Age (day) Value: 21
  misc_feature: MA Experiment 20001608 PARAMETER Experiment Name: Zm_50ppm_KNO3_L-to-H_P Parameter: Organism Value: Zea mays
  misc_feature: MA Experiment 20001608 PARAMETER Experiment Name: Zm_50ppm_KNO3_L-to-H_P Parameter: Plant Line Value: 35A19
  misc_feature: MA Experiment 20001608 PARAMETER Experiment Name: Zm_50ppm_KNO3_L-to-H_P Parameter: Timepoint (hr) Value: 48
  misc_feature: MA Experiment 20001608 PARAMETER Experiment Name: Zm_50ppm_KNO3_L-to-H_P Parameter: Tissue Value: Shoots
  misc_feature: MA Experiment 20001608 PARAMETER Experiment Name: Zm_50ppm_KNO3_L-to-H_P Parameter: Treatment Value: 50ppm KNO3 vs. 50ppm KCl
atctagtataatccgtccgcaaccgttctctgccttctccatcctaaaccctcctagtcctctccatccccatcccctccaatggcggcgactgccacgtccttcgccactctcgccgtcgcgcgctcggcagggcagcggttcctccttgcctccaaggccgccccctcgccgctcctctccctccgcggcgcccgcctcccctcgcagggcgtctccttatctgggggcctcgcggcgtcgccctctcatagccgcgcgcgcttcgccacatcagccagcgccgaacccaaggaagcagaacttcagtctaaaatcacaaacaaggtgtactttgacataagcattgggaaccctgtgggcaagaatgttgggaggatcgtcatcggcttgtacggggatgatgttccacagacaacagagaacttccgtgctctttgcactggagagaaagggtttggatacaagggatccagtttccatcgtgtcatcagcgactttatgattcagggtggagattttgacaagggcaatggtaccggtgggaagagcatatatggacgcaccttcaaagatgagaacttcaaattggttcacactggacctggagtggtcagcatggctaatgctgggccgaacaccaatggcagccagttctttatttgcactgtcaagacaccttggttggacggaaggcatgtcgtgtttggccaggtcctggaagggatggatgtcgtaagtctgatcgagtcgcaggagaccgacagaggtgaccgcccgaagaagaaagtagtcatcagcgagtgtggggagcttccagtggtctaagtgttactcatctgttgtcggtcttacctaacctcggatggatggcgatatttcccccacctgaacttgtcgtgctaccctcccccccccccccccacccnnancctgntagttatagagaatatttcgaattgaagtaaggtcccaaatctgagggcatactgttgcttctctgctggaataaatgtgctcctttcccctgccttgttaagggaaagggttttgttcacgatgttaccttgtaaccttgtacttatgtttcatacttggaatgaaggttcatggaacaaaaatattctgctgcg

SEQ ID NO: 2210 - protein, 248 aa, Zea mays subsp. mays
  peptide (1)..(248): Ceres Seq. ID no. 12384198
  misc_feature (32)..(247): Homolog of NCBI NO: 34902534 NR Description: putative peptidyl-prolyl cis-trans isomerase,
  misc_feature (71)..(219): Homolog of NCBI NO: 9945069 NR Description: similar to Arabidopsis thaliana Peptidyl-prolyl
  misc_feature (74)..(247): Homolog of NCBI NO: 9955556 NR Description: peptidylprolyl isomerase-like protein
  misc_feature (62)..(247): Homolog of NCBI NO: 21593963 NR Description: peptidylprolyl isomerase-like protein
  misc_feature (62)..(247): Homolog of NCBI NO: 15240008 NR Description: peptidyl-prolyl isomerase protein
  misc_feature (1)..(248): Homolog of NCBI NO: 37788308 NR Description: cyclophilin-like protein [Triticum aestivum]
  misc_feature (1)..(248): Homolog of NCBI NO: 37788312 NR Description: cyclophilin-like protein [Triticum aestivum]
  misc_feature (50)..(247): Homolog of NCBI NO: 11762200 NR Description: AT3g62030 [Arabidopsis thaliana]
  misc_feature (50)..(247): Homolog of NCBI NO: 21555831 NR Description: peptidylprolyl isomerase ROC4 [Arabidopsis
  misc_feature (50)..(247): Homolog of NCBI NO: 15228674 NR Description: peptidylprolyl isomerase ROC4
MAATATSFATLAVARSAGQRFLLASKAAPSPLLSLRGARLPSQGVSLSGGLAASPSHSRARFATSASAEPKEAELQSKITNKVYFDISIGNPVGKNVGRIVIGLYGDDVPQTTENFRALCTGEKGFGYKGSSFHRVISDFMIQGGDFDKGNGTGGKSIYGRTFKDENFKLVHTGPGVVSMANAGPNTNGSQFFICTVKTPWLDGRHVVFGQVLEGMDVVSLIESQETDRGDRPKKKVVISECGELPVV

SEQ ID NO: 2211 - DNA, 1978 bp, Zea mays subsp. mays
  misc_feature (1)..(1978): Ceres Seq. ID no. 12556346
  misc_feature: MA Experiment ID: 108504 Result: Down-regulated in Transcription
  misc_feature: MA Experiment 108504 PARAMETER Experiment Name: Zm_Drought_P Parameter: Age (day) Value: 8
  misc_feature: MA Experiment 108504 PARAMETER Experiment Name: Zm_Drought_P Parameter: Organism Value: Zea mays
  misc_feature: MA Experiment 108504 PARAMETER Experiment Name: Zm_Drought_P Parameter: Plant Line Value: 35A19
  misc_feature: MA Experiment 108504 PARAMETER Experiment Name: Zm_Drought_P Parameter: Timepoint (hr) Value: 12
  misc_feature: MA Experiment 108504 PARAMETER Experiment Name: Zm_Drought_P Parameter: Tissue Value: Aerial
  misc_feature: MA Experiment 108504 PARAMETER Experiment Name: Zm_Drought_P Parameter: Treatment Value: Drought vs. No Drought
  misc_feature: MA Experiment ID: 108522 Result: Down-regulated in Transcription
  misc_feature: MA Experiment 108522 PARAMETER Experiment Name: Zm_42deg_Heat_P Parameter: Age (day) Value: 8
  misc_feature: MA Experiment 108522 PARAMETER Experiment Name: Zm_42deg_Heat_P Parameter: Organism Value: Zea mays
  misc_feature: MA Experiment 108522 PARAMETER Experiment Name: Zm_42deg_Heat_P Parameter: Plant Line Value: 35A19
  misc_feature: MA Experiment 108522 PARAMETER Experiment Name: Zm_42deg_Heat_P Parameter: Temperature (deg C) Value: 42 vs. 22
  misc_feature: MA Experiment 108522 PARAMETER Experiment Name: Zm_42deg_Heat_P Parameter: Timepoint (hr) Value: 1
  misc_feature: MA Experiment 108522 PARAMETER Experiment Name: Zm_42deg_Heat_P Parameter: Tissue Value: Aerial
  misc_feature: MA Experiment ID: 108529 Result: Up-regulated in Transcription
  misc_feature: MA Experiment 108529 PARAMETER Experiment Name: Zm_Imbibed_Seeds_P Parameter: Age (day) Value: 5 vs. 2
  misc_feature: MA Experiment 108529 PARAMETER Experiment Name: Zm_Imbibed_Seeds_P Parameter: Organism Value: Zea mays
  misc_feature: MA Experiment 108529 PARAMETER Experiment Name: Zm_Imbibed_Seeds_P Parameter: Plant Line Value: 35A19
  misc_feature: MA Experiment 108529 PARAMETER Experiment Name: Zm_Imbibed_Seeds_P Parameter: Tissue Value: Roots vs. Embryo
  misc_feature: MA Experiment ID: 108530 Result: Down-regulated in Transcription
  misc_feature: MA Experiment 108530 PARAMETER Experiment Name: Zm_Imbibed_Seeds_P Parameter: Age (day) Value: 6 vs. 2
  misc_feature: MA Experiment 108530 PARAMETER Experiment Name: Zm_Imbibed_Seeds_P Parameter: Organism Value: Zea mays
  misc_feature: MA Experiment 108530 PARAMETER Experiment Name: Zm_Imbibed_Seeds_P Parameter: Plant Line Value: 35A19
  misc_feature: MA Experiment 108530 PARAMETER Experiment Name: Zm_Imbibed_Seeds_P Parameter: Tissue Value: Aerial vs. Embryo
  misc_feature: MA Experiment ID: 108543 Result: Down-regulated in Transcription
  misc_feature: MA Experiment ID: 108544 Result: Down-regulated in Transcription
  misc_feature: MA Experiment ID: 20000478 Result: Down-regulated in Transcription
  misc_feature: MA Experiment 20000478 PARAMETER Experiment Name: Zm_5mM_SA_P Parameter: Age (day) Value: 11
  misc_feature: MA Experiment 20000478 PARAMETER Experiment Name: Zm_5mM_SA_P Parameter: Organism Value: Zea mays
  misc_feature: MA Experiment 20000478 PARAMETER Experiment Name: Zm_5mM_SA_P Parameter: Plant Line Value: 35A19
  misc_feature: MA Experiment 20000478 PARAMETER Experiment Name: Zm_5mM_SA_P Parameter: Timepoint (hr) Value: 72
  misc_feature: MA Experiment 20000478 PARAMETER Experiment Name: Zm_5mM_SA_P Parameter: Tissue Value: Aerial
  misc_feature: MA Experiment 20000478 PARAMETER Experiment Name: Zm_5mM_SA_P Parameter: Treatment Value: 5mM SA vs. No Treatment
  misc_feature: MA Experiment ID: 20000535 Result: Up-regulated in Transcription
  misc_feature: MA Experiment 20000535 PARAMETER Experiment Name: Zm_Hybrid_Seed_Dev_P Parameter: DAP Value: 30 vs. 12
  misc_feature: MA Experiment 20000535 PARAMETER Experiment Name: Zm_Hybrid_Seed_Dev_P Parameter: Organism Value: Zea mays
  misc_feature: MA Experiment 20000535 PARAMETER Experiment Name: Zm_Hybrid_Seed_Dev_P Parameter: Plant Line Value: 35A19
  misc_feature: MA Experiment 20000535 PARAMETER Experiment Name: Zm_Hybrid_Seed_Dev_P Parameter: Tissue Value: Embryo vs. Unfert Floret
ccatcccaagaagagccgccctacctattccttctcccagccgtcgagctgcccaacccagagcaccagcagccctcaccttcttcctctcggccggtccttcaaacgagcccgctcgtcttggagccgccgccggtctcgttctggacgaacgttcaaggagattgcatttgtggatgctctaatggagtcgaaaggtggcaagaagtctagtagtagtagtagtaatttcatgtacgaagctccccttggctacaagatcgaggacgttcgcccagccggaggaatcaagaagttccagactgctgcttattccaactgcgtccgccagccatcctgatatcgcctcacatgcaattcgcggtagagtaggattttaattcagttttcctcttgtgtcggtagttttccgttggctctggctgccttcctctgcttctgagattccaacttgtcttgcccatctctccttttcctctctcatcctctctttcttgcaacacgtcatccagtggcgatgtcttcagcagattcttgtgtctcttctcctgcctcccctattggctttgagggctatgagaagcgcctcgagatcacgttctctgacgcgcctgtctttgaggacccttgtggtcgtggcctgcgcgccctctcccgtgagcagatcgactcgtttctggatctcgcacggtgcaccatagtgtcacagctctccaacgagagcttcgactcatatgttctgtccgagtccagcctctttgtgtatccccacaaggttgttctgaagacctgtgggacgacgaagctgctgctcgccattcctcgcatccttgagcttgctgcagggctgtcactgcctcttctttcagcgaagtactctcgtgggaccttcatcttccccggcgcgcagcccgcgccacaccgcagcttctcggaggaggtatctgtgctgaacgctttctttggtaacctcaagtccggtggcaatgcctacctgatcggtgaaccgttcaagcccaacaagaagtggcatgtctactacgccacagaggagcctgagcgtcctatggtgacgcttgagatgtgcatgacagagcttgacgttaagaaagctgctgtgttcttcaagaactccactggtggcagctgcacttcagctaaagagatgacgaagctctcggggattcatgagatcattcccgagatggagatctgtgactttgagtttgacccctgtgggtactcgatgaatggcgtcttcgggcctgcagcctccaccatccacgtgacacccgaggaaggtttcagctacgcaagctacgaagctatgaacttcgaccccagctcactggtctacagcgatgtgatcaggagggtcctggcaggcttctctccttcggacttctcggtcgcagttaccatctttggtggccgtgggttcgccaaatcatgggcgacgggtgcagacatcgattcctacatgtgcggtgatcctgtagagcaagagcttcctggtggcggtctgctgatgtaccagagctttactgctgttccctctggctctgtatcgccgaggtcgaccttgcagacggatggctggagcagcgatggaatggagatggcctcaaatgacgagatgtgtattggctgctggaatgcggtgaagaaggtggtgaagaaagatttggatgcttaaagatttggataacttaggtggttcttcacctaagttatgaagaagtctgagacctctgtctctctgttcttttggtttcagttaagcagttagctgggctaccggcaatttgtttgcttaatatttttcctgttcaataagtactctggatggcttgctgcgtctgccatagtgagctgcatattgttgtttagtcatattgtttctgctgccgatgcccttgtggggagaatgatcttgtaacagacttgcctattcccgcaatatattggaaattttggc

SEQ ID NO: 2212 - protein, 392 aa, Zea mays subsp. mays
  peptide (1)..(392): Ceres Seq. ID no. 12556347
  misc_feature (13)..(344): Pfam Name: Adenosylmethionine decarboxylase Pfam Description: Adenosylmethionine decarboxylase
  misc_feature (13)..(373): Homolog of NCBI NO: 38261497 NR Description: S-adenosyl-L-methionine decarboxylase [Brassica
  misc_feature (13)..(367): Homolog of NCBI NO: 28566348 NR Description: S-adenosylmethionine decarboxylase [Narcissus
  misc_feature (13)..(375): Homolog of NCBI NO: 16226063 NR Description: S-adenosyl-L-methionine decarboxylase [Dendrobium
  misc_feature (1)..(356): Homolog of NCBI NO: 7436593 NR Description: adenosylmethionine decarboxylase homolog
  misc_feature (8)..(392): Homolog of NCBI NO: 3913438 NR Description: S-adenosylmethionine decarboxylase proenzyme
  misc_feature (8)..(354): Homolog of NCBI NO: 4325045 NR Description: S-adenosylmethionine decarboxylase precursor
  misc_feature (1)..(356): Homolog of NCBI NO: 3929545 NR Description: S-adenosylmethionine decarboxylase [Oryza sativa]
  misc_feature (1)..(356): Homolog of NCBI NO: 19855056 NR Description: S-adenosylmethionine decarboxylase proenzyme
  misc_feature (1)..(360): Homolog of NCBI NO: 3913427 NR Description: S-adenosylmethionine decarboxylase proenzyme
  misc_feature (1)..(385): Homolog of NCBI NO: 6646868 NR Description: S-adenosylmethionine decarboxylase 2
MSSADSCVSSPASPIGFEGYEKRLEITFSDAPVFEDPCGRGLRALSREQIDSFLDLARCTIVSQLSNESFDSYVLSESSLFVYPHKVVLKTCGTTKLLLAIPRILELAAGLSLPLLSAKYSRGTFIFPGAQPAPHRSFSEEVSVLNAFFGNLKSGGNAYLIGEPFKPNKKWHVYYATEEPERPMVTLEMCMTELDVKKAAVFFKNSTGGSCTSAKEMTKLSGIHEIIPEMEICDFEFDPCGYSMNGVFGPAASTIHVTPEEGFSYASYEAMNFDPSSLVYSDVIRRVLAGFSPSDFSVAVTIFGGRGFAKSWATGADIDSYMCGDPVEQELPGGGLLMYQSFTAVPSGSVSPRSTLQTDGWSSDGMEMASNDEMCIGCWNAVKKVVKKDLDA

SEQ ID NO: 2213 - protein, 209 aa, Zea mays subsp. mays
  peptide (1)..(209): Ceres Seq. ID no. 12556348
  misc_feature (1)..(161): Pfam Name: Adenosylmethionine decarboxylase Pfam Description: Adenosylmethionine decarboxylase
  misc_feature (1)..(190): Homolog of NCBI NO: 38261497 NR Description: S-adenosyl-L-methionine decarboxylase [Brassica
  misc_feature (1)..(184): Homolog of NCBI NO: 28566348 NR Description: S-adenosylmethionine decarboxylase [Narcissus
  misc_feature (1)..(192): Homolog of NCBI NO: 16226063 NR Description: S-adenosyl-L-methionine decarboxylase [Dendrobium
  misc_feature (1)..(173): Homolog of NCBI NO: 7436593 NR Description: adenosylmethionine decarboxylase homolog
  misc_feature (1)..(209): Homolog of NCBI NO: 3913438 NR Description: S-adenosylmethionine decarboxylase proenzyme
  misc_feature (1)..(171): Homolog of NCBI NO: 4325045 NR Description: S-adenosylmethionine decarboxylase precursor
  misc_feature (1)..(173): Homolog of NCBI NO: 3929545 NR Description: S-adenosylmethionine decarboxylase [Oryza sativa]
  misc_feature (1)..(173): Homolog of NCBI NO: 19855056 NR Description: S-adenosylmethionine decarboxylase proenzyme
  misc_feature (1)..(177): Homolog of NCBI NO: 3913427 NR Description: S-adenosylmethionine decarboxylase proenzyme
  misc_feature (1)..(202): Homolog of NCBI NO: 6646868 NR Description: S-adenosylmethionine decarboxylase 2
MVTLEMCMTELDVKKAAVFFKNSTGGSCTSAKEMTKLSGIHEIIPEMEICDFEFDPCGYSMNGVFGPAASTIHVTPEEGFSYASYEAMNFDPSSLVYSDVIRRVLAGFSPSDFSVAVTIFGGRGFAKSWATGADIDSYMCGDPVEQELPGGGLLMYQSFTAVPSGSVSPRSTLQTDGWSSDGMEMASNDEMCIGCWNAVKKVVKKDLDA

SEQ ID NO: 2214 - protein, 204 aa, Zea mays subsp. mays
  peptide (1)..(204): Ceres Seq. ID no. 12556349
  misc_feature (1)..(156): Pfam Name: Adenosylmethionine decarboxylase Pfam Description: Adenosylmethionine decarboxylase
  misc_feature (1)..(185): Homolog of NCBI NO: 38261497 NR Description: S-adenosyl-L-methionine decarboxylase [Brassica
  misc_feature (1)..(179): Homolog of NCBI NO: 28566348 NR Description: S-adenosylmethionine decarboxylase [Narcissus
  misc_feature (1)..(187): Homolog of NCBI NO: 16226063 NR Description: S-adenosyl-L-methionine decarboxylase [Dendrobium
  misc_feature (1)..(168): Homolog of NCBI NO: 7436593 NR Description: adenosylmethionine decarboxylase homolog
  misc_feature (1)..(204): Homolog of NCBI NO: 3913438 NR Description: S-adenosylmethionine decarboxylase proenzyme
  misc_feature (1)..(166): Homolog of NCBI NO: 4325045 NR Description: S-adenosylmethionine decarboxylase precursor
  misc_feature (1)..(168): Homolog of NCBI NO: 3929545 NR Description: S-adenosylmethionine decarboxylase [Oryza sativa]
  misc_feature (1)..(168): Homolog of NCBI NO: 19855056 NR Description: S-adenosylmethionine decarboxylase proenzyme
  misc_feature (1)..(172): Homolog of NCBI NO: 3913427 NR Description: S-adenosylmethionine decarboxylase proenzyme
  misc_feature (1)..(197): Homolog of NCBI NO: 6646868 NR Description: S-adenosylmethionine decarboxylase 2
MCMTELDVKKAAVFFKNSTGGSCTSAKEMTKLSGIHEIIPEMEICDFEFDPCGYSMNGVFGPAASTIHVTPEEGFSYASYEAMNFDPSSLVYSDVIRRVLAGFSPSDFSVAVTIFGGRGFAKSWATGADIDSYMCGDPVEQELPGGGLLMYQSFTAVPSGSVSPRSTLQTDGWSSDGMEMASNDEMCIGCWNAVKKVVKKDLDA

SEQ ID NO: 2215 - DNA, 852 bp, Zea mays subsp. mays
  misc_feature (1)..(852): Ceres Seq. ID no. 12407882
  misc_feature: MA Experiment ID: 108527 Result: Up-regulated in Transcription
  misc_feature: MA Experiment 108527 PARAMETER Experiment Name: Zm_5mM_NO_P Parameter: Age (day) Value: 8
  misc_feature: MA Experiment 108527 PARAMETER Experiment Name: Zm_5mM_NO_P Parameter: Organism Value: Zea mays
  misc_feature: MA Experiment 108527 PARAMETER Experiment Name: Zm_5mM_NO_P Parameter: Plant Line Value: 35A19
  misc_feature: MA Experiment 108527 PARAMETER Experiment Name: Zm_5mM_NO_P Parameter: Timepoint (hr) Value: 6
  misc_feature: MA Experiment 108527 PARAMETER Experiment Name: Zm_5mM_NO_P Parameter: Tissue Value: Aerial
  misc_feature: MA Experiment 108527 PARAMETER Experiment Name: Zm_5mM_NO_P Parameter: Treatment Value: 5mM NO vs. No Treatment
  misc_feature: MA Experiment ID: 108528 Result: Down-regulated in Transcription
  misc_feature: MA Experiment 108528 PARAMETER Experiment Name: Zm_Imbibed_Seeds_P Parameter: Age (day) Value: 5 vs. 2
  misc_feature: MA Experiment 108528 PARAMETER Experiment Name: Zm_Imbibed_Seeds_P Parameter: Organism Value: Zea mays
  misc_feature: MA Experiment 108528 PARAMETER Experiment Name: Zm_Imbibed_Seeds_P Parameter: Plant Line Value: 35A19
  misc_feature: MA Experiment 108528 PARAMETER Experiment Name: Zm_Imbibed_Seeds_P Parameter: Tissue Value: Aerial vs. Embryo
  misc_feature: MA Experiment ID: 108529 Result: Down-regulated in Transcription
  misc_feature: MA Experiment 108529 PARAMETER Experiment Name: Zm_Imbibed_Seeds_P Parameter: Age (day) Value: 5 vs. 2
  misc_feature: MA Experiment 108529 PARAMETER Experiment Name: Zm_Imbibed_Seeds_P Parameter: Organism Value: Zea mays
  misc_feature: MA Experiment 108529 PARAMETER Experiment Name: Zm_Imbibed_Seeds_P Parameter: Plant Line Value: 35A19
  misc_feature: MA Experiment 108529 PARAMETER Experiment Name: Zm_Imbibed_Seeds_P Parameter: Tissue Value: Roots vs. Embryo
  misc_feature: MA Experiment ID: 108530 Result: Down-regulated in Transcription
  misc_feature: MA Experiment 108530 PARAMETER Experiment Name: Zm_Imbibed_Seeds_P Parameter: Age (day) Value: 6 vs. 2
  misc_feature: MA Experiment 108530 PARAMETER Experiment Name: Zm_Imbibed_Seeds_P Parameter: Organism Value: Zea mays
  misc_feature: MA Experiment 108530 PARAMETER Experiment Name: Zm_Imbibed_Seeds_P Parameter: Plant Line Value: 35A19
  misc_feature: MA Experiment 108530 PARAMETER Experiment Name: Zm_Imbibed_Seeds_P Parameter: Tissue Value: Aerial vs. Embryo
  misc_feature: MA Experiment ID: 108543 Result: Down-regulated in Transcription
  misc_feature: MA Experiment ID: 108545 Result: Down-regulated in Transcription
  misc_feature: MA Experiment 108545 PARAMETER Experiment Name: Zm_Imbibed_Seeds_P Parameter: Age (day) Value: 3 vs. 2
  misc_feature: MA Experiment 108545 PARAMETER Experiment Name: Zm_Imbibed_Seeds_P Parameter: Organism Value: Zea mays
  misc_feature: MA Experiment 108545 PARAMETER Experiment Name: Zm_Imbibed_Seeds_P Parameter: Plant Line Value: 35A19
  misc_feature: MA Experiment 108545 PARAMETER Experiment Name: Zm_Imbibed_Seeds_P Parameter: Tissue Value: Aerial vs. Embryo
  misc_feature: MA Experiment ID: 108546 Result: Down-regulated in Transcription
  misc_feature: MA Experiment 108546 PARAMETER Experiment Name: Zm_Imbibed_Seeds_P Parameter: Age (day) Value: 3 vs. 2
  misc_feature: MA Experiment 108546 PARAMETER Experiment Name: Zm_Imbibed_Seeds_P Parameter: Organism Value: Zea mays
  misc_feature: MA Experiment 108546 PARAMETER Experiment Name: Zm_Imbibed_Seeds_P Parameter: Plant Line Value: 35A19
  misc_feature: MA Experiment 108546 PARAMETER Experiment Name: Zm_Imbibed_Seeds_P Parameter: Tissue Value: Roots vs. Embryo
  misc_feature: MA Experiment ID: 108547 Result: Down-regulated in Transcription
  misc_feature: MA Experiment 108547 PARAMETER Experiment Name: Zm_Imbibed_Seeds_P Parameter: Age (day) Value: 4 vs. 2
  misc_feature: MA Experiment 108547 PARAMETER Experiment Name: Zm_Imbibed_Seeds_P Parameter: Organism Value: Zea mays
  misc_feature: MA Experiment 108547 PARAMETER Experiment Name: Zm_Imbibed_Seeds_P Parameter: Plant Line Value: 35A19
  misc_feature: MA Experiment 108547 PARAMETER Experiment Name: Zm_Imbibed_Seeds_P Parameter: Tissue Value: Aerial vs. Embryo
  misc_feature: MA Experiment ID: 108548 Result: Up-regulated in Transcription
  misc_feature: MA Experiment 108548 PARAMETER Experiment Name: Zm_20uM_KNO3_H-to-L_P Parameter: Age (day) Value: 11
  misc_feature: MA Experiment 108548 PARAMETER Experiment Name: Zm_20uM_KNO3_H-to-L_P Parameter: Organism Value: Zea mays
  misc_feature: MA Experiment 108548 PARAMETER Experiment Name: Zm_20uM_KNO3_H-to-L_P Parameter: Plant Line Value: 35A19
  misc_feature: MA Experiment 108548 PARAMETER Experiment Name: Zm_20uM_KNO3_H-to-L_P Parameter: Timepoint (hr) Value: 4
  misc_feature: MA Experiment 108548 PARAMETER Experiment Name: Zm_20uM_KNO3_H-to-L_P Parameter: Tissue Value: Roots
  misc_feature: MA Experiment 108548 PARAMETER Experiment Name: Zm_20uM_KNO3_H-to-L_P Parameter: Treatment Value: 20uM KNO3 vs. 60mM KNO3
  misc_feature: MA Experiment ID: 108688 Result: Down-regulated in Transcription
  misc_feature: MA Experiment 108688 PARAMETER Experiment Name: Zm_Embryos-Flowers__P Parameter: Tissue Value: Immature Flowers vs. Aerial+
  misc_feature: MA Experiment ID: 20000535 Result: Up-regulated in Transcription
  misc_feature: MA Experiment 20000535 PARAMETER Experiment Name: Zm_Hybrid_Seed_Dev_P Parameter: DAP Value: 30 vs. 12
  misc_feature: MA Experiment 20000535 PARAMETER Experiment Name: Zm_Hybrid_Seed_Dev_P Parameter: Organism Value: Zea mays
  misc_feature: MA Experiment 20000535 PARAMETER Experiment Name: Zm_Hybrid_Seed_Dev_P Parameter: Plant Line Value: 35A19
  misc_feature: MA Experiment 20000535 PARAMETER Experiment Name: Zm_Hybrid_Seed_Dev_P Parameter: Tissue Value: Embryo vs. Unfert Floret
  misc_feature: MA Experiment ID: 20001610 Result: Down-regulated in Transcription
  misc_feature: MA Experiment 20001610 PARAMETER Experiment Name: Zm_50ppm_KNO3_L-to-H_P Parameter: Age (day) Value: 19
  misc_feature: MA Experiment 20001610 PARAMETER Experiment Name: Zm_50ppm_KNO3_L-to-H_P Parameter: Organism Value: Zea mays
  misc_feature: MA Experiment 20001610 PARAMETER Experiment Name: Zm_50ppm_KNO3_L-to-H_P Parameter: Plant Line Value: 35A19
  misc_feature: MA Experiment 20001610 PARAMETER Experiment Name: Zm_50ppm_KNO3_L-to-H_P Parameter: Timepoint (hr) Value: 2
  misc_feature: MA Experiment 20001610 PARAMETER Experiment Name: Zm_50ppm_KNO3_L-to-H_P Parameter: Tissue Value: Roots
  misc_feature: MA Experiment 20001610 PARAMETER Experiment Name: Zm_50ppm_KNO3_L-to-H_P Parameter: Treatment Value: 50ppm KNO3 vs. 50ppm KCl
  misc_feature: MA Experiment ID: 20001613 Result: Up-regulated in Transcription
  misc_feature: MA Experiment 20001613 PARAMETER Experiment Name: Zm_50ppm_KNO3_L-to-H_P Parameter: Age (day) Value: 20
  misc_feature: MA Experiment 20001613 PARAMETER Experiment Name: Zm_50ppm_KNO3_L-to-H_P Parameter: Organism Value: Zea mays
  misc_feature: MA Experiment 20001613 PARAMETER Experiment Name: Zm_50ppm_KNO3_L-to-H_P Parameter: Plant Line Value: 35A19
  misc_feature: MA Experiment 20001613 PARAMETER Experiment Name: Zm_50ppm_KNO3_L-to-H_P Parameter: Timepoint (hr) Value: 24
  misc_feature: MA Experiment 20001613 PARAMETER Experiment Name: Zm_50ppm_KNO3_L-to-H_P Parameter: Tissue Value: Roots
  misc_feature: MA Experiment 20001613 PARAMETER Experiment Name: Zm_50ppm_KNO3_L-to-H_P Parameter: Treatment Value: 50ppm KNO3 vs. 50ppm KCl
  misc_feature: MA Experiment ID: 20001614 Result: Up-regulated in Transcription
  misc_feature: MA Experiment 20001614 PARAMETER Experiment Name: Zm_50ppm_KNO3_L-to-H_P Parameter: Age (day) Value: 21
  misc_feature: MA Experiment 20001614 PARAMETER Experiment Name: Zm_50ppm_KNO3_L-to-H_P Parameter: Organism Value: Zea mays
  misc_feature: MA Experiment 20001614 PARAMETER Experiment Name: Zm_50ppm_KNO3_L-to-H_P Parameter: Plant Line Value: 35A19
  misc_feature: MA Experiment 20001614 PARAMETER Experiment Name: Zm_50ppm_KNO3_L-to-H_P Parameter: Timepoint (hr) Value: 48
  misc_feature: MA Experiment 20001614 PARAMETER Experiment Name: Zm_50ppm_KNO3_L-to-H_P Parameter: Tissue Value: Roots
  misc_feature: MA Experiment 20001614 PARAMETER Experiment Name: Zm_50ppm_KNO3_L-to-H_P Parameter: Treatment Value: 50ppm KNO3 vs. 50ppm KCl
aaaacacgcgaatcgtaccggtacgaacactgagcacgcacgcacgcaaactcaaaggagtgtgaccacggaactgaagccatggcggttacagttgaaaagggcgctatgggcgagccggcgctgctgctggagcgcagccgggcgatcacccttcagggccgtgaccggaagggccgtgccgtcgtcaggatcgtcggcaactactttccagcgcgcgcgctgggcggccgggcggaggaggcgctgcggtcgtacctgcgggagcgcgtcctcccggagatcggggaccgcgagttcgtggtcgtgtacatgcactcccgcgtggatcgcggccacaacttccccggcgtcggtgcgatccgcggcgcgtacgagacgctgccggccgcggccaaggagaggctgcgcgccgtctacttcgtgcacccggccctccagtccaggatcttcttcgccaccttcgggcgcttcctcttcagctcagggttgtatgagaagctgcgatacatgagccggcttgagtacgtttgggcccacatagacaaggagcagctggaggtccccgaatgcgtgcgcgagcacgacgacgagctggagcgccgcccgctgatggactacggcatcgaggcgaccgagacccgctgcatgtatgacgccgcgtccatggacacctcggcgtccctgcactcgctccgctgcgtctactagtcgcctggacagtggcatcccgattcccgccgncggtaacggcgtgctttctgtgttctggttggtaggaggttagctgcatggcttcatagcgcttcggtactgtagtttagctgtgtatttataatggataaagtttgg

SEQ ID NO: 2216 - protein, 209 aa, Zea mays subsp. mays
  peptide (1)..(209): Ceres Seq. ID no. 12407883
  misc_feature (29)..(169): Homolog of NCBI NO: 39597272 NR Description: Hypothetical protein CBG02886 [Caenorhabditis
  misc_feature (27)..(169): Homolog of NCBI NO: 24586353 NR Description: CG18812-PC [Drosophila melanogaster]
  misc_feature (27)..(169): Homolog of NCBI NO: 24586357 NR Description: CG18812-PA [Drosophila melanogaster]
  misc_feature (27)..(169): Homolog of NCBI NO: 24586355 NR Description: CG18812-PB [Drosophila melanogaster]
  misc_feature (9)..(183): Homolog of NCBI NO: 22830926 NR Description: P0466H10.24 [Oryza sativa (japonica
  misc_feature (17)..(183): Homolog of NCBI NO: 18398797 NR Description: expressed protein
  misc_feature (17)..(183): Homolog of NCBI NO: 21593697 NR Description: unknown [Arabidopsis thaliana]
  misc_feature (12)..(208): Homolog of NCBI NO: 21553817 NR Description: unknown [Arabidopsis thaliana]
  misc_feature (12)..(208): Homolog of NCBI NO: 15237117 NR Description: putative protein
  misc_feature (10)..(207): Homolog of NCBI NO: 38345848 NR Description: OSJNBa0084K11.12 [Oryza sativa (japonica
MAVTVEKGAMGEPALLLERSRAITLQGRDRKGRAVVRIVGNYFPARALGGRAEEALRSYLRERVLPEIGDREFVVVYMHSRVDRGHNFPGVGAIRGAYETLPAAAKERLRAVYFVHPALQSRIFFATFGRFLFSSGLYEKLRYMSRLEYVWAHIDKEQLEVPECVREHDDELERRPLMDYGIEATETRCMYDAASMDTSASLHSLRCVY

SEQ ID NO: 2217 - protein, 200 aa, Zea mays subsp. mays
  peptide (1)..(200): Ceres Seq. ID no. 12407884
  misc_feature (20)..(160): Homolog of NCBI NO: 39597272 NR Description: Hypothetical protein CBG02886 [Caenorhabditis
  misc_feature (18)..(160): Homolog of NCBI NO: 24586353 NR Description: CG18812-PC [Drosophila melanogaster]
  misc_feature (18)..(160): Homolog of NCBI NO: 24586357 NR Description: CG18812-PA [Drosophila melanogaster]
  misc_feature (18)..(160): Homolog of NCBI NO: 24586355 NR Description: CG18812-PB [Drosophila melanogaster]
  misc_feature (1)..(174): Homolog of NCBI NO: 22830926 NR Description: P0466H10.24 [Oryza sativa (japonica
  misc_feature (8)..(174): Homolog of NCBI NO: 18398797 NR Description: expressed protein
  misc_feature (8)..(174): Homolog of NCBI NO: 21593697 NR Description: unknown [Arabidopsis thaliana]
  misc_feature (3)..(199): Homolog of NCBI NO: 21553817 NR Description: unknown [Arabidopsis thaliana]
  misc_feature (3)..(199): Homolog of NCBI NO: 15237117 NR Description: putative protein
  misc_feature (1)..(198): Homolog of NCBI NO: 38345848 NR Description: OSJNBa0084K11.12 [Oryza sativa (japonica
MGEPALLLERSRAITLQGRDRKGRAVVRIVGNYFPARALGGRAEEALRSYLRERVLPEIGDREFVVVYMHSRVDRGHNFPGVGAIRGAYETLPAAAKERLRAVYFVHPALQSRIFFATFGRFLFSSGLYEKLRYMSRLEYVWAHIDKEQLEVPECVREHDDELERRPLMDYGIEATETRCMYDAASMDTSASLHSLRCVY

SEQ ID NO: 2218 - protein, 170 aa, Zea mays subsp. mays
  peptide (1)..(170): Ceres Seq. ID no. 12407885
KHANRTGTNTEHARTQTQRSVTTELKPWRLQLKRALWASRRCCWSAAGRSPFRAVTGRAVPSSGSSATTFQRARWAAGRRRRCGRTCGSASSRRSGTASSWSCTCTPAWIAATTSPASVRSAARTRRCRPRPRRGCAPSTSCTRPSSPGSSSPPSGASSSAQGCMRSCDT

SEQ ID NO: 2219 - DNA, 1338 bp, Zea mays subsp. mays
  misc_feature (1)..(1338): Ceres Seq. ID no. 12352000
  misc_feature: MA Experiment ID: 20000478 Result: Up-regulated in Transcription
  misc_feature: MA Experiment 20000478 PARAMETER Experiment Name: Zm_5mM_SA_P Parameter: Age (day) Value: 11
  misc_feature: MA Experiment 20000478 PARAMETER Experiment Name: Zm_5mM_SA_P Parameter: Organism Value: Zea mays
  misc_feature: MA Experiment 20000478 PARAMETER Experiment Name: Zm_5mM_SA_P Parameter: Plant Line Value: 35A19
  misc_feature: MA Experiment 20000478 PARAMETER Experiment Name: Zm_5mM_SA_P Parameter: Timepoint (hr) Value: 72
  misc_feature: MA Experiment 20000478 PARAMETER Experiment Name: Zm_5mM_SA_P Parameter: Tissue Value: Aerial
  misc_feature: MA Experiment 20000478 PARAMETER Experiment Name: Zm_5mM_SA_P Parameter: Treatment Value: 5mM SA vs. No Treatment
atcattcattccctcacccccttcccttagaagctgcaggtgcagtgcatgcaaggagacaggccacgatactgtctgagatggaaggggccatgacgacgagaagcaagcatcgtcgtcatgaggaggaccaggagatgacgatggtggagctgaggagaggcccctggacgctcgaggaagacaacctcctcatgaactacattgcttgccacggcgagggccgctggaatctcctggcccgctgctccgggctgaagaggaccggcaagagctgccggctgaggtggctcaactacctcaagccggacatcaagcgcggcaacctggcgccggaggagcagctcctcatcctggagctccactccaagtgggggaaccggtggtccaggatagcncagcacctgccggggcggaccgacaacgagatcaagaactactggcggacgcgcctgctcgagaagacgatggcggccgccgcggcatccacgtccggcgaagtgctgctgccgccgctaccgccgccgccgcaactgcacccctcgcgcgtcgccggcttattggcctcttcctcctcgtcgccagtccagcgggacaccagcgacagcgactacctgccgcagcggtaccaccaccaccccgtcgacccgagcccgagcgcgtcgtcgacggtttcctcgtcggccgcgctcgcgccggtgccctgcttctccgaactgagctgggtcgaccagtacgggtacggcccttattacagttacggcgccaacctcgacgacggcgccggcgtgttcgacgactcggcagcgctggaggaaggcctcggcctggacgcgctggacctgggtccggccgacgacagcgacgtcgcccactcggacgcgacgctgctggactacctcaactccgcgtgcgccggcggcggcaccatgatgatggctgtgacgggcggcggcggcggcgtccaaagcagcggctgcggcgccacgggaggtgccgacgccgactaccggccgtcgccgtgcacgtggcggacggacgagctcggcgatcctcgtcagcatcaatggggaggaggaatctagaagcaatcaaagagagcttgcttctcggcacgtctctctctctctctctccctctccctctccctcccaaagcgacgatcgatcgatcgagatgtcacactagttaattagtggatcggagctagatagcaggtagcaagatgcgtgagtggcgataaaaaaacattaggggccggggccgggcatattctgctgttaattcgaccgatcattcgttcgatcgtgtagtagagagatgtgtggtttgatgtcg

SEQ ID NO: 2220 - protein, 360 aa, Zea mays subsp. mays
  peptide (1)..(360): Ceres Seq. ID no. 12352001
  misc_feature (53)..(100): Pfam Name: Myb-like DNA-binding domain Pfam Description: Myb-like DNA-binding domain
  misc_feature (49)..(151): Homolog of NCBI NO: 40643882 NR Description: MYB8 protein [Gerbera hybrid cv. 'Terra Regina']
  misc_feature (44)..(238): Homolog of NCBI NO: 15240518 NR Description: myb family transcription factor; protein id:
  misc_feature (24)..(151): Homolog of NCBI NO: 7446185 NR Description: dehydration-induced myb-related protein Cpm7 -
  misc_feature (27)..(151): Homolog of NCBI NO: 13177578 NR Description: Myb transcription factor JAMyb [Oryza sativa]
  misc_feature (31)..(151): Homolog of NCBI NO: 19073334 NR Description: typical P-type R2R3 Myb protein [Sorghum bicolor]
  misc_feature (50)..(151): Homolog of NCBI NO: 19073328 NR Description: typical P-type R2R3 Myb protein [Sorghum bicolor]
  misc_feature (50)..(151): Homolog of NCBI NO: 34898110 NR Description: putative typical P-type R2R3 Myb protein
  misc_feature (27)..(273): Homolog of NCBI NO: 15221373 NR Description: myb family transcription factor; protein id:
  misc_feature (38)..(151): Homolog of NCBI NO: 34895506 NR Description: putative myb-related transcription factor
  misc_feature (119)..(360): Homolog of NCBI NO: 34895506 NR Description: putative myb-related transcription factor
  misc_feature (132)..(132): Xaa is any aa, unknown or other
HSFPHPLPLEAAGAVHARRQATILSEMEGAMTTRSKHRRHEEDQEMTMVELRRGPWTLEEDNLLMNYIACHGEGRWNLLARCSGLKRTGKSCRLRWLNYLKPDIKRGNLAPEEQLLILELHSKWGNRWSRIXQHLPGRTDNEIKNYWRTRLLEKTMAAAAASTSGEVLLPPLPPPPQLHPSRVAGLLASSSSSPVQRDTSDSDYLPQRYHHHPVDPSPSASSTVSSSAALAPVPCFSELSWVDQYGYGPYYSYGANLDDGAGVFDDSAALEEGLGLDALDLGPADDSDVAHSDATLLDYLNSACAGGGTMMMAVTGGGGGVQSSGCGATGGADADYRPSPCTWRTDELGDPRQHQWGGGI

SEQ ID NO: 2221 - protein, 334 aa, Zea mays subsp. mays
  peptide (1)..(334): Ceres Seq. ID no. 12352002
  misc_feature (27)..(74): Pfam Name: Myb-like DNA-binding domain Pfam Description: Myb-like DNA-binding domain
  misc_feature (23)..(125): Homolog of NCBI NO: 40643882 NR Description: MYB8 protein [Gerbera hybrid cv. 'Terra Regina']
  misc_feature (18)..(212): Homolog of NCBI NO: 15240518 NR Description: myb family transcription factor; protein id:
  misc_feature (1)..(125): Homolog of NCBI NO: 7446185 NR Description: dehydration-induced myb-related protein Cpm7 -
  misc_feature (1)..(125): Homolog of NCBI NO: 13177578 NR Description: Myb transcription factor JAMyb [Oryza sativa]
  misc_feature (5)..(125): Homolog of NCBI NO: 19073334 NR Description: typical P-type R2R3 Myb protein [Sorghum bicolor]
  misc_feature (24)..(125): Homolog of NCBI NO: 19073328 NR Description: typical P-type R2R3 Myb protein [Sorghum bicolor]
  misc_feature (24)..(125): Homolog of NCBI NO: 34898110 NR Description: putative typical P-type R2R3 Myb protein
  misc_feature (1)..(247): Homolog of NCBI NO: 15221373 NR Description: myb family transcription factor; protein id:
  misc_feature (12)..(125): Homolog of NCBI NO: 34895506 NR Description: putative myb-related transcription factor
  misc_feature (93)..(334): Homolog of NCBI NO: 34895506 NR Description: putative myb-related transcription factor
  misc_feature (106)..(106): Xaa is any aa, unknown or other
MEGAMTTRSKHRRHEEDQEMTMVELRRGPWTLEEDNLLMNYIACHGEGRWNLLARCSGLKRTGKSCRLRWLNYLKPDIKRGNLAPEEQLLILELHSKWGNRWSRIXQHLPGRTDNEIKNYWRTRLLEKTMAAAAASTSGEVLLPPLPPPPQLHPSRVAGLLASSSSSPVQRDTSDSDYLPQRYHHHPVDPSPSASSTVSSSAALAPVPCFSELSWVDQYGYGPYYSYGANLDDGAGVFDDSAALEEGLGLDALDLGPADDSDVAHSDATLLDYLNSACAGGGTMMMAVTGGGGGVQSSGCGATGGADADYRPSPCTWRTDELGDPRQHQWGGGI

SEQ ID NO: 2222 - protein, 330 aa, Zea mays subsp. mays
  peptide (1)..(330): Ceres Seq. ID no. 12352003
  misc_feature (23)..(70): Pfam Name: Myb-like DNA-binding domain Pfam Description: Myb-like DNA-binding domain
  misc_feature (19)..(121): Homolog of NCBI NO: 40643882 NR Description: MYB8 protein [Gerbera hybrid cv. 'Terra Regina']
  misc_feature (14)..(208): Homolog of NCBI NO: 15240518 NR Description: myb family transcription factor; protein id:
  misc_feature (1)..(121): Homolog of NCBI NO: 7446185 NR Description: dehydration-induced myb-related protein Cpm7 -
  misc_feature (1)..(121): Homolog of NCBI NO: 13177578 NR Description: Myb transcription factor JAMyb [Oryza sativa]
  misc_feature (1)..(121): Homolog of NCBI NO: 19073334 NR Description: typical P-type R2R3 Myb protein [Sorghum bicolor]
  misc_feature (20)..(121): Homolog of NCBI NO: 19073328 NR Description: typical P-type R2R3 Myb protein [Sorghum bicolor]
  misc_feature (20)..(121): Homolog of NCBI NO: 34898110 NR Description: putative typical P-type R2R3 Myb protein
  misc_feature (1)..(243): Homolog of NCBI NO: 15221373 NR Description: myb family transcription factor; protein id:
  misc_feature (8)..(121): Homolog of NCBI NO: 34895506 NR Description: putative myb-related transcription factor
  misc_feature (89)..(330): Homolog of NCBI NO: 34895506 NR Description: putative myb-related transcription factor
  misc_feature (102)..(102): Xaa is any aa, unknown or other
MTTRSKHRRHEEDQEMTMVELRRGPWTLEEDNLLMNYIACHGEGRWNLLARCSGLKRTGKSCRLRWLNYLKPDIKRGNLAPEEQLLILELHSKWGNRWSRIXQHLPGRTDNEIKNYWRTRLLEKTMAAAAASTSGEVLLPPLPPPPQLHPSRVAGLLASSSSSPVQRDTSDSDYLPQRYHHHPVDPSPSASSTVSSSAALAPVPCFSELSWVDQYGYGPYYSYGANLDDGAGVFDDSAALEEGLGLDALDLGPADDSDVAHSDATLLDYLNSACAGGGTMMMAVTGGGGGVQSSGCGATGGADADYRPSPCTWRTDELGDPRQHQWGGGI

SEQ ID NO: 2223 - DNA, 1608 bp, Zea mays subsp. mays
  misc_feature (1)..(1608): Ceres Seq. ID no. 12352004
  misc_feature: MA Experiment ID: 108543 Result: Down-regulated in Transcription
aacaaaatctctccttagtttccccaacctgcttctgtttaccgaattcctaaatccaatccccttgccaagctctctctttgctgcgggaggtcgaggccggagaggtattccgggatgggatcaagaaaggggtggttccccgtggccctcctgctgttggccgcctctgccctctggccgccggtcgccgccgccgccgccggaggcggcgaggccgaacacgccgttcagcagcatagcgagcgcatctcagggagtgctggtgatgtgttagaagataatcctgtgggtaggttgaaggtcttcatttatgacttaccaaggaagtacaacaagaagatggtcaccaaggattcacggtgcctcagtcacatgtttgccgctgaaattttcatgcatcgtttcttgctctcgagtgctgtccggacactaaatcccaaggaagctgattggttctatacaccagtttacactacttgcgatttaactaacgctggactgcccttgccgtttaagtcaccacgggtgatgaggagcgcgatccaatatatttcaaacaaatggcccttctggaataggactgatggagcagatcatttcttcgttgttccgcatgattttgcagcatgcttccactatcaggaagaaaaagctatcgagcgtggaattcttccattgctgcgacgtgctacattggtccaaacctttggacaggagaatcatgtttgcctgaaggagggttccatcattattccaccctatgctcctccgcagaaaatgcaagctcacttgatttccccagacactccacgctcaatcttcgtttacttccggggacttttttatgacacggggaatgaccccgagggcggatactatgcaagaggtgcgcgagcttcgctatgggagaacttcaagagcaaccctctgtttgacatttccacagaccaccctgccacttactatgaagacatgcagcgcgctgtcttctgcctgtgcccattgggctgggcaccgtggagccctaggttggttgaggctgtggtctttggctgcattccagtcatcatagctgatgacatcgtgcttccatttgcagacgcgatcccatgggaggaaatcggcgtctttgtcgaggagaaggatgtcccaaagcttgacacgatcctcacgtcgatgcctatagatgacatcttaaggaagcaaaggttactcgcaaatccatcgatgaagcaggcaatgttgttcccacagccagcgcaaccaagggacgcgttccaccaaatcttgaacggccttgctcggaagctcccgcacccagagggtacgttcttacaacctggcgatcagcgcctcaactggaccgctggtcctgtgggagatctgaagccgtggtagagaagaatagctatcttcttctttgataatccaagctttgccacgagcaccccttaggactaatgcacgcttcatgagatgttatgtaatcaatatgctgtgcgtgctttaggtgcaaaatacaccttggccgtgcttagtccttatgaacgccatgtaacttattgatttcccatggaaatgaaatggtatatttatcttgctgtc

SEQ ID NO: 2224 - protein, 427 aa, Zea mays subsp. mays
  peptide (1)..(427): Ceres Seq. ID no. 12352005
  misc_feature (63)..(367): Pfam Name: Exostosin family Pfam Description: Exostosin family
  misc_feature (34)..(427): Homolog of NCBI NO: 15223522 NR Description: unknown protein; protein id: At1g27440.1
  misc_feature (40)..(427): Homolog of NCBI NO: 21592991 NR Description: unknown [Arabidopsis thaliana]
  misc_feature (40)..(427): Homolog of NCBI NO: 18424516 NR Description: putative protein
  misc_feature (52)..(427): Homolog of NCBI NO: 18642697 NR Description: Unknown protein [Oryza sativa]
  misc_feature (52)..(427): Homolog of NCBI NO: 37531708 NR Description: unknown protein [Oryza sativa (japonica
  misc_feature (10)..(427): Homolog of NCBI NO: 34907044 NR Description: hypothetical protein~similar to Arabidopsis
  misc_feature (87)..(427): Homolog of NCBI NO: 23821292 NR Description: pectin-glucuronyltransferase [Nicotiana
  misc_feature (31)..(427): Homolog of NCBI NO: 34907048 NR Description: contains EST D24978(R2878)~similar to Arabidopsis
  misc_feature (40)..(427): Homolog of NCBI NO: 34907046 NR Description: contains EST D39982(S1682)~similar to Arabidopsis
  misc_feature (1)..(427): Homolog of NCBI NO: 38347167 NR Description: OSJNBa0039C07.13 [Oryza sativa (japonica
MGSRKGWFPVALLLLAASALWPPVAAAAAGGGEAEHAVQQHSERISGSAGDVLEDNPVGRLKVFIYDLPRKYNKKMVTKDSRCLSHMFAAEIFMHRFLLSSAVRTLNPKEADWFYTPVYTTCDLTNAGLPLPFKSPRVMRSAIQYISNKWPFWNRTDGADHFFVVPHDFAACFHYQEEKAIERGILPLLRRATLVQTFGQENHVCLKEGSIIIPPYAPPQKMQAHLISPDTPRSIFVYFRGLFYDTGNDPEGGYYARGARASLWENFKSNPLFDISTDHPATYYEDMQRAVFCLCPLGWAPWSPRLVEAVVFGCIPVIIADDIVLPFADAIPWEEIGVFVEEKDVPKLDTILTSMPIDDILRKQRLLANPSMKQAMLFPQPAQPRDAFHQILNGLARKLPHPEGTFLQPGDQRLNWTAGPVGDLKPW

SEQ ID NO: 2225 - protein, 352 aa, Zea mays subsp. mays
  peptide (1)..(352): Ceres Seq. ID no. 12352006
  misc_feature (1)..(292): Pfam Name: Exostosin family Pfam Description: Exostosin family
  misc_feature (1)..(352): Homolog of NCBI NO: 18642697 NR Description: Unknown protein [Oryza sativa]
  misc_feature (12)..(352): Homolog of NCBI NO: 23821292 NR Description: pectin-glucuronyltransferase [Nicotiana
  misc_feature (1)..(352): Homolog of NCBI NO: 37531708 NR Description: unknown protein [Oryza sativa (japonica
  misc_feature (1)..(352): Homolog of NCBI NO: 34907044 NR Description: hypothetical protein~similar to Arabidopsis
  misc_feature (1)..(352): Homolog of NCBI NO: 15223522 NR Description: unknown protein; protein id: At1g27440.1
  misc_feature (1)..(352): Homolog of NCBI NO: 21592991 NR Description: unknown [Arabidopsis thaliana]
  misc_feature (1)..(352): Homolog of NCBI NO: 18424516 NR Description: putative protein
  misc_feature (1)..(352): Homolog of NCBI NO: 34907048 NR Description: contains EST D24978(R2878)~similar to Arabidopsis
  misc_feature (1)..(352): Homolog of NCBI NO: 34907046 NR Description: contains EST D39982(S1682)~similar to Arabidopsis
  misc_feature (1)..(352): Homolog of NCBI NO: 38347167 NR Description: OSJNBa0039C07.13 [Oryza sativa (japonica
MVTKDSRCLSHMFAAEIFMHRFLLSSAVRTLNPKEADWFYTPVYTTCDLTNAGLPLPFKSPRVMRSAIQYISNKWPFWNRTDGADHFFVVPHDFAACFHYQEEKAIERGILPLLRRATLVQTFGQENHVCLKEGSIIIPPYAPPQKMQAHLISPDTPRSIFVYFRGLFYDTGNDPEGGYYARGARASLWENFKSNPLFDISTDHPATYYEDMQRAVFCLCPLGWAPWSPRLVEAVVFGCIPVIIADDIVLPFADAIPWEEIGVFVEEKDVPKLDTILTSMPIDDILRKQRLLANPSMKQAMLFPQPAQPRDAFHQILNGLARKLPHPEGTFLQPGDQRLNWTAGPVGDLKPW

SEQ ID NO: 2226 - protein, 341 aa, Zea mays subsp. mays
  peptide (1)..(341): Ceres Seq. ID no. 12352007
  misc_feature (1)..(281): Pfam Name: Exostosin family Pfam Description: Exostosin family
  misc_feature (1)..(341): Homolog of NCBI NO: 18642697 NR Description: Unknown protein [Oryza sativa]
  misc_feature (1)..(341): Homolog of NCBI NO: 23821292 NR Description: pectin-glucuronyltransferase [Nicotiana
  misc_feature (1)..(341): Homolog of NCBI NO: 37531708 NR Description: unknown protein [Oryza sativa (japonica
  misc_feature (1)..(341): Homolog of NCBI NO: 34907044 NR Description: hypothetical protein~similar to Arabidopsis
  misc_feature (1)..(341): Homolog of NCBI NO: 15223522 NR Description: unknown protein; protein id: At1g27440.1
  misc_feature (1)..(341): Homolog of NCBI NO: 21592991 NR Description: unknown [Arabidopsis thaliana]
  misc_feature (1)..(341): Homolog of NCBI NO: 18424516 NR Description: putative protein
  misc_feature (1)..(341): Homolog of NCBI NO: 34907048 NR Description: contains EST D24978(R2878)~similar to Arabidopsis
  misc_feature (1)..(341): Homolog of NCBI NO: 34907046 NR Description: contains EST D39982(S1682)~similar to Arabidopsis
  misc_feature (1)..(341): Homolog of NCBI NO: 38347167 NR Description: OSJNBa0039C07.13 [Oryza sativa (japonica
MFAAEIFMHRFLLSSAVRTLNPKEADWFYTPVYTTCDLTNAGLPLPFKSPRVMRSAIQYISNKWPFWNRTDGADHFFVVPHDFAACFHYQEEKAIERGILPLLRRATLVQTFGQENHVCLKEGSIIIPPYAPPQKMQAHLISPDTPRSIFVYFRGLFYDTGNDPEGGYYARGARASLWENFKSNPLFDISTDHPATYYEDMQRAVFCLCPLGWAPWSPRLVEAVVFGCIPVIIADDIVLPFADAIPWEEIGVFVEEKDVPKLDTILTSMPIDDILRKQRLLANPSMKQAMLFPQPAQPRDAFHQILNGLARKLPHPEGTFLQPGDQRLNWTAGPVGDLKPW

SEQ ID NO: 2227 - DNA, 1446 bp, Zea mays subsp. mays
  misc_feature (1)..(1446): Ceres Seq. ID no. 12366876
  misc_feature: MA Experiment ID: 108529 Result: Up-regulated in Transcription
  misc_feature: MA Experiment 108529 PARAMETER Experiment Name: Zm_Imbibed_Seeds_P Parameter: Age (day) Value: 5 vs. 2
  misc_feature: MA Experiment 108529 PARAMETER Experiment Name: Zm_Imbibed_Seeds_P Parameter: Organism Value: Zea mays
  misc_feature: MA Experiment 108529 PARAMETER Experiment Name: Zm_Imbibed_Seeds_P Parameter: Plant Line Value: 35A19
  misc_feature: MA Experiment 108529 PARAMETER Experiment Name: Zm_Imbibed_Seeds_P Parameter: Tissue Value: Roots vs. Embryo
  misc_feature: MA Experiment ID: 108535 Result: Down-regulated in Transcription
  misc_feature: MA Experiment 108535 PARAMETER Experiment Name: Zm_Meristem_P Parameter: Age (day) Value: 8
  misc_feature: MA Experiment 108535 PARAMETER Experiment Name: Zm_Meristem_P Parameter: Organism Value: Zea mays
  misc_feature: MA Experiment 108535 PARAMETER Experiment Name: Zm_Meristem_P Parameter: Plant Line Value: 35A19
  misc_feature: MA Experiment 108535 PARAMETER Experiment Name: Zm_Meristem_P Parameter: Tissue Value: Root Meristem vs. Above Root Meristem
  misc_feature: MA Experiment ID: 108689 Result: Up-regulated in Transcription
  misc_feature: MA Experiment 108689 PARAMETER Experiment Name: Zm_Drought_Roots_P Parameter: Age (day) Value: 9
  misc_feature: MA Experiment 108689 PARAMETER Experiment Name: Zm_Drought_Roots_P Parameter: Organism Value: Zea mays
  misc_feature: MA Experiment 108689 PARAMETER Experiment Name: Zm_Drought_Roots_P Parameter: Plant Line Value: 35A19
  misc_feature: MA Experiment 108689 PARAMETER Experiment Name: Zm_Drought_Roots_P Parameter: Timepoint (hr) Value: 24
  misc_feature: MA Experiment 108689 PARAMETER Experiment Name: Zm_Drought_Roots_P Parameter: Tissue Value: Roots
  misc_feature: MA Experiment 108689 PARAMETER Experiment Name: Zm_Drought_Roots_P Parameter: Treatment Value: Drought vs. No Drought
  misc_feature: MA Experiment ID: 20000488 Result: Down-regulated in Transcription
  misc_feature: MA Experiment 20000488 PARAMETER Experiment Name: Zm_50mM_NH4NO3_L_to_H_P Parameter: Organism Value: Zea mays
  misc_feature: MA Experiment 20000488 PARAMETER Experiment Name: Zm_50mM_NH4NO3_L_to_H_P Parameter: Timepoint (hr) Value: 8
  misc_feature: MA Experiment 20000488 PARAMETER Experiment Name: Zm_50mM_NH4NO3_L_to_H_P Parameter: Tissue Value: Leaves
  misc_feature: MA Experiment 20000488 PARAMETER Experiment Name: Zm_50mM_NH4NO3_L_to_H_P Parameter: Treatment Value: 50mM NH4NO3 vs. 100mM Mannitol
  misc_feature: MA Experiment ID: 20000535 Result: Down-regulated in Transcription
  misc_feature: MA Experiment 20000535 PARAMETER Experiment Name: Zm_Hybrid_Seed_Dev_P Parameter: DAP Value: 30 vs. 12
  misc_feature: MA Experiment 20000535 PARAMETER Experiment Name: Zm_Hybrid_Seed_Dev_P Parameter: Organism Value: Zea mays
  misc_feature: MA Experiment 20000535 PARAMETER Experiment Name: Zm_Hybrid_Seed_Dev_P Parameter: Plant Line Value: 35A19
  misc_feature: MA Experiment 20000535 PARAMETER Experiment Name: Zm_Hybrid_Seed_Dev_P Parameter: Tissue Value: Embryo vs. Unfert Floret
gcacgagaccattacctagaacatcctaatcgaaaaaaaaaagcttcccttccttccctggaacggcaacgagacgtgggagctgggacgggcaagtagtagaaaccttctctccttccccagccaggacgccatacagaatccgacgcgatccagaagaagccaaggcctcttcagatcctcccgcctccctctgcgaggttcccagaccgagccatcgccggcgctaggctcggggatcttgtcgggtcccgtcccgtcctaccacttcgccggcgctgcgtcgccgtcactcgtcagtcaggactcaggatccccaagatggcttcttcaaacggtgaggctgagcaacaatggatagagaatatcaagtcaggaggaacagttccctgtctaccacctgaaaactgtcctaatggctgggctactcctcccggtgattcatttatggtcagaggcccagaatatcttacaaacaaggtaaaaataccaggtggagagtatcttctgaagcctctcggctttgattggatcaaaggaccagcaaaaatctgtgagatcctgaaagacagtaaccatcgagttagaaaagctatcgacgaggaggtttcacgtggtaaccggccttttgtctgggcattcaacttgcaactgcccaaggacaacttcagtgcaatattctacttcgtgtcgctggaggctatacctgaaggctcgcttatggaccagttcttgaaaggagatgatgccttccgaaactccaggcttaagttaatagcgaatattgtcaaggggccctggattgtccggacggctgtgggtgaacaggccatctgtatactggggagagccctctcatgcaagtatgttcaaggatcaaacttcatcgaagttgatgtggatatcgggtcttctatagttgcaaatgcgatcgttcatttggcatttggctatatcacaacgctaactgtagatttggcctttctcattgagagtcaaaccgagtcggagctccctgagagacttcttggagcagtaaggttttctgagttaaatccaggatcagctggtttgtttgaaaggcggtctgaagagcatcaggaaagcactcagtctcggcctgtaggattttggcagggtttctctcaactgttgaacaaccaaggcaatacaagggagccatcccctaatttacagaatactaatggaactttgcgcaaagaagaagcaaatgaggatgccaaatgattcagacccctaccattgtttcggggacaatttatcagtagatcacggcgttacaatttaccagatagtcccagggctttgtttctttgccctcacatctgctgtaaaaattataactttggccacagacaaactgcataactttgtacataaactgaatgcttcctaaatatttgttcccttatatagttatatgtg

SEQ ID NO: 2228 - protein, 308 aa, Zea mays subsp. mays
  peptide (1)..(308): Ceres Seq. ID no. 12366877
  misc_feature (110)..(249): Homolog of NCBI NO: 34897970 NR Description: hypothetical protein~similar to Arabidopsis
  misc_feature (28)..(249): Homolog of NCBI NO: 22327599 NR Description: putative protein
  misc_feature (11)..(253): Homolog of NCBI NO: 15238674 NR Description: putative protein; protein id: At5g25010.1
  misc_feature (11)..(266): Homolog of NCBI NO: 15238672 NR Description: putative protein
  misc_feature (1)..(249): Homolog of NCBI NO: 22655107 NR Description: putative protein [Arabidopsis thaliana]
  misc_feature (1)..(249): Homolog of NCBI NO: 15238248 NR Description: putative protein
  misc_feature (3)..(249): Homolog of NCBI NO: 21592409 NR Description: unknown [Arabidopsis thaliana]
  misc_feature (1)..(302): Homolog of NCBI NO: 21618178 NR Description: unknown [Arabidopsis thaliana]
  misc_feature (1)..(302): Homolog of NCBI NO: 25406892 NR Description: hypothetical protein [imported] - Arabidopsis
  misc_feature (1)..(302): Homolog of NCBI NO: 18390605 NR Description: expressed protein
MASSNGEAEQQWIENIKSGGTVPCLPPENCPNGWATPPGDSFMVRGPEYLTNKVKIPGGEYLLKPLGFDWIKGPAKICEILKDSNHRVRKAIDEEVSRGNRPFVWAFNLQLPKDNFSAIFYFVSLEAIPEGSLMDQFLKGDDAFRNSRLKLIANIVKGPWIVRTAVGEQAICILGRALSCKYVQGSNFIEVDVDIGSSIVANAIVHLAFGYITTLTVDLAFLIESQTESELPERLLGAVRFSELNPGSAGLFERRSEEHQESTQSRPVGFWQGFSQLLNNQGNTREPSPNLQNTNGTLRKEEANEDAK

SEQ ID NO: 2229 - protein, 266 aa, Zea mays subsp. mays
  peptide (1)..(266): Ceres Seq. ID no. 12366878
  misc_feature (68)..(207): Homolog of NCBI NO: 34897970 NR Description: hypothetical protein~similar to Arabidopsis
  misc_feature (1)..(207): Homolog of NCBI NO: 22327599 NR Description: putative protein
  misc_feature (1)..(211): Homolog of NCBI NO: 15238674 NR Description: putative protein; protein id: At5g25010.1
  misc_feature (1)..(224): Homolog of NCBI NO: 15238672 NR Description: putative protein
  misc_feature (1)..(207): Homolog of NCBI NO: 22655107 NR Description: putative protein [Arabidopsis thaliana]
  misc_feature (1)..(207): Homolog of NCBI NO: 15238248 NR Description: putative protein
  misc_feature (1)..(207): Homolog of NCBI NO: 21592409 NR Description: unknown [Arabidopsis thaliana]
  misc_feature (1)..(260): Homolog of NCBI NO: 21618178 NR Description: unknown [Arabidopsis thaliana]
  misc_feature (1)..(260): Homolog of NCBI NO: 25406892 NR Description: hypothetical protein [imported] - Arabidopsis
  misc_feature (1)..(260): Homolog of NCBI NO: 18390605 NR Description: expressed protein
MVRGPEYLTNKVKIPGGEYLLKPLGFDWIKGPAKICEILKDSNHRVRKAIDEEVSRGNRPFVWAFNLQLPKDNFSAIFYFVSLEAIPEGSLMDQFLKGDDAFRNSRLKLIANIVKGPWIVRTAVGEQAICILGRALSCKYVQGSNFIEVDVDIGSSIVANAIVHLAFGYITTLTVDLAFLIESQTESELPERLLGAVRFSELNPGSAGLFERRSEEHQESTQSRPVGFWQGFSQLLNNQGNTREPSPNLQNTNGTLRKEEANEDAK

SEQ ID NO: 2230 - protein, 175 aa, Zea mays subsp. mays
  peptide (1)..(175): Ceres Seq. ID no. 12366879
  misc_feature (1)..(116): Homolog of NCBI NO: 34897970 NR Description: hypothetical protein~similar to Arabidopsis
  misc_feature (1)..(116): Homolog of NCBI NO: 22327599 NR Description: putative protein
  misc_feature (1)..(120): Homolog of NCBI NO: 15238674 NR Description: putative protein; protein id: At5g25010.1
  misc_feature (1)..(133): Homolog of NCBI NO: 15238672 NR Description: putative protein
  misc_feature (1)..(116): Homolog of NCBI NO: 22655107 NR Description: putative protein [Arabidopsis thaliana]
  misc_feature (1)..(116): Homolog of NCBI NO: 15238248 NR Description: putative protein
  misc_feature (1)..(116): Homolog of NCBI NO: 21592409 NR Description: unknown [Arabidopsis thaliana]
  misc_feature (1)..(169): Homolog of NCBI NO: 21618178 NR Description: unknown [Arabidopsis thaliana]
  misc_feature (1)..(169): Homolog of NCBI NO: 25406892 NR Description: hypothetical protein [imported] - Arabidopsis
  misc_feature (1)..(169): Homolog of NCBI NO: 18390605 NR Description: expressed protein
MDQFLKGDDAFRNSRLKLIANIVKGPWIVRTAVGEQAICILGRALSCKYVQGSNFIEVDVDIGSSIVANAIVHLAFGYITTLTVDLAFLIESQTESELPERLLGAVRFSELNPGSAGLFERRSEEHQESTQSRPVGFWQGFSQLLNNQGNTREPSPNLQNTNGTLRKEEANEDAK

SEQ ID NO: 2231 - DNA, 1226 bp, Zea mays subsp. mays
  misc_feature (1)..(1226): Ceres Seq. ID no. 12352008
  misc_feature: MA Experiment ID: 108530 Result: Down-regulated in Transcription
  misc_feature: MA Experiment 108530 PARAMETER Experiment Name: Zm_Imbibed_Seeds_P Parameter: Age (day) Value: 6 vs. 2
  misc_feature: MA Experiment 108530 PARAMETER Experiment Name: Zm_Imbibed_Seeds_P Parameter: Organism Value: Zea mays
  misc_feature: MA Experiment 108530 PARAMETER Experiment Name: Zm_Imbibed_Seeds_P Parameter: Plant Line Value: 35A19
  misc_feature: MA Experiment 108530 PARAMETER Experiment Name: Zm_Imbibed_Seeds_P Parameter: Tissue Value: Aerial vs. Embryo
  misc_feature: MA Experiment ID: 108544 Result: Down-regulated in Transcription
  misc_feature: MA Experiment ID: 20000487 Result: Up-regulated in Transcription
  misc_feature: MA Experiment 20000487 PARAMETER Experiment Name: Zm_50mM_NH4NO3_L_to_H_P Parameter: Organism Value: Zea mays
  misc_feature: MA Experiment 20000487 PARAMETER Experiment Name: Zm_50mM_NH4NO3_L_to_H_P Parameter: Timepoint (hr) Value: 4
  misc_feature: MA Experiment 20000487 PARAMETER Experiment Name: Zm_50mM_NH4NO3_L_to_H_P Parameter: Tissue Value: Leaves
  misc_feature: MA Experiment 20000487 PARAMETER Experiment Name: Zm_50mM_NH4NO3_L_to_H_P Parameter: Treatment Value: 50mM NH4NO3 vs. 100mM Mannitol
  misc_feature: MA Experiment ID: 20000488 Result: Up-regulated in Transcription
  misc_feature: MA Experiment 20000488 PARAMETER Experiment Name: Zm_50mM_NH4NO3_L_to_H_P Parameter: Organism Value: Zea mays
  misc_feature: MA Experiment 20000488 PARAMETER Experiment Name: Zm_50mM_NH4NO3_L_to_H_P Parameter: Timepoint (hr) Value: 8
  misc_feature: MA Experiment 20000488 PARAMETER Experiment Name: Zm_50mM_NH4NO3_L_to_H_P Parameter: Tissue Value: Leaves
  misc_feature: MA Experiment 20000488 PARAMETER Experiment Name: Zm_50mM_NH4NO3_L_to_H_P Parameter: Treatment Value: 50mM NH4NO3 vs. 100mM Mannitol
aatttccctcgccatcctacgcctcgcgccgccgccacagcaacccttgcagccccaatcccccacggcgaccatggccggcgcgcaggagtccctctccctggtgggcacgatgcgcggccataacggcgaggtgacggcgatcgcgaccccgatcgacaactcgcctttcatcgtctcctcctcccgggacaagtccgtgctggtgtgggacctgaccaacccggtccactccaccccggaatccggcgtcaccgccgactacggcgtccccttccgccgcctcaccggccactcccacttcgtccaggacgtcgtccttagttccgacggccagttcgcactctctggctcctgggacggcgagctccgcctttgggacctctccaccggcctcaccacccgccgcttcgtcggccacgagaaggacgtcatctccgtcgccttctccgtcgacaaccgccagatcgtctccgcgtcccgcgacaagaccatcaagctctggaacactctcggcgagtgcaagtacaccatcggcggcgacctcggcggcggcgagggccacaacgggtgggtctcctgcgttaggttctccccaaacaccttccagcccaccattgtctccggatcctgggaccgcaccgtcaaggtctggaaccttaccaactgcaagctgcgctgcactctggatgggcacggtggctatgttaacgccgtcgctgtgagccccgacgggtcgctgtgcgcctccggcgggaaggacggtgttactctgctgtgggatttggctgaggggaagaggctgtactcgctggacgcgggctccatcatccactctctctgcttctcacccaaccgctactggctctgcgctgcgacgcaggactctgtcaagatctgggacctcgagtcgaagcacgttgtgcaggacctcaagcccgacatccaggtctccaagaaccagatcctgtactgtacaagcttgagctggagtgcggacggaagcaccctctacactggctacaccgatgggtctatcagggtttggaagatctccgggtacggctacgcaggctagatgttgaaatcagcttggtctaggcagtctttcgggggaaaacattgtaatgtttgtcaagtttttgatgtcgtgagctatattgtctcttcgctactttccggtcgcccaaccattttaatcttactatggaagaatcttgttttgc

SEQ ID NO: 2232 - protein, 358 aa, Zea mays subsp. mays
  peptide (1)..(358): Ceres Seq. ID no. 12352009
  misc_feature (30)..(354): Homolog of NCBI NO: 3023847 NR Description: GUANINE NUCLEOTIDE-BINDING PROTEIN BETA
  misc_feature (28)..(354): Homolog of NCBI NO: 1346110 NR Description: GUANINE NUCLEOTIDE-BINDING PROTEIN BETA
  misc_feature (28)..(354): Homolog of NCBI NO: 4589834 NR Description: LeArcA1 protein [Lycopersicon esculentum]
  misc_feature (28)..(354): Homolog of NCBI NO: 7446126 NR Description: GTP-binding protein beta chain homolog -
  misc_feature (28)..(354): Homolog of NCBI NO: 4589836 NR Description: LeArcA2 protein [Lycopersicon esculentum]
  misc_feature (25)..(358): Homolog of NCBI NO: 34911282 NR Description: guanine nucleotide-binding protein beta
ISLAILRLAPPPQQPLQPQSPTATMAGAQESLSLVGTMRGHNGEVTAIATPIDNSPFIVSSSRDKSVLVWDLTNPVHSTPESGVTADYGVPFRRLTGHSHFVQDVVLSSDGQFALSGSWDGELRLWDLSTGLTTRRFVGHEKDVISVAFSVDNRQIVSASRDKTIKLWNTLGECKYTIGGDLGGGEGHNGWVSCVRFSPNTFQPTIVSGSWDRTVKVWNLTNCKLRCTLDGHGGYVNAVAVSPDGSLCASGGKDGVTLLWDLAEGKRLYSLDAGSIIHSLCFSPNRYWLCAATQDSVKIWDLESKHVVQDLKPDIQVSKNQILYCTSLSWSADGSTLYTGYTDGSIRVWKISGYGYAG

SEQ ID NO: 2233 - protein, 334 aa, Zea mays subsp. mays
  peptide (1)..(334): Ceres Seq. ID no. 12352010
  misc_feature (6)..(330): Homolog of NCBI NO: 3023847 NR Description: GUANINE NUCLEOTIDE-BINDING PROTEIN BETA
  misc_feature (4)..(330): Homolog of NCBI NO: 1346110 NR Description: GUANINE NUCLEOTIDE-BINDING PROTEIN BETA
  misc_feature (4)..(330): Homolog of NCBI NO: 4589834 NR Description: LeArcA1 protein [Lycopersicon esculentum]
  misc_feature (4)..(330): Homolog of NCBI NO: 7446126 NR Description: GTP-binding protein beta chain homolog -
  misc_feature (4)..(330): Homolog of NCBI NO: 4589836 NR Description: LeArcA2 protein [Lycopersicon esculentum]
  misc_feature (1)..(334): Homolog of NCBI NO: 34911282 NR Description: guanine nucleotide-binding protein beta
MAGAQESLSLVGTMRGHNGEVTAIATPIDNSPFIVSSSRDKSVLVWDLTNPVHSTPESGVTADYGVPFRRLTGHSHFVQDVVLSSDGQFALSGSWDGELRLWDLSTGLTTRRFVGHEKDVISVAFSVDNRQIVSASRDKTIKLWNTLGECKYTIGGDLGGGEGHNGWVSCVRFSPNTFQPTIVSGSWDRTVKVWNLTNCKLRCTLDGHGGYVNAVAVSPDGSLCASGGKDGVTLLWDLAEGKRLYSLDAGSIIHSLCFSPNRYWLCAATQDSVKIWDLESKHVVQDLKPDIQVSKNQILYCTSLSWSADGSTLYTGYTDGSIRVWKISGYGYAG

SEQ ID NO: 2234 - protein, 321 aa, Zea mays subsp. mays
  peptide (1)..(321): Ceres Seq. ID no. 12352011
  misc_feature (1)..(317): Homolog of NCBI NO: 3023847 NR Description: GUANINE NUCLEOTIDE-BINDING PROTEIN BETA
  misc_feature (1)..(317): Homolog of NCBI NO: 1346110 NR Description: GUANINE NUCLEOTIDE-BINDING PROTEIN BETA
  misc_feature (1)..(317): Homolog of NCBI NO: 4589834 NR Description: LeArcA1 protein [Lycopersicon esculentum]
  misc_feature (1)..(317): Homolog of NCBI NO: 7446126 NR Description: GTP-binding protein beta chain homolog -
  misc_feature (1)..(317): Homolog of NCBI NO: 4589836 NR Description: LeArcA2 protein [Lycopersicon esculentum]
  misc_feature (1)..(321): Homolog of NCBI NO: 34911282 NR Description: guanine nucleotide-binding protein beta
MRGHNGEVTAIATPIDNSPFIVSSSRDKSVLVWDLTNPVHSTPESGVTADYGVPFRRLTGHSHFVQDVVLSSDGQFALSGSWDGELRLWDLSTGLTTRRFVGHEKDVISVAFSVDNRQIVSASRDKTIKLWNTLGECKYTIGGDLGGGEGHNGWVSCVRFSPNTFQPTIVSGSWDRTVKVWNLTNCKLRCTLDGHGGYVNAVAVSPDGSLCASGGKDGVTLLWDLAEGKRLYSLDAGSIIHSLCFSPNRYWLCAATQDSVKIWDLESKHVVQDLKPDIQVSKNQILYCTSLSWSADGSTLYTGYTDGSIRVWKISGYGYAG

SEQ ID NO: 2235 - DNA, 1338 bp, Zea mays subsp. mays
  misc_feature (1)..(1338): Ceres Seq. ID no. 12352016
  misc_feature: MA Experiment ID: 108523 Result: Up-regulated in Transcription
  misc_feature: MA Experiment 108523 PARAMETER Experiment Name: Zm_42deg_Heat_P Parameter: Age (day) Value: 8
  misc_feature: MA Experiment 108523 PARAMETER Experiment Name: Zm_42deg_Heat_P Parameter: Organism Value: Zea mays
  misc_feature: MA Experiment 108523 PARAMETER Experiment Name: Zm_42deg_Heat_P Parameter: Plant Line Value: 35A19
  misc_feature: MA Experiment 108523 PARAMETER Experiment Name: Zm_42deg_Heat_P Parameter: Temperature (deg C) Value: 42 vs. 22
  misc_feature: MA Experiment 108523 PARAMETER Experiment Name: Zm_42deg_Heat_P Parameter: Timepoint (hr) Value: 6
  misc_feature: MA Experiment 108523 PARAMETER Experiment Name: Zm_42deg_Heat_P Parameter: Tissue Value: Aerial
  misc_feature: MA Experiment ID: 108535 Result: Up-regulated in Transcription
  misc_feature: MA Experiment 108535 PARAMETER Experiment Name: Zm_Meristem_P Parameter: Age (day) Value: 8
  misc_feature: MA Experiment 108535 PARAMETER Experiment Name: Zm_Meristem_P Parameter: Organism Value: Zea mays
  misc_feature: MA Experiment 108535 PARAMETER Experiment Name: Zm_Meristem_P Parameter: Plant Line Value: 35A19
  misc_feature: MA Experiment 108535 PARAMETER Experiment Name: Zm_Meristem_P Parameter: Tissue Value: Root Meristem vs. Above Root Meristem
  misc_feature: MA Experiment ID: 108544 Result: Down-regulated in Transcription
  misc_feature: MA Experiment ID: 20000487 Result: Up-regulated in Transcription
  misc_feature: MA Experiment 20000487 PARAMETER Experiment Name: Zm_50mM_NH4NO3_L_to_H_P Parameter: Organism Value: Zea mays
  misc_feature: MA Experiment 20000487 PARAMETER Experiment Name: Zm_50mM_NH4NO3_L_to_H_P Parameter: Timepoint (hr) Value: 4
  misc_feature: MA Experiment 20000487 PARAMETER Experiment Name: Zm_50mM_NH4NO3_L_to_H_P Parameter: Tissue Value: Leaves
  misc_feature: MA Experiment 20000487 PARAMETER Experiment Name: Zm_50mM_NH4NO3_L_to_H_P Parameter: Treatment Value: 50mM NH4NO3 vs. 100mM Mannitol
tcaagcttaataaaaggttgctccgctcagctgccctctgcgcctcataaccgaaaaaacccaaagtcacgtttcctcctcaacaaaaaccctcgcaaaaatctgggatctatctagaagcaccactcaacaaaccctaggttgcctgatcggctgatcgctccatggcgatcatctccgacttcaaggacgacgaggcaccggagcagcagctggcggcccggcccacggcgtcgaggaggccctcgtggcggcgttggagaggagcggcggcgcgctccccttcctacaggcggctatcgatgtcgcccaccgcaggtccggcctgttccgcgacccttcggcggtgagcaaggtcaccgcgatggcggcggcagccagggcgcagatcgaagccgaggagagggtgaccagagaggcggaggccaagaggaaggcggaggaggacgagaggaaggcggaagccgaggcgcagagggctgccaaggaggcggtaatggcgacggcagaggagaagccagagagcacggtggagaaggacatcatggaggtggataagaaggaggaagccaacgtgagacaaccaaatgctggcaatggtcttgacttggagaagtactcgtggactcaacagttgccagaggttaacatcaccattcctgttcctcaaggaacaaaatcaagatttgtggtatttgatttaaagaagaaccatctgaaggttggtctgaagggccagccacctatcattgatggtgagctctataagccagttaaggttgatgactgcttctggagcatagaggatgggagaaccctgtccatattgcttacaaagcatgaccaaatggaatggtggaagtctgttataaagggtgatcctgaagttgatacccaaaaggtggaacctgagaacagtaaactctctgatttggatcctgagactagacaaactgtggaaaagatgatgtttgaccagcgctagaagcagatgggccttccaacaagtgatgaaatgcaaaagcaagaaattctcaagaagttcatgtctgagcacccggagatggacttctctagagcgaaattagattgaggatgtgtttgaccatttgtctgaatgcgttattagtatgaaacattttttgatcagtttgcatgtaatgcgtcagaaatatctggagatagacttctctagagcgaaaatagcttgaggatgtgttcggccagttatttctaccagtgtgcattaggttgtctgagtgcgttattagtatgaaacaaaaattttgatcagttcacgtgtaatcgtcagaaatatccggagatggacttctctag

SEQ ID NO: 2236 - protein, 206 aa, Zea mays subsp. mays
  peptide (1)..(206): Ceres Seq. ID no. 12352017
  misc_feature (75)..(206): Pfam Name: Nuclear movement protein Pfam Description: Nuclear movement protein
  misc_feature (1)..(206): Homolog of NCBI NO: 8394272 NR Description: nuclear distribution gene C homolog [Rattus
  misc_feature (1)..(206): Homolog of NCBI NO: 8101760 NR Description: putative nuclear movement protein PNUDC
  misc_feature (1)..(206): Homolog of NCBI NO: 6754910 NR Description: nuclear distribution gene C homolog (Aspergillus)
  misc_feature (1)..(206): Homolog of NCBI NO: 15234308 NR Description: putative protein; protein id: At4g27890.1
  misc_feature (1)..(206): Homolog of NCBI NO: 12052969 NR Description: hypothetical protein [Homo sapiens]
  misc_feature (1)..(206): Homolog of NCBI NO: 5729953 NR Description: nuclear distribution gene C homolog (A. nidulans)
  misc_feature (1)..(206): Homolog of NCBI NO: 28279157 NR Description: Similar to nuclear distribution gene C homolog
  misc_feature (1)..(206): Homolog of NCBI NO: 15238732 NR Description: putative protein
  misc_feature (1)..(206): Homolog of NCBI NO: 21593329 NR Description: unknown [Arabidopsis thaliana]
  misc_feature (1)..(206): Homolog of NCBI NO: 30524691 NR Description: salt tolerance protein 5 [Beta vulgaris]
MAAAARAQIEAEERVTREAEAKRKAEEDERKAEAEAQRAAKEAVMATAEEKPESTVEKDIMEVDKKEEANVRQPNAGNGLDLEKYSWTQQLPEVNITIPVPQGTKSRFVVFDLKKNHLKVGLKGQPPIIDGELYKPVKVDDCFWSIEDGRTLSILLTKHDQMEWWKSVIKGDPEVDTQKVEPENSKLSDLDPETRQTVEKMMFDQR

SEQ ID NO: 2237 - protein, 162 aa, Zea mays subsp. mays
  peptide (1)..(162): Ceres Seq. ID no. 12352018
  misc_feature (31)..(162): Pfam Name: Nuclear movement protein Pfam Description: Nuclear movement protein
  misc_feature (1)..(162): Homolog of NCBI NO: 28279157 NR Description: Similar to nuclear distribution gene C homolog
  misc_feature (1)..(162): Homolog of NCBI NO: 12052969 NR Description: hypothetical protein [Homo sapiens]
  misc_feature (1)..(162): Homolog of NCBI NO: 5729953 NR Description: nuclear distribution gene C homolog (A. nidulans)
  misc_feature (1)..(162): Homolog of NCBI NO: 8394272 NR Description: nuclear distribution gene C homolog [Rattus
  misc_feature (1)..(162): Homolog of NCBI NO: 8101760 NR Description: putative nuclear movement protein PNUDC
  misc_feature (1)..(162): Homolog of NCBI NO: 6754910 NR Description: nuclear distribution gene C homolog (Aspergillus)
  misc_feature (1)..(162): Homolog of NCBI NO: 15234308 NR Description: putative protein; protein id: At4g27890.1
  misc_feature (1)..(162): Homolog of NCBI NO: 15238732 NR Description: putative protein
  misc_feature (1)..(162): Homolog of NCBI NO: 21593329 NR Description: unknown [Arabidopsis thaliana]
  misc_feature (1)..(162): Homolog of NCBI NO: 30524691 NR Description: salt tolerance protein 5 [Beta vulgaris]
MATAEEKPESTVEKDIMEVDKKEEANVRQPNAGNGLDLEKYSWTQQLPEVNITIPVPQGTKSRFVVFDLKKNHLKVGLKGQPPIIDGELYKPVKVDDCFWSIEDGRTLSILLTKHDQMEWWKSVIKGDPEVDTQKVEPENSKLSDLDPETRQTVEKMMFDQR

SEQ ID NO: 2238 - protein, 146 aa, Zea mays subsp. mays
  peptide (1)..(146): Ceres Seq. ID no. 12352019
  misc_feature (15)..(146): Pfam Name: Nuclear movement protein Pfam Description: Nuclear movement protein
  misc_feature (1)..(146): Homolog of NCBI NO: 28279157 NR Description: Similar to nuclear distribution gene C homolog
  misc_feature (1)..(146): Homolog of NCBI NO: 12052969 NR Description: hypothetical protein [Homo sapiens]
  misc_feature (1)..(146): Homolog of NCBI NO: 5729953 NR Description: nuclear distribution gene C homolog (A. nidulans)
  misc_feature (1)..(146): Homolog of NCBI NO: 8394272 NR Description: nuclear distribution gene C homolog [Rattus
  misc_feature (1)..(146): Homolog of NCBI NO: 8101760 NR Description: putative nuclear movement protein PNUDC
  misc_feature (1)..(146): Homolog of NCBI NO: 6754910 NR Description: nuclear distribution gene C homolog (Aspergillus)
  misc_feature (1)..(146): Homolog of NCBI NO: 15234308 NR Description: putative protein; protein id: At4g27890.1
  misc_feature (1)..(146): Homolog of NCBI NO: 15238732 NR Description: putative protein
  misc_feature (1)..(146): Homolog of NCBI NO: 21593329 NR Description: unknown [Arabidopsis thaliana]
  misc_feature (1)..(146): Homolog of NCBI NO: 30524691 NR Description: salt tolerance protein 5 [Beta vulgaris]
MEVDKKEEANVRQPNAGNGLDLEKYSWTQQLPEVNITIPVPQGTKSRFVVFDLKKNHLKVGLKGQPPIIDGELYKPVKVDDCFWSIEDGRTLSILLTKHDQMEWWKSVIKGDPEVDTQKVEPENSKLSDLDPETRQTVEKMMFDQR

SEQ ID NO: 2239 - DNA, 1421 bp, Zea mays subsp. mays
  misc_feature (1)..(1421): Ceres Seq. ID no. 12410851
  misc_feature: MA Experiment ID: 108528 Result: Up-regulated in Transcription
  misc_feature: MA Experiment 108528 PARAMETER Experiment Name: Zm_Imbibed_Seeds_P Parameter: Age (day) Value: 5 vs. 2
  misc_feature: MA Experiment 108528 PARAMETER Experiment Name: Zm_Imbibed_Seeds_P Parameter: Organism Value: Zea mays
  misc_feature: MA Experiment 108528 PARAMETER Experiment Name: Zm_Imbibed_Seeds_P Parameter: Plant Line Value: 35A19
  misc_feature: MA Experiment 108528 PARAMETER Experiment Name: Zm_Imbibed_Seeds_P Parameter: Tissue Value: Aerial vs. Embryo
  misc_feature: MA Experiment ID: 108530 Result: Up-regulated in Transcription
  misc_feature: MA Experiment 108530 PARAMETER Experiment Name: Zm_Imbibed_Seeds_P Parameter: Age (day) Value: 6 vs. 2
  misc_feature: MA Experiment 108530 PARAMETER Experiment Name: Zm_Imbibed_Seeds_P Parameter: Organism Value: Zea mays
  misc_feature: MA Experiment 108530 PARAMETER Experiment Name: Zm_Imbibed_Seeds_P Parameter: Plant Line Value: 35A19
  misc_feature: MA Experiment 108530 PARAMETER Experiment Name: Zm_Imbibed_Seeds_P Parameter: Tissue Value: Aerial vs. Embryo
  misc_feature: MA Experiment ID: 108535 Result: Down-regulated in Transcription
  misc_feature: MA Experiment 108535 PARAMETER Experiment Name: Zm_Meristem_P Parameter: Age (day) Value: 8
  misc_feature: MA Experiment 108535 PARAMETER Experiment Name: Zm_Meristem_P Parameter: Organism Value: Zea mays
  misc_feature: MA Experiment 108535 PARAMETER Experiment Name: Zm_Meristem_P Parameter: Plant Line Value: 35A19
  misc_feature: MA Experiment 108535 PARAMETER Experiment Name: Zm_Meristem_P Parameter: Tissue Value: Root Meristem vs. Above Root Meristem
  misc_feature: MA Experiment ID: 108545 Result: Up-regulated in Transcription
  misc_feature: MA Experiment 108545 PARAMETER Experiment Name: Zm_Imbibed_Seeds_P Parameter: Age (day) Value: 3 vs. 2
  misc_feature: MA Experiment 108545 PARAMETER Experiment Name: Zm_Imbibed_Seeds_P Parameter: Organism Value: Zea mays
  misc_feature: MA Experiment 108545 PARAMETER Experiment Name: Zm_Imbibed_Seeds_P Parameter: Plant Line Value: 35A19
  misc_feature: MA Experiment 108545 PARAMETER Experiment Name: Zm_Imbibed_Seeds_P Parameter: Tissue Value: Aerial vs. Embryo
  misc_feature: MA Experiment ID: 108547 Result: Up-regulated in Transcription
  misc_feature: MA Experiment 108547 PARAMETER Experiment Name: Zm_Imbibed_Seeds_P Parameter: Age (day) Value: 4 vs. 2
  misc_feature: MA Experiment 108547 PARAMETER Experiment Name: Zm_Imbibed_Seeds_P Parameter: Organism Value: Zea mays
  misc_feature: MA Experiment 108547 PARAMETER Experiment Name: Zm_Imbibed_Seeds_P Parameter: Plant Line Value: 35A19
  misc_feature: MA Experiment 108547 PARAMETER Experiment Name: Zm_Imbibed_Seeds_P Parameter: Tissue Value: Aerial vs. Embryo
  misc_feature: MA Experiment ID: 108687 Result: Down-regulated in Transcription
  misc_feature: MA Experiment 108687 PARAMETER Experiment Name: Zm_Embryos-Flowers__P Parameter: Tissue Value: Embryo vs. Aerial+
  misc_feature: MA Experiment ID: 108688 Result: Down-regulated in Transcription
  misc_feature: MA Experiment 108688 PARAMETER Experiment Name: Zm_Embryos-Flowers__P Parameter: Tissue Value: Immature Flowers vs. Aerial+
  misc_feature: MA Experiment ID: 20000108 Result: Down-regulated in Transcription
  misc_feature: MA Experiment 20000108 PARAMETER Experiment Name: Zm_Root-Tips_P Parameter: Age (day) Value: 12
  misc_feature: MA Experiment 20000108 PARAMETER Experiment Name: Zm_Root-Tips_P Parameter: Organism Value: Zea mays
  misc_feature: MA Experiment 20000108 PARAMETER Experiment Name: Zm_Root-Tips_P Parameter: Tissue Value: Root tips vs. Root mid region    35
  misc_feature: MA Experiment 20000108 PARAMETER Experiment Name: Zm_Root-Tips_P Parameter: Tissue Value: Root tips vs. Root mid region   Sequence Listing-Misc Features (4)
  misc_feature: MA Experiment ID: 20000492 Result: Down-regulated in Transcription
  misc_feature: MA Experiment 20000492 PARAMETER Experiment Name: Zm_Hybrid_Seed_Dev_P Parameter: DAP Value: 12
  misc_feature: MA Experiment 20000492 PARAMETER Experiment Name: Zm_Hybrid_Seed_Dev_P Parameter: Organism Value: Zea mays
  misc_feature: MA Experiment 20000492 PARAMETER Experiment Name: Zm_Hybrid_Seed_Dev_P Parameter: Plant Line Value: 35A19
  misc_feature: MA Experiment 20000492 PARAMETER Experiment Name: Zm_Hybrid_Seed_Dev_P Parameter: Tissue Value: Fert Kernel vs. Unfert Floret
  misc_feature: MA Experiment ID: 20000535 Result: Down-regulated in Transcription
  misc_feature: MA Experiment 20000535 PARAMETER Experiment Name: Zm_Hybrid_Seed_Dev_P Parameter: DAP Value: 30 vs. 12
  misc_feature: MA Experiment 20000535 PARAMETER Experiment Name: Zm_Hybrid_Seed_Dev_P Parameter: Organism Value: Zea mays
  misc_feature: MA Experiment 20000535 PARAMETER Experiment Name: Zm_Hybrid_Seed_Dev_P Parameter: Plant Line Value: 35A19
  misc_feature: MA Experiment 20000535 PARAMETER Experiment Name: Zm_Hybrid_Seed_Dev_P Parameter: Tissue Value: Embryo vs. Unfert Floret
atcgctgcgatttcttgtggcccggcggctccagccccacggctgccgagcggataacgaacgactggcggcggctcgcgtcggccttcctcctctccttctctctcctcgcatcgcagtcgcagcaggcaacaaaccaaatcgcttaccgcccccgaagcgtctcggttcgcatagcagagctgctcttgcaacaagccaaacaacccagtggctgctagccgagacaggggatagattgagagaggcgcgcagatggcgacgccgtcgtcgtcgctttgctccagcttcgcctccctgcggaccgcctccatcggccacccccgtggcatcgcctcctccacgcccaggaaggcattccatgtgagggcatcagctcgggttgacaagttctcaaagagtgacatcatcgtgtccccttcgattctgtctgcaaactttgcgaagcttggtgatcaggtaaaagctgtggaggtggcaggatgcgactggattcatgttgatgtcatggatgggcgctttgtgccaaacatcacaattggacccttggttgttgatgctctgcgtccagtgactgatcttccgttggatgtacatctgatgattgtggaacctgagcagcgagtccctgattttatcaaggcaggtgctgatattgttagtgtccactgtgaacagacatcgaccatccatttgcaccgaacagtcaatcagattaaaagtctaggagcaaaggcaggagttgttttgaatccagcgactccactcactgcaattgattacgttcttgatttgttgacctggtgctgattatgtctgtgaatcctgggtttggtggccagagctttatcgagagtcaagtaaagaaaattgcagaactgagaaggttatgtgcagagaagggagtgaacccctggattgaggttgatggtggtgttggtccgaaaaatgcctacaaggttattgaagctggcgcaaatgccattgtcgcaggttctgcagtttttggggctccagactacgctgaagctatcaaaggaataaagaccagccaaagacctctagctgtagccgcataaagagctggacgtgtaatcatttactctgtgcaagtttaccagtgatgcgatctgtatagatgtgtgtcttgtccagctatacgtataccggagatgaaaggagacggaggcagtgaagaaatatccttttttttcttctcatttttcacgaggatgccgtgcactgctcccagaatgctgtgtccaatttacaaacgcacaggtggcacatgaactagcagagtagctttctcttgaaaggaaactgtatttggggtcgatgaaccctctggtgttattcttcagactggtaaacgatgtaacatgtttgataatcaataaagtgcgtcgtatggctttcct

SEQ ID NO: 2240 - protein, 184 aa, Zea mays subsp. mays
  peptide (1)..(184): Ceres Seq. ID no. 12410852
  misc_feature (52)..(181): Pfam Name: Ribulose-phosphate 3 epimerase family Pfam Description: Ribulose-phosphate 3 epimerase family
  misc_feature (47)..(180): Homolog of NCBI NO: 17228277 NR Description: ribulose-phosphate 3-epimerase [Nostoc sp. PCC
  misc_feature (39)..(181): Homolog of NCBI NO: 3264792 NR Description: ribulose-phosphate 3-epimerase mature form
  misc_feature (19)..(181): Homolog of NCBI NO: 3264790 NR Description: ribulose-phosphate 3-epimerase transit form
  misc_feature (19)..(181): Homolog of NCBI NO: 2833386 NR Description: Ribulose-phosphate 3-epimerase, chloroplast
  misc_feature (41)..(179): Homolog of NCBI NO: 4930130 NR Description: Chain A, D-Ribulose-5-Phosphate 3-Epimerase From
  misc_feature (1)..(181): Homolog of NCBI NO: 15240250 NR Description: ribulose-5-phosphate-3-epimerase
  misc_feature (15)..(179): Homolog of NCBI NO: 2499728 NR Description: Ribulose-phosphate 3-epimerase, chloroplast
  misc_feature (1)..(181): Homolog of NCBI NO: 20339362 NR Description: ribulose-5-phosphate-3-epimerase [Pisum sativum]
  misc_feature (1)..(181): Homolog of NCBI NO: 6647761 NR Description: Ribulose-phosphate 3-epimerase, chloroplast
  misc_feature (1)..(181): Homolog of NCBI NO: 19071636 NR Description: ribulose-5-phosphate-3-epimerase
MATPSSSLCSSFASLRTASIGHPRGIASSTPRKAFHVRASARVDKFSKSDIIVSPSILSANFAKLGDQVKAVEVAGCDWIHVDVMDGRFVPNITIGPLVVDALRPVTDLPLDVHLMIVEPEQRVPDFIKAGADIVSVHCEQTSTIHLHRTVNQIKSLGAKAGVVLNPATPLTAIDYVLDLLTWC

SEQ ID NO: 2241 - protein, 121 aa, Zea mays subsp. mays
  peptide (1)..(121): Ceres Seq. ID no. 12410853
SLRFLVARRLQPHGCRADNERLAAARVGLPPLLLSPRIAVAAGNKPNRLPPPKRLGSHSRAALATSQTTQWLLAETGDRLREARRWRRRRRRFAPASPPCGPPPSATPVASPPPRPGRHSM

SEQ ID NO: 2242 - protein, 100 aa, Zea mays subsp. mays
  peptide (1)..(100): Ceres Seq. ID no. 12410854
  misc_feature (1)..(97): Pfam Name: Ribulose-phosphate 3 epimerase family Pfam Description: Ribulose-phosphate 3 epimerase family
  misc_feature (1)..(96): Homolog of NCBI NO: 17228277 NR Description: ribulose-phosphate 3-epimerase [Nostoc sp. PCC
  misc_feature (1)..(97): Homolog of NCBI NO: 3264792 NR Description: ribulose-phosphate 3-epimerase mature form
  misc_feature (1)..(97): Homolog of NCBI NO: 3264790 NR Description: ribulose-phosphate 3-epimerase transit form
  misc_feature (1)..(97): Homolog of NCBI NO: 2833386 NR Description: Ribulose-phosphate 3-epimerase, chloroplast
  misc_feature (1)..(95): Homolog of NCBI NO: 4930130 NR Description: Chain A, D-Ribulose-5-Phosphate 3-Epimerase From
  misc_feature (1)..(97): Homolog of NCBI NO: 15240250 NR Description: ribulose-5-phosphate-3-epimerase
  misc_feature (1)..(95): Homolog of NCBI NO: 2499728 NR Description: Ribulose-phosphate 3-epimerase, chloroplast
  misc_feature (1)..(97): Homolog of NCBI NO: 20339362 NR Description: ribulose-5-phosphate-3-epimerase [Pisum sativum]
  misc_feature (1)..(97): Homolog of NCBI NO: 6647761 NR Description: Ribulose-phosphate 3-epimerase, chloroplast
  misc_feature (1)..(97): Homolog of NCBI NO: 19071636 NR Description: ribulose-5-phosphate-3-epimerase
MDGRFVPNITIGPLVVDALRPVTDLPLDVHLMIVEPEQRVPDFIKAGADIVSVHCEQTSTIHLHRTVNQIKSLGAKAGVVLNPATPLTAIDYVLDLLTWC

SEQ ID NO: 2243 - DNA, 1520 bp, Zea mays subsp. mays
  misc_feature (1)..(1520): Ceres Seq. ID no. 12405811
  misc_feature: MA Experiment ID: 20000492 Result: Up-regulated in Transcription
  misc_feature: MA Experiment 20000492 PARAMETER Experiment Name: Zm_Hybrid_Seed_Dev_P Parameter: DAP Value: 12
  misc_feature: MA Experiment 20000492 PARAMETER Experiment Name: Zm_Hybrid_Seed_Dev_P Parameter: Organism Value: Zea mays
  misc_feature: MA Experiment 20000492 PARAMETER Experiment Name: Zm_Hybrid_Seed_Dev_P Parameter: Plant Line Value: 35A19
  misc_feature: MA Experiment 20000492 PARAMETER Experiment Name: Zm_Hybrid_Seed_Dev_P Parameter: Tissue Value: Fert Kernel vs. Unfert Floret
actccactctccagtctccaccttttgctgtcgccttcctccccttgccttccctgtgccctcccctccctcgcgccgcaaaaaacgccgcagggaggaagagagagagagagggccaggctgagcttactggcggcgagctggagaagaaggaaggagcatggccatgccggcggcgctgcttctcttcctcctagtcctctccgccttcgaggccggggagcttccacgctgctcggctgctgctgcaggtaaaccggcagtcctcgtccatgatgacttgagtccggttcaagacaccagccccatcgcaacagtcccctccacgaacccgtcgcccgccatcatcaccgtgccttccacgaatcccaccatcaccatcccttccttgaaccctctgcctacacccatcacagccccctcaacaaacatcccttctccttccaccatgctgccgccggttccggtcatatatccgctgccaacgccgtctatgtcctccccaccagctgtgccggtcaccaatcctgctgtcaccacgccttccacgtcccctccgtcgacaccaacaccattcaacaacccaccattgttgaacccaacgccgacccctgctcctacagtcacggccccagctgcttctggccggcaggtctggtgtgtggccaaggctgctggctcaagtgaagccgcgctccagaacgcgttggactatgcgtgcggcattggaggagtagattgttcggcgattcagccgtcagggagctgctactatccaaataccatccaagcccatgcatcctacgcgttcaacacttattaccagagaaaccctgtttcttccagctgcgactttggggggacggcaatgctcgtcactgctaatccaagctctgggagctgtgtctttgcatcatcattgccatcgtcgtcaagctctactgttggatatgatcccgcgtccacggctactccattgtcaccgtcgtctggttccgactcgggagcacccgtgctgaatgccagtggggcaggttcttctgaatcatcagattttggctttgacatcccaggagctgtcaatttcggcagcggttggaggtcagtctcaccacccaactggccctgggcagccctggtctggattctagtagcattgtgtgtgcacaaagaagggatggtctgaacctgtgagagcatctgcagtattttggagacagattgcaaagtagccaggtggtgtagagaccagtagagagctacaaagctagagaatcgggccttagcatggctaagtttgtcgatgtatgtgtgaagtatggtgctccagttcgtagtaggaactgatgtagtcctgatggatggacttggactcaccctgatcagtcactcaggtactctgaagtgtagatgtaggcatgtagctgctgctagtagtagtagtaatgcaagtactgctttgcctcgtatgggtgagtgagttgaacaactaatggaatgcaaatgtgctgttttgtttt

SEQ ID NO: 2244 - protein, 341 aa, Zea mays subsp. mays
  peptide (1)..(341): Ceres Seq. ID no. 12405812
  misc_feature (26)..(312): Pfam Name: Herpes virus major outer envelope glycoprotein (BLLF1) Pfam Description: Herpes virus major outer envelope glycoprotein
  misc_feature (147)..(252): Homolog of NCBI NO: 29465664 NR Description: allergen Ole e 10 [Olea europaea]
  misc_feature (161)..(298): Homolog of NCBI NO: 22328593 NR Description: glycosyl hydrolase family 17; protein id:
  misc_feature (166)..(260): Homolog of NCBI NO: 34393393 NR Description: putative glycosyl hydrolase
  misc_feature (65)..(249): Homolog of NCBI NO: 37533178 NR Description: hypothetical protein [Oryza sativa (japonica
  misc_feature (57)..(253): Homolog of NCBI NO: 15240743 NR Description: glycosyl hydrolase family 17; protein id:
  misc_feature (40)..(244): Homolog of NCBI NO: 15219387 NR Description: hypothetical protein; protein id: At1g79480.1
  misc_feature (107)..(321): Homolog of NCBI NO: 34912962 NR Description: beta-1,3 glucanase-like protein
  misc_feature (57)..(244): Homolog of NCBI NO: 25402549 NR Description: hypothetical protein [imported] - Arabidopsis
  misc_feature (57)..(285): Homolog of NCBI NO: 22329437 NR Description: unknown protein; protein id: At1g09460.1
  misc_feature (1)..(318): Homolog of NCBI NO: 40714691 NR Description: putative glucanase [Oryza sativa (japonica
MAMPAALLLFLLVLSAFEAGELPRCSAAAAGKPAVLVHDDLSPVQDTSPIATVPSTNPSPAIITVPSTNPTITIPSLNPLPTPITAPSTNIPSPSTMLPPVPVIYPLPTPSMSSPPAVPVTNPAVTTPSTSPPSTPTPFNNPPLLNPTPTPAPTVTAPAASGRQVWCVAKAAGSSEAALQNALDYACGIGGVDCSAIQPSGSCYYPNTIQAHASYAFNTYYQRNPVSSSCDFGGTAMLVTANPSSGSCVFASSLPSSSSSTVGYDPASTATPLSPSSGSDSGAPVLNASGAGSSESSDFGFDIPGAVNFGSGWRSVSPPNWPWAALVWILVALCVHKEGMV

SEQ ID NO: 2245 - protein, 339 aa, Zea mays subsp. mays
  peptide (1)..(339): Ceres Seq. ID no. 12405813
  misc_feature (24)..(310): Pfam Name: Herpes virus major outer envelope glycoprotein (BLLF1) Pfam Description: Herpes virus major outer envelope glycoprotein
  misc_feature (145)..(250): Homolog of NCBI NO: 29465664 NR Description: allergen Ole e 10 [Olea europaea]
  misc_feature (159)..(296): Homolog of NCBI NO: 22328593 NR Description: glycosyl hydrolase family 17; protein id:
  misc_feature (164)..(258): Homolog of NCBI NO: 34393393 NR Description: putative glycosyl hydrolase
  misc_feature (63)..(247): Homolog of NCBI NO: 37533178 NR Description: hypothetical protein [Oryza sativa (japonica
  misc_feature (55)..(251): Homolog of NCBI NO: 15240743 NR Description: glycosyl hydrolase family 17; protein id:
  misc_feature (38)..(242): Homolog of NCBI NO: 15219387 NR Description: hypothetical protein; protein id: At1g79480.1
  misc_feature (105)..(319): Homolog of NCBI NO: 34912962 NR Description: beta-1,3 glucanase-like protein
  misc_feature (55)..(242): Homolog of NCBI NO: 25402549 NR Description: hypothetical protein [imported] - Arabidopsis
  misc_feature (55)..(283): Homolog of NCBI NO: 22329437 NR Description: unknown protein; protein id: At1g09460.1
  misc_feature (1)..(316): Homolog of NCBI NO: 40714691 NR Description: putative glucanase [Oryza sativa (japonica
MPAALLLFLLVLSAFEAGELPRCSAAAAGKPAVLVHDDLSPVQDTSPIATVPSTNPSPAIITVPSTNPTITIPSLNPLPTPITAPSTNIPSPSTMLPPVPVIYPLPTPSMSSPPAVPVTNPAVTTPSTSPPSTPTPFNNPPLLNPTPTPAPTVTAPAASGRQVWCVAKAAGSSEAALQNALDYACGIGGVDCSAIQPSGSCYYPNTIQAHASYAFNTYYQRNPVSSSCDFGGTAMLVTANPSSGSCVFASSLPSSSSSTVGYDPASTATPLSPSSGSDSGAPVLNASGAGSSESSDFGFDIPGAVNFGSGWRSVSPPNWPWAALVWILVALCVHKEGMV

SEQ ID NO: 2246 - protein, 245 aa, Zea mays subsp. mays
  peptide (1)..(245): Ceres Seq. ID no. 12405814
  misc_feature (1)..(216): Pfam Name: Herpes virus major outer envelope glycoprotein (BLLF1) Pfam Description: Herpes virus major outer envelope glycoprotein
  misc_feature (51)..(156): Homolog of NCBI NO: 29465664 NR Description: allergen Ole e 10 [Olea europaea]
  misc_feature (65)..(202): Homolog of NCBI NO: 22328593 NR Description: glycosyl hydrolase family 17; protein id:
  misc_feature (70)..(164): Homolog of NCBI NO: 34393393 NR Description: putative glycosyl hydrolase
  misc_feature (1)..(153): Homolog of NCBI NO: 37533178 NR Description: hypothetical protein [Oryza sativa (japonica
  misc_feature (1)..(157): Homolog of NCBI NO: 15240743 NR Description: glycosyl hydrolase family 17; protein id:
  misc_feature (1)..(148): Homolog of NCBI NO: 15219387 NR Description: hypothetical protein; protein id: At1g79480.1
  misc_feature (11)..(225): Homolog of NCBI NO: 34912962 NR Description: beta-1,3 glucanase-like protein
  misc_feature (1)..(148): Homolog of NCBI NO: 25402549 NR Description: hypothetical protein [imported] - Arabidopsis
  misc_feature (1)..(189): Homolog of NCBI NO: 22329437 NR Description: unknown protein; protein id: At1g09460.1
  misc_feature (1)..(222): Homolog of NCBI NO: 40714691 NR Description: putative glucanase [Oryza sativa (japonica
MLPPVPVIYPLPTPSMSSPPAVPVTNPAVTTPSTSPPSTPTPFNNPPLLNPTPTPAPTVTAPAASGRQVWCVAKAAGSSEAALQNALDYACGIGGVDCSAIQPSGSCYYPNTIQAHASYAFNTYYQRNPVSSSCDFGGTAMLVTANPSSGSCVFASSLPSSSSSTVGYDPASTATPLSPSSGSDSGAPVLNASGAGSSESSDFGFDIPGAVNFGSGWRSVSPPNWPWAALVWILVALCVHKEGMV

SEQ ID NO: 2247 - DNA, 1343 bp, Zea mays subsp. mays
  misc_feature (1)..(1343): Ceres Seq. ID no. 12413475
  misc_feature: MA Experiment ID: 108528 Result: Up-regulated in Transcription
  misc_feature: MA Experiment 108528 PARAMETER Experiment Name: Zm_Imbibed_Seeds_P Parameter: Age (day) Value: 5 vs. 2
  misc_feature: MA Experiment 108528 PARAMETER Experiment Name: Zm_Imbibed_Seeds_P Parameter: Organism Value: Zea mays
  misc_feature: MA Experiment 108528 PARAMETER Experiment Name: Zm_Imbibed_Seeds_P Parameter: Plant Line Value: 35A19
  misc_feature: MA Experiment 108528 PARAMETER Experiment Name: Zm_Imbibed_Seeds_P Parameter: Tissue Value: Aerial vs. Embryo
  misc_feature: MA Experiment ID: 108529 Result: Up-regulated in Transcription
  misc_feature: MA Experiment 108529 PARAMETER Experiment Name: Zm_Imbibed_Seeds_P Parameter: Age (day) Value: 5 vs. 2
  misc_feature: MA Experiment 108529 PARAMETER Experiment Name: Zm_Imbibed_Seeds_P Parameter: Organism Value: Zea mays
  misc_feature: MA Experiment 108529 PARAMETER Experiment Name: Zm_Imbibed_Seeds_P Parameter: Plant Line Value: 35A19
  misc_feature: MA Experiment 108529 PARAMETER Experiment Name: Zm_Imbibed_Seeds_P Parameter: Tissue Value: Roots vs. Embryo
  misc_feature: MA Experiment ID: 108530 Result: Up-regulated in Transcription
  misc_feature: MA Experiment 108530 PARAMETER Experiment Name: Zm_Imbibed_Seeds_P Parameter: Age (day) Value: 6 vs. 2
  misc_feature: MA Experiment 108530 PARAMETER Experiment Name: Zm_Imbibed_Seeds_P Parameter: Organism Value: Zea mays
  misc_feature: MA Experiment 108530 PARAMETER Experiment Name: Zm_Imbibed_Seeds_P Parameter: Plant Line Value: 35A19
  misc_feature: MA Experiment 108530 PARAMETER Experiment Name: Zm_Imbibed_Seeds_P Parameter: Tissue Value: Aerial vs. Embryo
  misc_feature: MA Experiment ID: 108535 Result: Down-regulated in Transcription
  misc_feature: MA Experiment 108535 PARAMETER Experiment Name: Zm_Meristem_P Parameter: Age (day) Value: 8
  misc_feature: MA Experiment 108535 PARAMETER Experiment Name: Zm_Meristem_P Parameter: Organism Value: Zea mays
  misc_feature: MA Experiment 108535 PARAMETER Experiment Name: Zm_Meristem_P Parameter: Plant Line Value: 35A19
  misc_feature: MA Experiment 108535 PARAMETER Experiment Name: Zm_Meristem_P Parameter: Tissue Value: Root Meristem vs. Above Root Meristem
  misc_feature: MA Experiment ID: 108543 Result: Up-regulated in Transcription
  misc_feature: MA Experiment ID: 108546 Result: Up-regulated in Transcription
  misc_feature: MA Experiment 108546 PARAMETER Experiment Name: Zm_Imbibed_Seeds_P Parameter: Age (day) Value: 3 vs. 2
  misc_feature: MA Experiment 108546 PARAMETER Experiment Name: Zm_Imbibed_Seeds_P Parameter: Organism Value: Zea mays
  misc_feature: MA Experiment 108546 PARAMETER Experiment Name: Zm_Imbibed_Seeds_P Parameter: Plant Line Value: 35A19
  misc_feature: MA Experiment 108546 PARAMETER Experiment Name: Zm_Imbibed_Seeds_P Parameter: Tissue Value: Roots vs. Embryo
  misc_feature: MA Experiment ID: 108556 Result: Down-regulated in Transcription
  misc_feature: MA Experiment 108556 PARAMETER Experiment Name: Zm_Drought_P Parameter: Age (day) Value: 9
  misc_feature: MA Experiment 108556 PARAMETER Experiment Name: Zm_Drought_P Parameter: Organism Value: Zea mays
  misc_feature: MA Experiment 108556 PARAMETER Experiment Name: Zm_Drought_P Parameter: Plant Line Value: 35A19
  misc_feature: MA Experiment 108556 PARAMETER Experiment Name: Zm_Drought_P Parameter: Timepoint (hr) Value: 24
  misc_feature: MA Experiment 108556 PARAMETER Experiment Name: Zm_Drought_P Parameter: Tissue Value: Aerial
  misc_feature: MA Experiment 108556 PARAMETER Experiment Name: Zm_Drought_P Parameter: Treatment Value: Drought vs. No Drought
  misc_feature: MA Experiment ID: 108559 Result: Down-regulated in Transcription
  misc_feature: MA Experiment 108559 PARAMETER Experiment Name: Zm_5mM_NO_P Parameter: Age (day) Value: 8
  misc_feature: MA Experiment 108559 PARAMETER Experiment Name: Zm_5mM_NO_P Parameter: Organism Value: Zea mays
  misc_feature: MA Experiment 108559 PARAMETER Experiment Name: Zm_5mM_NO_P Parameter: Plant Line Value: 35A19
  misc_feature: MA Experiment 108559 PARAMETER Experiment Name: Zm_5mM_NO_P Parameter: Timepoint (hr) Value: 12
  misc_feature: MA Experiment 108559 PARAMETER Experiment Name: Zm_5mM_NO_P Parameter: Tissue Value: Aerial
  misc_feature: MA Experiment 108559 PARAMETER Experiment Name: Zm_5mM_NO_P Parameter: Treatment Value: 5mM NO vs. No Treatment
  misc_feature: MA Experiment ID: 20000480 Result: Down-regulated in Transcription
  misc_feature: MA Experiment 20000480 PARAMETER Experiment Name: Zm_Drought_P Parameter: Age (day) Value: 11
  misc_feature: MA Experiment 20000480 PARAMETER Experiment Name: Zm_Drought_P Parameter: Organism Value: Zea mays
  misc_feature: MA Experiment 20000480 PARAMETER Experiment Name: Zm_Drought_P Parameter: Plant Line Value: 35A19
  misc_feature: MA Experiment 20000480 PARAMETER Experiment Name: Zm_Drought_P Parameter: Timepoint (hr) Value: 72
  misc_feature: MA Experiment 20000480 PARAMETER Experiment Name: Zm_Drought_P Parameter: Tissue Value: Aerial
  misc_feature: MA Experiment 20000480 PARAMETER Experiment Name: Zm_Drought_P Parameter: Treatment Value: Drought vs. No Drought
  misc_feature: MA Experiment ID: 20000492 Result: Down-regulated in Transcription
  misc_feature: MA Experiment 20000492 PARAMETER Experiment Name: Zm_Hybrid_Seed_Dev_P Parameter: DAP Value: 12
  misc_feature: MA Experiment 20000492 PARAMETER Experiment Name: Zm_Hybrid_Seed_Dev_P Parameter: Organism Value: Zea mays
  misc_feature: MA Experiment 20000492 PARAMETER Experiment Name: Zm_Hybrid_Seed_Dev_P Parameter: Plant Line Value: 35A19
  misc_feature: MA Experiment 20000492 PARAMETER Experiment Name: Zm_Hybrid_Seed_Dev_P Parameter: Tissue Value: Fert Kernel vs. Unfert Floret
  misc_feature: MA Experiment ID: 20000535 Result: Down-regulated in Transcription
  misc_feature: MA Experiment 20000535 PARAMETER Experiment Name: Zm_Hybrid_Seed_Dev_P Parameter: DAP Value: 30 vs. 12
  misc_feature: MA Experiment 20000535 PARAMETER Experiment Name: Zm_Hybrid_Seed_Dev_P Parameter: Organism Value: Zea mays
  misc_feature: MA Experiment 20000535 PARAMETER Experiment Name: Zm_Hybrid_Seed_Dev_P Parameter: Plant Line Value: 35A19
  misc_feature: MA Experiment 20000535 PARAMETER Experiment Name: Zm_Hybrid_Seed_Dev_P Parameter: Tissue Value: Embryo vs. Unfert Floret
aaacccaaacctgattaatgcctcgcctccattccgtactctcctgctgaagcttttttctctgaaactagtatatcccccatctgtttggtcccgacgattttccgctttgggagcaccaccaagctcttccagcttgcagggctggagtctttgccagggacagcaatggtgccgacgcatggcgatacagccggaccgagctccagccaggatgacccggcagccagcgtgaagaagcgcaacagcaacaggcctcagtatcatccgtttactcagcaacagcttccagcttgcaagcctatacttgcgcctcagacggtcatccctgtactcctgtttgtgggcgtagtttttatcgtgattggccttggctgcattgcagcctcaaacagggtggttgaagtggtctatgagtatgagacttcatgcataccaagacacatgcttggcaacaaagtcgcctatatccaaaacccatctatagataagacatgcacatggattctcaaggttcctagggatatgaagcacccaatctacgtatattaccagcttgacaagttctaccagaaccacaggaggtacgtgaagagccgcagcgacaagcagctgagagatcccaaggaggccaacagcacgcagcagtactgcaagcccgaagctaccaccgagcacgggagcgccgtcgtcccctgcgggctcgtggcctggagcctgttcaacgacacctacagcttcgcccggggcaacaacagggcgctgagggtccacaagcgaggcatctcgtggaggagcgagagggaacacatcttcgggaagcaggtgttcccgaggaatttccagaaaggagctctgatcggaggaggcacgcttgatccaagaatacctctgagtgagcaagaagacctgatcgtgtggatgcggaccgcggctctgccgacgttccggaagctgtacggcaggatcgaggcggacctccgcgccggcgagctggtcacggtgacgacgcagaataactacaacacctacagcttcggcgggaagaaggcgctggtgctgtccacggccggcgtgctgggaggcaggaacggcttcctcggccgcgggtacgccgtcgtcggcctggcctgcctgctgctggcgctgctcctcaccatgctctgcctcgtcttcccactgaaagaggaacaccttgcgctgcagtaccctttgctccggcctgccacggtgaccatgcatgcctagctagatcagtagacggtgtacagattgaaacagtttcttctttttcatttttgatgtatactcagattgaaacagtttgttctttttcttcttgg

SEQ ID NO: 2248 - protein, 359 aa, Zea mays subsp. mays
  peptide (1)..(359): Ceres Seq. ID no. 12413476
  misc_feature (70)..(337): Pfam Name: LEM3 (ligand-effect modulator 3) family / CDC50 family Pfam Description: LEM3 (ligand-effect modulator 3) family / CDC50
  misc_feature (35)..(337): Homolog of NCBI NO: 25347303 NR Description: protein F3O9.16 [imported] - Arabidopsis thaliana
  misc_feature (35)..(337): Homolog of NCBI NO: 25347301 NR Description: T8K14.13 [imported] - Arabidopsis thaliana
  misc_feature (4)..(337): Homolog of NCBI NO: 18399730 NR Description: membrane protein common family
  misc_feature (17)..(337): Homolog of NCBI NO: 21554054 NR Description: unknown [Arabidopsis thaliana]
  misc_feature (7)..(337): Homolog of NCBI NO: 18422638 NR Description: membrane protein common family
  misc_feature (7)..(337): Homolog of NCBI NO: 9757735 NR Description: gb|AAD25612.1~gene_id:MCL19.21~similar to unknown
  misc_feature (52)..(337): Homolog of NCBI NO: 15219220 NR Description: membrane protein common family; protein id:
  misc_feature (21)..(347): Homolog of NCBI NO: 19570056 NR Description: similar to membrane protein common family
  misc_feature (8)..(337): Homolog of NCBI NO: 18412377 NR Description: membrane protein common family
  misc_feature (4)..(337): Homolog of NCBI NO: 18404877 NR Description: membrane protein common family
MVPTHGDTAGPSSSQDDPAASVKKRNSNRPQYHPFTQQQLPACKPILAPQTVIPVLLFVGVVFIVIGLGCIAASNRVVEVVYEYETSCIPRHMLGNKVAYIQNPSIDKTCTWILKVPRDMKHPIYVYYQLDKFYQNHRRYVKSRSDKQLRDPKEANSTQQYCKPEATTEHGSAVVPCGLVAWSLFNDTYSFARGNNRALRVHKRGISWRSEREHIFGKQVFPRNFQKGALIGGGTLDPRIPLSEQEDLIVWMRTAALPTFRKLYGRIEADLRAGELVTVTTQNNYNTYSFGGKKALVLSTAGVLGGRNGFLGRGYAVVGLACLLLALLLTMLCLVFPLKEEHLALQYPLLRPATVTMHA

SEQ ID NO: 2249 - protein, 267 aa, Zea mays subsp. mays
  peptide (1)..(267): Ceres Seq. ID no. 12413477
  misc_feature (1)..(245): Pfam Name: LEM3 (ligand-effect modulator 3) family / CDC50 family Pfam Description: LEM3 (ligand-effect modulator 3) family / CDC50
  misc_feature (1)..(255): Homolog of NCBI NO: 19570056 NR Description: similar to membrane protein common family
  misc_feature (1)..(245): Homolog of NCBI NO: 21554054 NR Description: unknown [Arabidopsis thaliana]
  misc_feature (1)..(245): Homolog of NCBI NO: 15219220 NR Description: membrane protein common family; protein id:
  misc_feature (1)..(245): Homolog of NCBI NO: 18422638 NR Description: membrane protein common family
  misc_feature (1)..(245): Homolog of NCBI NO: 9757735 NR Description: gb|AAD25612.1~gene_id:MCL19.21~similar to unknown
  misc_feature (1)..(245): Homolog of NCBI NO: 25347303 NR Description: protein F3O9.16 [imported] - Arabidopsis thaliana
  misc_feature (1)..(245): Homolog of NCBI NO: 25347301 NR Description: T8K14.13 [imported] - Arabidopsis thaliana
  misc_feature (1)..(245): Homolog of NCBI NO: 18399730 NR Description: membrane protein common family
  misc_feature (1)..(245): Homolog of NCBI NO: 18412377 NR Description: membrane protein common family
  misc_feature (1)..(245): Homolog of NCBI NO: 18404877 NR Description: membrane protein common family
MLGNKVAYIQNPSIDKTCTWILKVPRDMKHPIYVYYQLDKFYQNHRRYVKSRSDKQLRDPKEANSTQQYCKPEATTEHGSAVVPCGLVAWSLFNDTYSFARGNNRALRVHKRGISWRSEREHIFGKQVFPRNFQKGALIGGGTLDPRIPLSEQEDLIVWMRTAALPTFRKLYGRIEADLRAGELVTVTTQNNYNTYSFGGKKALVLSTAGVLGGRNGFLGRGYAVVGLACLLLALLLTMLCLVFPLKEEHLALQYPLLRPATVTMHA

SEQ ID NO: 2250 - protein, 240 aa, Zea mays subsp. mays
  peptide (1)..(240): Ceres Seq. ID no. 12413478
  misc_feature (1)..(218): Pfam Name: LEM3 (ligand-effect modulator 3) family / CDC50 family Pfam Description: LEM3 (ligand-effect modulator 3) family / CDC50
  misc_feature (1)..(228): Homolog of NCBI NO: 19570056 NR Description: similar to membrane protein common family
  misc_feature (1)..(218): Homolog of NCBI NO: 21554054 NR Description: unknown [Arabidopsis thaliana]
  misc_feature (1)..(218): Homolog of NCBI NO: 15219220 NR Description: membrane protein common family; protein id:
  misc_feature (1)..(218): Homolog of NCBI NO: 18422638 NR Description: membrane protein common family
  misc_feature (1)..(218): Homolog of NCBI NO: 9757735 NR Description: gb|AAD25612.1~gene_id:MCL19.21~similar to unknown
  misc_feature (1)..(218): Homolog of NCBI NO: 25347303 NR Description: protein F3O9.16 [imported] - Arabidopsis thaliana
  misc_feature (1)..(218): Homolog of NCBI NO: 25347301 NR Description: T8K14.13 [imported] - Arabidopsis thaliana
  misc_feature (1)..(218): Homolog of NCBI NO: 18399730 NR Description: membrane protein common family
  misc_feature (1)..(218): Homolog of NCBI NO: 18412377 NR Description: membrane protein common family
  misc_feature (1)..(218): Homolog of NCBI NO: 18404877 NR Description: membrane protein common family
MKHPIYVYYQLDKFYQNHRRYVKSRSDKQLRDPKEANSTQQYCKPEATTEHGSAVVPCGLVAWSLFNDTYSFARGNNRALRVHKRGISWRSEREHIFGKQVFPRNFQKGALIGGGTLDPRIPLSEQEDLIVWMRTAALPTFRKLYGRIEADLRAGELVTVTTQNNYNTYSFGGKKALVLSTAGVLGGRNGFLGRGYAVVGLACLLLALLLTMLCLVFPLKEEHLALQYPLLRPATVTMHA

SEQ ID NO: 2251 - DNA, 1027 bp, Zea mays subsp. mays
  misc_feature (1)..(1027): Ceres Seq. ID no. 12407402
  misc_feature: MA Experiment ID: 108515 Result: Up-regulated in Transcription
  misc_feature: MA Experiment 108515 PARAMETER Experiment Name: Zm_2mM_SA_P Parameter: Age (day) Value: 8
  misc_feature: MA Experiment 108515 PARAMETER Experiment Name: Zm_2mM_SA_P Parameter: Organism Value: Zea mays
  misc_feature: MA Experiment 108515 PARAMETER Experiment Name: Zm_2mM_SA_P Parameter: Plant Line Value: 35A19
  misc_feature: MA Experiment 108515 PARAMETER Experiment Name: Zm_2mM_SA_P Parameter: Timepoint (hr) Value: 12
  misc_feature: MA Experiment 108515 PARAMETER Experiment Name: Zm_2mM_SA_P Parameter: Tissue Value: Aerial
  misc_feature: MA Experiment 108515 PARAMETER Experiment Name: Zm_2mM_SA_P Parameter: Treatment Value: 2mM SA vs. No Treatment
  misc_feature: MA Experiment ID: 108526 Result: Up-regulated in Transcription
  misc_feature: MA Experiment 108526 PARAMETER Experiment Name: Zm_5mM_NO_P Parameter: Age (day) Value: 8
  misc_feature: MA Experiment 108526 PARAMETER Experiment Name: Zm_5mM_NO_P Parameter: Organism Value: Zea mays
  misc_feature: MA Experiment 108526 PARAMETER Experiment Name: Zm_5mM_NO_P Parameter: Plant Line Value: 35A19
  misc_feature: MA Experiment 108526 PARAMETER Experiment Name: Zm_5mM_NO_P Parameter: Timepoint (hr) Value: 1
  misc_feature: MA Experiment 108526 PARAMETER Experiment Name: Zm_5mM_NO_P Parameter: Tissue Value: Aerial
  misc_feature: MA Experiment 108526 PARAMETER Experiment Name: Zm_5mM_NO_P Parameter: Treatment Value: 5mM NO vs. No Treatment
  misc_feature: MA Experiment ID: 108527 Result: Up-regulated in Transcription
  misc_feature: MA Experiment 108527 PARAMETER Experiment Name: Zm_5mM_NO_P Parameter: Age (day) Value: 8
  misc_feature: MA Experiment 108527 PARAMETER Experiment Name: Zm_5mM_NO_P Parameter: Organism Value: Zea mays
  misc_feature: MA Experiment 108527 PARAMETER Experiment Name: Zm_5mM_NO_P Parameter: Plant Line Value: 35A19
  misc_feature: MA Experiment 108527 PARAMETER Experiment Name: Zm_5mM_NO_P Parameter: Timepoint (hr) Value: 6
  misc_feature: MA Experiment 108527 PARAMETER Experiment Name: Zm_5mM_NO_P Parameter: Tissue Value: Aerial
  misc_feature: MA Experiment 108527 PARAMETER Experiment Name: Zm_5mM_NO_P Parameter: Treatment Value: 5mM NO vs. No Treatment
  misc_feature: MA Experiment ID: 108534 Result: Up-regulated in Transcription
  misc_feature: MA Experiment 108534 PARAMETER Experiment Name: Zm_4deg_Cold_P Parameter: Age (hr) Value: 8
  misc_feature: MA Experiment 108534 PARAMETER Experiment Name: Zm_4deg_Cold_P Parameter: Organism Value: Zea mays
  misc_feature: MA Experiment 108534 PARAMETER Experiment Name: Zm_4deg_Cold_P Parameter: Plant Line Value: 35A19
  misc_feature: MA Experiment 108534 PARAMETER Experiment Name: Zm_4deg_Cold_P Parameter: Temperature (deg C) Value: 4 vs. 22
  misc_feature: MA Experiment 108534 PARAMETER Experiment Name: Zm_4deg_Cold_P Parameter: Timepoint (hr) Value: 6
  misc_feature: MA Experiment 108534 PARAMETER Experiment Name: Zm_4deg_Cold_P Parameter: Tissue Value: Aerial
  misc_feature: MA Experiment ID: 108535 Result: Down-regulated in Transcription
  misc_feature: MA Experiment 108535 PARAMETER Experiment Name: Zm_Meristem_P Parameter: Age (day) Value: 8
  misc_feature: MA Experiment 108535 PARAMETER Experiment Name: Zm_Meristem_P Parameter: Organism Value: Zea mays
  misc_feature: MA Experiment 108535 PARAMETER Experiment Name: Zm_Meristem_P Parameter: Plant Line Value: 35A19
  misc_feature: MA Experiment 108535 PARAMETER Experiment Name: Zm_Meristem_P Parameter: Tissue Value: Root Meristem vs. Above Root Meristem
  misc_feature: MA Experiment ID: 108536 Result: Down-regulated in Transcription
  misc_feature: MA Experiment 108536 PARAMETER Experiment Name: Zm_Meristem_P Parameter: Age (day) Value: 8
  misc_feature: MA Experiment 108536 PARAMETER Experiment Name: Zm_Meristem_P Parameter: Organism Value: Zea mays
  misc_feature: MA Experiment 108536 PARAMETER Experiment Name: Zm_Meristem_P Parameter: Plant Line Value: 35A19
  misc_feature: MA Experiment 108536 PARAMETER Experiment Name: Zm_Meristem_P Parameter: Tissue Value: Shoot Meristem vs. Above Shoot Meristem
  misc_feature: MA Experiment ID: 108543 Result: Up-regulated in Transcription
  misc_feature: MA Experiment ID: 108556 Result: Down-regulated in Transcription
  misc_feature: MA Experiment 108556 PARAMETER Experiment Name: Zm_Drought_P Parameter: Age (day) Value: 9
  misc_feature: MA Experiment 108556 PARAMETER Experiment Name: Zm_Drought_P Parameter: Organism Value: Zea mays
  misc_feature: MA Experiment 108556 PARAMETER Experiment Name: Zm_Drought_P Parameter: Plant Line Value: 35A19
  misc_feature: MA Experiment 108556 PARAMETER Experiment Name: Zm_Drought_P Parameter: Timepoint (hr) Value: 24
  misc_feature: MA Experiment 108556 PARAMETER Experiment Name: Zm_Drought_P Parameter: Tissue Value: Aerial
  misc_feature: MA Experiment 108556 PARAMETER Experiment Name: Zm_Drought_P Parameter: Treatment Value: Drought vs. No Drought
  misc_feature: MA Experiment ID: 108559 Result: Up-regulated in Transcription
  misc_feature: MA Experiment 108559 PARAMETER Experiment Name: Zm_5mM_NO_P Parameter: Age (day) Value: 8
  misc_feature: MA Experiment 108559 PARAMETER Experiment Name: Zm_5mM_NO_P Parameter: Organism Value: Zea mays
  misc_feature: MA Experiment 108559 PARAMETER Experiment Name: Zm_5mM_NO_P Parameter: Plant Line Value: 35A19
  misc_feature: MA Experiment 108559 PARAMETER Experiment Name: Zm_5mM_NO_P Parameter: Timepoint (hr) Value: 12
  misc_feature: MA Experiment 108559 PARAMETER Experiment Name: Zm_5mM_NO_P Parameter: Tissue Value: Aerial
  misc_feature: MA Experiment 108559 PARAMETER Experiment Name: Zm_5mM_NO_P Parameter: Treatment Value: 5mM NO vs. No Treatment
  misc_feature: MA Experiment ID: 20000488 Result: Down-regulated in Transcription
  misc_feature: MA Experiment 20000488 PARAMETER Experiment Name: Zm_50mM_NH4NO3_L_to_H_P Parameter: Organism Value: Zea mays
  misc_feature: MA Experiment 20000488 PARAMETER Experiment Name: Zm_50mM_NH4NO3_L_to_H_P Parameter: Timepoint (hr) Value: 8
  misc_feature: MA Experiment 20000488 PARAMETER Experiment Name: Zm_50mM_NH4NO3_L_to_H_P Parameter: Tissue Value: Leaves
  misc_feature: MA Experiment 20000488 PARAMETER Experiment Name: Zm_50mM_NH4NO3_L_to_H_P Parameter: Treatment Value: 50mM NH4NO3 vs. 100mM Mannitol
  misc_feature: MA Experiment ID: 20000535 Result: Down-regulated in Transcription
  misc_feature: MA Experiment 20000535 PARAMETER Experiment Name: Zm_Hybrid_Seed_Dev_P Parameter: DAP Value: 30 vs. 12
  misc_feature: MA Experiment 20000535 PARAMETER Experiment Name: Zm_Hybrid_Seed_Dev_P Parameter: Organism Value: Zea mays
  misc_feature: MA Experiment 20000535 PARAMETER Experiment Name: Zm_Hybrid_Seed_Dev_P Parameter: Plant Line Value: 35A19
  misc_feature: MA Experiment 20000535 PARAMETER Experiment Name: Zm_Hybrid_Seed_Dev_P Parameter: Tissue Value: Embryo vs. Unfert Floret
  misc_feature: MA Experiment ID: 20000629 Result: Down-regulated in Transcription
  misc_feature: MA Experiment 20000629 PARAMETER Experiment Name: Zm_Herbicide-Treatments_P Parameter: Timepoint (hr) Value: 12
  misc_feature: MA Experiment 20000629 PARAMETER Experiment Name: Zm_Herbicide-Treatments_P Parameter: Tissue Value: Aerial
  misc_feature: MA Experiment 20000629 PARAMETER Experiment Name: Zm_Herbicide-Treatments_P Parameter: Treatment Value: Trimec vs. No Treatment
aatgcaggccttctccggcctcggcaccttcttcaagctctccgccgcgtccgccgtcatgctgtgcctcgagacatggtactaccagatcatcgtgctcatcgccggcctgctcaagaacccggagatctcgctcgactccctctccatatgcatgaccgtgaacgcatgggtgtttatgatctccgtgggcttcaacgccgcggcgagcgtgcgggtcgggaacgagctcggcgcgggcaacccgagggcggcgtcgttctcggtgctggtggtgacgtcgctgtcgttcgccgtgtcggcggtgtgcgccgtcgccgtgctctgcctccgcgaccagctgagctacctgttcacgggcggcgaggccgtggctcgcgccgtgtccgacctctgcccgctcctcgccctcacgctcgtcctcaacggcgtgcagccagtgctctcaggcgtcgccgtgggctgcgggtggcaggccttcgtggcgtacgtgaacgtcggctgctactacgtcgtcggcgtgccgctcggcgtcttcctcggcttctacctcgacctcggcgccaagggcatttggagcggcatggtcatcgggggaaccatgatgcagacgctcatcctgctctgggtcaccttcagaacagactggaccaaggaggtggagaacgccagggcgaggctggacaagtgggacgacaagaagcagcccctcctagcctagaagaagactgattgaaggtcactgtagcgcgcgctgatgcacctttttttggcgatgattgagagaccacaccaggcgcgcgtcggaggggatgcaacgcaacgcaacgcaatcatttgggttttgaagctatttaatattatcgcattatagagtgtgcgcgtgcagtttcgagtgattaaagttttgttacgctttcttcggtgtcagctccaacttagggcgactagatgcgaccatcacaccagggtttggaccgtggtgggtggattctattcgtttttttttaagcacaaatatgtctag

SEQ ID NO: 2252 - protein, 243 aa, Zea mays subsp. mays
  peptide (1)..(243): Ceres Seq. ID no. 12407403
NAGLLRPRHLLQALRRVRRHAVPRDMVLPDHRAHRRPAQEPGDLARLPLHMHDRERMGVYDLRGLQRRGERAGRERARRGQPEGGVVLGAGGDVAVVRRVGGVRRRRALPPRPAELPVHGRRGRGSRRVRPLPAPRPHARPQRRAASALRRRRGLRVAGLRGVRERRLLLRRRRAARRLPRLLPRPRRQGHLERHGHRGNHDADAHPALGHLQNRLDQGGGERQGEAGQVGRQEAAPPSLEED

SEQ ID NO: 2253 - protein, 239 aa, Zea mays subsp. mays
  peptide (1)..(239): Ceres Seq. ID no. 12407404
  misc_feature (3)..(189): Homolog of NCBI NO: 34901880 NR Description: putative Multidrug resistance protein norM
  misc_feature (2)..(229): Homolog of NCBI NO: 15234633 NR Description: putative protein; protein id: At4g21900.1
  misc_feature (2)..(238): Homolog of NCBI NO: 22655139 NR Description: unknown protein [Arabidopsis thaliana]
  misc_feature (2)..(238): Homolog of NCBI NO: 15221073 NR Description: unknown protein; protein id: At1g11670.1
  misc_feature (2)..(237): Homolog of NCBI NO: 21553843 NR Description: unknown [Arabidopsis thaliana]
  misc_feature (2)..(237): Homolog of NCBI NO: 18415793 NR Description: putative protein; protein id: At4g21910.1
  misc_feature (2)..(238): Homolog of NCBI NO: 15081773 NR Description: At1g61890/F8K4_9 [Arabidopsis thaliana]
  misc_feature (2)..(238): Homolog of NCBI NO: 18407368 NR Description: expressed protein
  misc_feature (1)..(238): Homolog of NCBI NO: 20466556 NR Description: integral membrane protein, putative [Arabidopsis
  misc_feature (1)..(238): Homolog of NCBI NO: 15233127 NR Description: integral membrane protein, putative
MQAFSGLGTFFKLSAASAVMLCLETWYYQIIVLIAGLLKNPEISLDSLSICMTVNAWVFMISVGFNAAASVRVGNELGAGNPRAASFSVLVVTSLSFAVSAVCAVAVLCLRDQLSYLFTGGEAVARAVSDLCPLLALTLVLNGVQPVLSGVAVGCGWQAFVAYVNVGCYYVVGVPLGVFLGFYLDLGAKGIWSGMVIGGTMMQTLILLWVTFRTDWTKEVENARARLDKWDDKKQPLLA

SEQ ID NO: 2254 - protein, 220 aa, Zea mays subsp. mays
  peptide (1)..(220): Ceres Seq. ID no. 12407405
  misc_feature (1)..(170): Homolog of NCBI NO: 34901880 NR Description: putative Multidrug resistance protein norM
  misc_feature (1)..(210): Homolog of NCBI NO: 15234633 NR Description: putative protein; protein id: At4g21900.1
  misc_feature (1)..(219): Homolog of NCBI NO: 22655139 NR Description: unknown protein [Arabidopsis thaliana]
  misc_feature (1)..(219): Homolog of NCBI NO: 15221073 NR Description: unknown protein; protein id: At1g11670.1
  misc_feature (1)..(218): Homolog of NCBI NO: 21553843 NR Description: unknown [Arabidopsis thaliana]
  misc_feature (1)..(218): Homolog of NCBI NO: 18415793 NR Description: putative protein; protein id: At4g21910.1
  misc_feature (1)..(219): Homolog of NCBI NO: 15081773 NR Description: At1g61890/F8K4_9 [Arabidopsis thaliana]
  misc_feature (1)..(219): Homolog of NCBI NO: 18407368 NR Description: expressed protein
  misc_feature (1)..(219): Homolog of NCBI NO: 20466556 NR Description: integral membrane protein, putative [Arabidopsis
  misc_feature (1)..(219): Homolog of NCBI NO: 15233127 NR Description: integral membrane protein, putative
MLCLETWYYQIIVLIAGLLKNPEISLDSLSICMTVNAWVFMISVGFNAAASVRVGNELGAGNPRAASFSVLVVTSLSFAVSAVCAVAVLCLRDQLSYLFTGGEAVARAVSDLCPLLALTLVLNGVQPVLSGVAVGCGWQAFVAYVNVGCYYVVGVPLGVFLGFYLDLGAKGIWSGMVIGGTMMQTLILLWVTFRTDWTKEVENARARLDKWDDKKQPLLA

SEQ ID NO: 2255 - DNA, 1763 bp, Zea mays subsp. mays
  misc_feature (1)..(1763): Ceres Seq. ID no. 12410839
  misc_feature: MA Experiment ID: 108523 Result: Up-regulated in Transcription
  misc_feature: MA Experiment 108523 PARAMETER Experiment Name: Zm_42deg_Heat_P Parameter: Age (day) Value: 8
  misc_feature: MA Experiment 108523 PARAMETER Experiment Name: Zm_42deg_Heat_P Parameter: Organism Value: Zea mays
  misc_feature: MA Experiment 108523 PARAMETER Experiment Name: Zm_42deg_Heat_P Parameter: Plant Line Value: 35A19
  misc_feature: MA Experiment 108523 PARAMETER Experiment Name: Zm_42deg_Heat_P Parameter: Temperature (deg C) Value: 42 vs. 22
  misc_feature: MA Experiment 108523 PARAMETER Experiment Name: Zm_42deg_Heat_P Parameter: Timepoint (hr) Value: 6
  misc_feature: MA Experiment 108523 PARAMETER Experiment Name: Zm_42deg_Heat_P Parameter: Tissue Value: Aerial
  misc_feature: MA Experiment ID: 108689 Result: Up-regulated in Transcription
  misc_feature: MA Experiment 108689 PARAMETER Experiment Name: Zm_Drought_Roots_P Parameter: Age (day) Value: 9
  misc_feature: MA Experiment 108689 PARAMETER Experiment Name: Zm_Drought_Roots_P Parameter: Organism Value: Zea mays
  misc_feature: MA Experiment 108689 PARAMETER Experiment Name: Zm_Drought_Roots_P Parameter: Plant Line Value: 35A19
  misc_feature: MA Experiment 108689 PARAMETER Experiment Name: Zm_Drought_Roots_P Parameter: Timepoint (hr) Value: 24
  misc_feature: MA Experiment 108689 PARAMETER Experiment Name: Zm_Drought_Roots_P Parameter: Tissue Value: Roots
  misc_feature: MA Experiment 108689 PARAMETER Experiment Name: Zm_Drought_Roots_P Parameter: Treatment Value: Drought vs. No Drought
  misc_feature: MA Experiment ID: 20000535 Result: Down-regulated in Transcription
  misc_feature: MA Experiment 20000535 PARAMETER Experiment Name: Zm_Hybrid_Seed_Dev_P Parameter: DAP Value: 30 vs. 12
  misc_feature: MA Experiment 20000535 PARAMETER Experiment Name: Zm_Hybrid_Seed_Dev_P Parameter: Organism Value: Zea mays
  misc_feature: MA Experiment 20000535 PARAMETER Experiment Name: Zm_Hybrid_Seed_Dev_P Parameter: Plant Line Value: 35A19
  misc_feature: MA Experiment 20000535 PARAMETER Experiment Name: Zm_Hybrid_Seed_Dev_P Parameter: Tissue Value: Embryo vs. Unfert Floret
ctgcctgcccacgcgctccgctcctcgccccctcctcttcccacgccgccgccgtacccacgggcagggggcacggctggtggctcatcgctcggcccgctccccctccgtcgcaaccggaacataccagcaccggcgctgcggtattattcagctccgtccgccggccggcgcggacggacgccaggcttccttcctgtctgcataacaaagccgccgccattatgatctccacatatgatgcttagcatttgtcgctcgcagctgtattgctcctctagctgcatccttgtactagagcatggcgaagctcgcatctattgctcgcagtatgcttagattcccaaacggaagcatgaggcttgttatggtaacggttattggagcagtccttggctttttcattgggatttcattcccttcggtcagcataacaaagcttcactttccagatagctttatttcgtacattgaagacaaagacgctggactcacgacccaagctatactcaatcatgcttggacttctgccagaaacgcaaggggaaatggtaccgaaccgacttcaaacagtaccttaaagatttatgtcccaacgaaccccaagggtgcagaggggctagcaccaggtatcgttgtatcagagtctgacttccatttgcgcaggttatggggagacccaagtgaggacctgcctttcaaaccaaagtaccttgttacctttactgttggagttgagcagaaagcaaatataaacagagctgtgaagaagttttctgacaattttgctattctgttattccactatgatggccgggtgagtgagtgggatgaatttgagtggtcccagcgagctatccatattagtgtcaggaaacaaactaaatggtggtatgccaagagattcctgcatcctgatattgtggcagcttatgagtacatattcatttgggatgaggaccttggggttgaacattttaatgcagaggagtacatcaaacttgttaagaagcataacttggacatctctcaacctggattagagcctgatcgggggttaacatggcagatgaccaaaagaagaggtgacagtgaggttcacaaggacacagaggagaggcctggctggtgctctgaccctcatcttccaccgtgtgctgcttttgttgaaataatggctccagtcttctcaagagatgcatggagatgtgtgtggcatatgattcagaacgacttggttcatggttggggcttggattttgcgctcaggaaatgtgtggagcctgctcatgaaaagattggagttgtcgattcgcagtggatcgttcaccaagtggttccttctctggggaaccaggggcagtcagaaaacggaagggcgccatgggaaggggtgagggcgcggtgcaggaaggaatggggcatgttccagaccaggatggcggaggcggagaaggcgtattacaagatgatgggcatcacccctccaaactccacgcgtgtctagccgcgcctctcttcttggttttccatccccgccaccctgacctttgtggtggcgggtgagctgatgatactatactatagcactacttgattatagggagttagagatggtgggtgtagctgcttttgatggagaggtccttctgtaagtaaatgcgaggcgaaactgtgatgagaaaacatgtacacgaggatgattacctgatgatgatgatgatgatctatctattataaaaaacatatataccgttaccgag

SEQ ID NO: 2256 - protein, 401 aa, Zea mays subsp. mays
  peptide (1)..(401): Ceres Seq. ID no. 12410840
  misc_feature (94)..(387): Pfam Name: Protein of unknown function (DUF707) Pfam Description: Protein of unknown function (DUF707)
  misc_feature (1)..(401): Homolog of NCBI NO: 14719314 NR Description: putative protein [Oryza sativa]
  misc_feature (45)..(401): Homolog of NCBI NO: 34905994 NR Description: P0518C01.8 [Oryza sativa (japonica
  misc_feature (1)..(397): Homolog of NCBI NO: 34906848 NR Description: P0470A12.1 [Oryza sativa (japonica
  misc_feature (10)..(399): Homolog of NCBI NO: 18408876 NR Description: F12A21.2; protein id: At1g67850.1, supported by gi_14326581 [Arabidopsis thaliana] At1g67850/F12A21_2 [Arabidopsis thaliana]
  misc_feature (13)..(387): Homolog of NCBI NO: 18390845 NR Description: storage protein, putative; protein id: supported by cDNA: gi_15810566, supported by cDNA: gi_20259568 thaliana] >gi|15810567|gb|AAL07171.1| putative storage protein
  misc_feature (12)..(389): Homolog of NCBI NO: 22331371 NR Description: unknown protein; protein id: At3g27470.1, by cDNA: gi_19698930 [Arabidopsis thaliana] unknown protein [Arabidopsis thaliana]
  misc_feature (93)..(387): Homolog of NCBI NO: 25407018 NR Description: protein T6D22.12 [imported] - Arabidopsis >gi|8778842|gb|AAF79841.1|AC026875_21 T6D22.12 [Arabidopsis
  misc_feature (1)..(48): Homolog of NCBI NO: 25407018 NR Description: protein T6D22.12 [imported] - Arabidopsis >gi|8778842|gb|AAF79841.1|AC026875_21 T6D22.12 [Arabidopsis
  misc_feature (15)..(389): Homolog of NCBI NO: 22329525 NR Description: unknown protein; protein id: At1g13000.1, by cDNA: gi_18175818, supported by cDNA: gi_20465546 [Arabidopsis >gi|18175819|gb|AAL59933.1| unknown protein [Arabidopsis
  misc_feature (85)..(292): Homolog of NCBI NO: 7939519 NR Description: gb|AAD31054.1~gene_id:K1G2.18~strong similarity
MAKLASIARSMLRFPNGSMRLVMVTVIGAVLGFFIGISFPSVSITKLHFPDSFISYIEDKDAGLTTQAILNHAWTSARNARGNGTEPTSNSTLKIYVPTNPKGAEGLAPGIVVSESDFHLRRLWGDPSEDLPFKPKYLVTFTVGVEQKANINRAVKKFSDNFAILLFHYDGRVSEWDEFEWSQRAIHISVRKQTKWWYAKRFLHPDIVAAYEYIFIWDEDLGVEHFNAEEYIKLVKKHNLDISQPGLEPDRGLTWQMTKRRGDSEVHKDTEERPGWCSDPHLPPCAAFVEIMAPVFSRDAWRCVWHMIQNDLVHGWGLDFALRKCVEPAHEKIGVVDSQWIVHQVVPSLGNQGQSENGRAPWEGVRARCRKEWGMFQTRMAEAEKAYYKMMGITPPNSTRV

SEQ ID NO: 2257 - protein, 391 aa, Zea mays subsp. mays
  peptide (1)..(391): Ceres Seq. ID no. 12410841
  misc_feature (84)..(377): Pfam Name: Protein of unknown function (DUF707) Pfam Description: Protein of unknown function (DUF707)
  misc_feature (1)..(391): Homolog of NCBI NO: 14719314 NR Description: putative protein [Oryza sativa]
  misc_feature (35)..(391): Homolog of NCBI NO: 34905994 NR Description: P0518C01.8 [Oryza sativa (japonica
  misc_feature (1)..(387): Homolog of NCBI NO: 34906848 NR Description: P0470A12.1 [Oryza sativa (japonica
  misc_feature (1)..(389): Homolog of NCBI NO: 18408876 NR Description: F12A21.2; protein id: At1g67850.1, supported by gi_14326581 [Arabidopsis thaliana] At1g67850/F12A21_2 [Arabidopsis thaliana]
  misc_feature (3)..(377): Homolog of NCBI NO: 18390845 NR Description: storage protein, putative; protein id: supported by cDNA: gi_15810566, supported by cDNA: gi_20259568 thaliana] >gi|15810567|gb|AAL07171.1| putative storage protein
  misc_feature (2)..(379): Homolog of NCBI NO: 22331371 NR Description: unknown protein; protein id: At3g27470.1, by cDNA: gi_19698930 [Arabidopsis thaliana] unknown protein [Arabidopsis thaliana]
  misc_feature (83)..(377): Homolog of NCBI NO: 25407018 NR Description: protein T6D22.12 [imported] - Arabidopsis >gi|8778842|gb|AAF79841.1|AC026875_21 T6D22.12 [Arabidopsis
  misc_feature (1)..(38): Homolog of NCBI NO: 25407018 NR Description: protein T6D22.12 [imported] - Arabidopsis >gi|8778842|gb|AAF79841.1|AC026875_21 T6D22.12 [Arabidopsis
  misc_feature (5)..(379): Homolog of NCBI NO: 22329525 NR Description: unknown protein; protein id: At1g13000.1, by cDNA: gi_18175818, supported by cDNA: gi_20465546 [Arabidopsis >gi|18175819|gb|AAL59933.1| unknown protein [Arabidopsis
  misc_feature (75)..(282): Homolog of NCBI NO: 7939519 NR Description: gb|AAD31054.1~gene_id:K1G2.18~strong similarity
MLRFPNGSMRLVMVTVIGAVLGFFIGISFPSVSITKLHFPDSFISYIEDKDAGLTTQAILNHAWTSARNARGNGTEPTSNSTLKIYVPTNPKGAEGLAPGIVVSESDFHLRRLWGDPSEDLPFKPKYLVTFTVGVEQKANINRAVKKFSDNFAILLFHYDGRVSEWDEFEWSQRAIHISVRKQTKWWYAKRFLHPDIVAAYEYIFIWDEDLGVEHFNAEEYIKLVKKHNLDISQPGLEPDRGLTWQMTKRRGDSEVHKDTEERPGWCSDPHLPPCAAFVEIMAPVFSRDAWRCVWHMIQNDLVHGWGLDFALRKCVEPAHEKIGVVDSQWIVHQVVPSLGNQGQSENGRAPWEGVRARCRKEWGMFQTRMAEAEKAYYKMMGITPPNSTRV

SEQ ID NO: 2258 - protein, 383 aa, Zea mays subsp. mays
  peptide (1)..(383): Ceres Seq. ID no. 12410842
  misc_feature (76)..(369): Pfam Name: Protein of unknown function (DUF707) Pfam Description: Protein of unknown function (DUF707)
  misc_feature (1)..(383): Homolog of NCBI NO: 14719314 NR Description: putative protein [Oryza sativa]
  misc_feature (27)..(383): Homolog of NCBI NO: 34905994 NR Description: P0518C01.8 [Oryza sativa (japonica
  misc_feature (1)..(379): Homolog of NCBI NO: 34906848 NR Description: P0470A12.1 [Oryza sativa (japonica
  misc_feature (1)..(381): Homolog of NCBI NO: 18408876 NR Description: F12A21.2; protein id: At1g67850.1, supported by gi_14326581 [Arabidopsis thaliana] At1g67850/F12A21_2 [Arabidopsis thaliana]
  misc_feature (1)..(369): Homolog of NCBI NO: 18390845 NR Description: storage protein, putative; protein id: supported by cDNA: gi_15810566, supported by cDNA: gi_20259568 thaliana] >gi|15810567|gb|AAL07171.1| putative storage protein
  misc_feature (1)..(371): Homolog of NCBI NO: 22331371 NR Description: unknown protein; protein id: At3g27470.1, by cDNA: gi_19698930 [Arabidopsis thaliana] unknown protein [Arabidopsis thaliana]
  misc_feature (75)..(369): Homolog of NCBI NO: 25407018 NR Description: protein T6D22.12 [imported] - Arabidopsis >gi|8778842|gb|AAF79841.1|AC026875_21 T6D22.12 [Arabidopsis
  misc_feature (1)..(30): Homolog of NCBI NO: 25407018 NR Description: protein T6D22.12 [imported] - Arabidopsis >gi|8778842|gb|AAF79841.1|AC026875_21 T6D22.12 [Arabidopsis
  misc_feature (1)..(371): Homolog of NCBI NO: 22329525 NR Description: unknown protein; protein id: At1g13000.1, by cDNA: gi_18175818, supported by cDNA: gi_20465546 [Arabidopsis >gi|18175819|gb|AAL59933.1| unknown protein [Arabidopsis
  misc_feature (67)..(274): Homolog of NCBI NO: 7939519 NR Description: gb|AAD31054.1~gene_id:K1G2.18~strong similarity
MRLVMVTVIGAVLGFFIGISFPSVSITKLHFPDSFISYIEDKDAGLTTQAILNHAWTSARNARGNGTEPTSNSTLKIYVPTNPKGAEGLAPGIVVSESDFHLRRLWGDPSEDLPFKPKYLVTFTVGVEQKANINRAVKKFSDNFAILLFHYDGRVSEWDEFEWSQRAIHISVRKQTKWWYAKRFLHPDIVAAYEYIFIWDEDLGVEHFNAEEYIKLVKKHNLDISQPGLEPDRGLTWQMTKRRGDSEVHKDTEERPGWCSDPHLPPCAAFVEIMAPVFSRDAWRCVWHMIQNDLVHGWGLDFALRKCVEPAHEKIGVVDSQWIVHQVVPSLGNQGQSENGRAPWEGVRARCRKEWGMFQTRMAEAEKAYYKMMGITPPNSTRV

SEQ ID NO: 2259 - DNA, 1361 bp, Zea mays subsp. mays
  misc_feature (1)..(1361): Ceres Seq. ID no. 12407837
  misc_feature: MA Experiment ID: 108527 Result: Up-regulated in Transcription
  misc_feature: MA Experiment 108527 PARAMETER Experiment Name: Zm_5mM_NO_P Parameter: Age (day) Value: 8
  misc_feature: MA Experiment 108527 PARAMETER Experiment Name: Zm_5mM_NO_P Parameter: Organism Value: Zea mays
  misc_feature: MA Experiment 108527 PARAMETER Experiment Name: Zm_5mM_NO_P Parameter: Plant Line Value: 35A19
  misc_feature: MA Experiment 108527 PARAMETER Experiment Name: Zm_5mM_NO_P Parameter: Timepoint (hr) Value: 6
  misc_feature: MA Experiment 108527 PARAMETER Experiment Name: Zm_5mM_NO_P Parameter: Tissue Value: Aerial
  misc_feature: MA Experiment 108527 PARAMETER Experiment Name: Zm_5mM_NO_P Parameter: Treatment Value: 5mM NO vs. No Treatment
  misc_feature: MA Experiment ID: 108534 Result: Down-regulated in Transcription
  misc_feature: MA Experiment 108534 PARAMETER Experiment Name: Zm_4deg_Cold_P Parameter: Age (hr) Value: 8
  misc_feature: MA Experiment 108534 PARAMETER Experiment Name: Zm_4deg_Cold_P Parameter: Organism Value: Zea mays
  misc_feature: MA Experiment 108534 PARAMETER Experiment Name: Zm_4deg_Cold_P Parameter: Plant Line Value: 35A19
  misc_feature: MA Experiment 108534 PARAMETER Experiment Name: Zm_4deg_Cold_P Parameter: Temperature (deg C) Value: 4 vs. 22
  misc_feature: MA Experiment 108534 PARAMETER Experiment Name: Zm_4deg_Cold_P Parameter: Timepoint (hr) Value: 6
  misc_feature: MA Experiment 108534 PARAMETER Experiment Name: Zm_4deg_Cold_P Parameter: Tissue Value: Aerial
gaaaaaaccgccgccatcgtgtgatggccgccacgcccgacgagcggaagcaggagaggccgatgaggcccgcgacgtcgccggcgagcgtggtggcggacttcgccatgggaggcgcggccgccgtggtggcaaagacgggggccgcgccggtcgagcgcgtcaagctgctgctccagaaccaggccgagatgctgcgccgcggcaccctcacgcgcccctacaggggcatcgccgacgccttcacccgcatcctccgcgaggagggccccgccgcgctttggcgtggcaaccaggccaacgtcatccgctacttccccacccaggcttttaactttgcattcaggggctatttcaaaagcttttttggctatgacagggagaaagacggaaagtggaagtggttagctggaaatgtagcctctggcagtgctgccggagctacaacatcattgctgctataccatctagattatgcaagaacaaggctagctactgatgcaattgaatcacggggaaccaagcgccagttcagggggttgctggatgtttacaagaagacacttacaaccgatggcatgtctggactataccgaggtttcagtgtgtctattacgggaatctccttataccggggtttatattttggtatctatgatagcatgaagcctctagttctagtaggcccattggaggggaatttcttcgccagttttgtgttgggctggacaataactacgttctctggggcttgtgcctatccattcgacacggtccgtcgtagaatgatgttaacttcaggagaaccatttaaatacaagaacggtttccatgcagtaaaactgatagtttcaaccgaagggttcttcacattattcagaggtgttggtgcaaatattctctcagggctggcaggggctggagttctttctgggtatgatcaactccaacggttggcaagccggcatgatcaaaattttgagcacaatatgaaaggggcattgaaatgatgtgcatatgatatgaatagattcagatccttggttgaagtccagatcattcaaatgggatgctcaagcaagaactcctgagcctgaagaacttcgcaaaaaatattgggggaagaaaaaggaaaagttttcctggagatgaatttcacaaggagatggaatcattgcaacaaaagataactcttgtaaacagagagtgctgaatatatattttaatgtgtagatctaatccttcaagtatgagcacatgtacatgttggtgtttcttcgattgttagaggccaatagtatcctatcaatgtgaaatgtaaatccaaatccttcagtaggtcatgaccaagctatttttct

SEQ ID NO: 2260 - protein, 335 aa, Zea mays subsp. mays
  peptide (1)..(335): Ceres Seq. ID no. 12407838
  misc_feature (36)..(322): Homolog of NCBI NO: 21593088 NR Description: ADP/ATP translocase-like protein [Arabidopsis
  misc_feature (32)..(322): Homolog of NCBI NO: 18418286 NR Description: ADP/ATP translocase-like protein
  misc_feature (33)..(318): Homolog of NCBI NO: 22166 NR Description: adenine nucleotide translocator [Zea mays]
  misc_feature (33)..(318): Homolog of NCBI NO: 485517 NR Description: ADP,ATP carrier protein - rice
  misc_feature (33)..(318): Homolog of NCBI NO: 113456 NR Description: ADP,ATP carrier protein 1, mitochondrial (ADP/ATP translocase 1) (Adenine nucleotide translocator 1) (ANT
  misc_feature (33)..(318): Homolog of NCBI NO: 113460 NR Description: ADP,ATP carrier protein 2, mitochondrial (ADP/ATP translocase 2) (Adenine nucleotide translocator 2) (ANT
  misc_feature (33)..(316): Homolog of NCBI NO: 478810 NR Description: ADP,ATP carrier protein - Arabidopsis thaliana
  misc_feature (33)..(316): Homolog of NCBI NO: 444790 NR Description: nucleotide translocator
  misc_feature (33)..(318): Homolog of NCBI NO: 399015 NR Description: ADP,ATP carrier protein, mitochondrial precursor
  misc_feature (33)..(316): Homolog of NCBI NO: 15240640 NR Description: adenosine nucleotide translocator
KNRRHRVMAATPDERKQERPMRPATSPASVVADFAMGGAAAVVAKTGAAPVERVKLLLQNQAEMLRRGTLTRPYRGIADAFTRILREEGPAALWRGNQANVIRYFPTQAFNFAFRGYFKSFFGYDREKDGKWKWLAGNVASGSAAGATTSLLLYHLDYARTRLATDAIESRGTKRQFRGLLDVYKKTLTTDGMSGLYRGFSVSITGISLYRGLYFGIYDSMKPLVLVGPLEGNFFASFVLGWTITTFSGACAYPFDTVRRRMMLTSGEPFKYKNGFHAVKLIVSTEGFFTLFRGVGANILSGLAGAGVLSGYDQLQRLASRHDQNFEHNMKGALK

SEQ ID NO: 2261 - protein, 328 aa, Zea mays subsp. mays
  peptide (1)..(328): Ceres Seq. ID no. 12407839
  misc_feature (26)..(311): Homolog of NCBI NO: 22166 NR Description: adenine nucleotide translocator [Zea mays]
  misc_feature (26)..(311): Homolog of NCBI NO: 485517 NR Description: ADP,ATP carrier protein - rice
  misc_feature (26)..(311): Homolog of NCBI NO: 113456 NR Description: ADP,ATP carrier protein 1, mitochondrial (ADP/ATP translocase 1) (Adenine nucleotide translocator 1) (ANT
  misc_feature (26)..(311): Homolog of NCBI NO: 113460 NR Description: ADP,ATP carrier protein 2, mitochondrial (ADP/ATP translocase 2) (Adenine nucleotide translocator 2) (ANT
  misc_feature (26)..(309): Homolog of NCBI NO: 444790 NR Description: nucleotide translocator
  misc_feature (26)..(309): Homolog of NCBI NO: 478810 NR Description: ADP,ATP carrier protein - Arabidopsis thaliana
  misc_feature (26)..(311): Homolog of NCBI NO: 399015 NR Description: ADP,ATP carrier protein, mitochondrial precursor
  misc_feature (26)..(309): Homolog of NCBI NO: 15240640 NR Description: adenosine nucleotide translocator
  misc_feature (29)..(315): Homolog of NCBI NO: 21593088 NR Description: ADP/ATP translocase-like protein [Arabidopsis
  misc_feature (25)..(315): Homolog of NCBI NO: 18418286 NR Description: ADP/ATP translocase-like protein
MAATPDERKQERPMRPATSPASVVADFAMGGAAAVVAKTGAAPVERVKLLLQNQAEMLRRGTLTRPYRGIADAFTRILREEGPAALWRGNQANVIRYFPTQAFNFAFRGYFKSFFGYDREKDGKWKWLAGNVASGSAAGATTSLLLYHLDYARTRLATDAIESRGTKRQFRGLLDVYKKTLTTDGMSGLYRGFSVSITGISLYRGLYFGIYDSMKPLVLVGPLEGNFFASFVLGWTITTFSGACAYPFDTVRRRMMLTSGEPFKYKNGFHAVKLIVSTEGFFTLFRGVGANILSGLAGAGVLSGYDQLQRLASRHDQNFEHNMKGALK

SEQ ID NO: 2262 - protein, 315 aa, Zea mays subsp. mays
  peptide (1)..(315): Ceres Seq. ID no. 12407840
  misc_feature (13)..(298): Homolog of NCBI NO: 22166 NR Description: adenine nucleotide translocator [Zea mays]
  misc_feature (13)..(298): Homolog of NCBI NO: 485517 NR Description: ADP,ATP carrier protein - rice
  misc_feature (13)..(298): Homolog of NCBI NO: 113456 NR Description: ADP,ATP carrier protein 1, mitochondrial (ADP/ATP translocase 1) (Adenine nucleotide translocator 1) (ANT
  misc_feature (13)..(298): Homolog of NCBI NO: 113460 NR Description: ADP,ATP carrier protein 2, mitochondrial (ADP/ATP translocase 2) (Adenine nucleotide translocator 2) (ANT
  misc_feature (13)..(296): Homolog of NCBI NO: 478810 NR Description: ADP,ATP carrier protein - Arabidopsis thaliana
  misc_feature (13)..(296): Homolog of NCBI NO: 444790 NR Description: nucleotide translocator
  misc_feature (13)..(298): Homolog of NCBI NO: 399015 NR Description: ADP,ATP carrier protein, mitochondrial precursor
  misc_feature (13)..(296): Homolog of NCBI NO: 15240640 NR Description: adenosine nucleotide translocator
  misc_feature (16)..(302): Homolog of NCBI NO: 21593088 NR Description: ADP/ATP translocase-like protein [Arabidopsis
  misc_feature (12)..(302): Homolog of NCBI NO: 18418286 NR Description: ADP/ATP translocase-like protein
MRPATSPASVVADFAMGGAAAVVAKTGAAPVERVKLLLQNQAEMLRRGTLTRPYRGIADAFTRILREEGPAALWRGNQANVIRYFPTQAFNFAFRGYFKSFFGYDREKDGKWKWLAGNVASGSAAGATTSLLLYHLDYARTRLATDAIESRGTKRQFRGLLDVYKKTLTTDGMSGLYRGFSVSITGISLYRGLYFGIYDSMKPLVLVGPLEGNFFASFVLGWTITTFSGACAYPFDTVRRRMMLTSGEPFKYKNGFHAVKLIVSTEGFFTLFRGVGANILSGLAGAGVLSGYDQLQRLASRHDQNFEHNMKGALK

SEQ ID NO: 2263 - DNA, 1336 bp, Zea mays subsp. mays
  misc_feature (1)..(1336): Ceres Seq. ID no. 12407834
  misc_feature: MA Experiment ID: 108522 Result: Down-regulated in Transcription
  misc_feature: MA Experiment 108522 PARAMETER Experiment Name: Zm_42deg_Heat_P Parameter: Age (day) Value: 8
  misc_feature: MA Experiment 108522 PARAMETER Experiment Name: Zm_42deg_Heat_P Parameter: Organism Value: Zea mays
  misc_feature: MA Experiment 108522 PARAMETER Experiment Name: Zm_42deg_Heat_P Parameter: Plant Line Value: 35A19
  misc_feature: MA Experiment 108522 PARAMETER Experiment Name: Zm_42deg_Heat_P Parameter: Temperature (deg C) Value: 42 vs. 22
  misc_feature: MA Experiment 108522 PARAMETER Experiment Name: Zm_42deg_Heat_P Parameter: Timepoint (hr) Value: 1
  misc_feature: MA Experiment 108522 PARAMETER Experiment Name: Zm_42deg_Heat_P Parameter: Tissue Value: Aerial
  misc_feature: MA Experiment ID: 108530 Result: Up-regulated in Transcription
  misc_feature: MA Experiment 108530 PARAMETER Experiment Name: Zm_Imbibed_Seeds_P Parameter: Age (day) Value: 6 vs. 2
  misc_feature: MA Experiment 108530 PARAMETER Experiment Name: Zm_Imbibed_Seeds_P Parameter: Organism Value: Zea mays
  misc_feature: MA Experiment 108530 PARAMETER Experiment Name: Zm_Imbibed_Seeds_P Parameter: Plant Line Value: 35A19
  misc_feature: MA Experiment 108530 PARAMETER Experiment Name: Zm_Imbibed_Seeds_P Parameter: Tissue Value: Aerial vs. Embryo
  misc_feature: MA Experiment ID: 108536 Result: Down-regulated in Transcription
  misc_feature: MA Experiment 108536 PARAMETER Experiment Name: Zm_Meristem_P Parameter: Age (day) Value: 8
  misc_feature: MA Experiment 108536 PARAMETER Experiment Name: Zm_Meristem_P Parameter: Organism Value: Zea mays
  misc_feature: MA Experiment 108536 PARAMETER Experiment Name: Zm_Meristem_P Parameter: Plant Line Value: 35A19
  misc_feature: MA Experiment 108536 PARAMETER Experiment Name: Zm_Meristem_P Parameter: Tissue Value: Shoot Meristem vs. Above Shoot Meristem
  misc_feature: MA Experiment ID: 108556 Result: Down-regulated in Transcription
  misc_feature: MA Experiment 108556 PARAMETER Experiment Name: Zm_Drought_P Parameter: Age (day) Value: 9
  misc_feature: MA Experiment 108556 PARAMETER Experiment Name: Zm_Drought_P Parameter: Organism Value: Zea mays
  misc_feature: MA Experiment 108556 PARAMETER Experiment Name: Zm_Drought_P Parameter: Plant Line Value: 35A19
  misc_feature: MA Experiment 108556 PARAMETER Experiment Name: Zm_Drought_P Parameter: Timepoint (hr) Value: 24
  misc_feature: MA Experiment 108556 PARAMETER Experiment Name: Zm_Drought_P Parameter: Tissue Value: Aerial
  misc_feature: MA Experiment 108556 PARAMETER Experiment Name: Zm_Drought_P Parameter: Treatment Value: Drought vs. No Drought
  misc_feature: MA Experiment ID: 108688 Result: Down-regulated in Transcription
  misc_feature: MA Experiment 108688 PARAMETER Experiment Name: Zm_Embryos-Flowers__P Parameter: Tissue Value: Immature Flowers vs. Aerial+
  misc_feature: MA Experiment ID: 20000477 Result: Down-regulated in Transcription
  misc_feature: MA Experiment 20000477 PARAMETER Experiment Name: Zm_5mM_SA_P Parameter: Age (day) Value: 10
  misc_feature: MA Experiment 20000477 PARAMETER Experiment Name: Zm_5mM_SA_P Parameter: Organism Value: Zea mays
  misc_feature: MA Experiment 20000477 PARAMETER Experiment Name: Zm_5mM_SA_P Parameter: Plant Line Value: 35A19
  misc_feature: MA Experiment 20000477 PARAMETER Experiment Name: Zm_5mM_SA_P Parameter: Timepoint (hr) Value: 48
  misc_feature: MA Experiment 20000477 PARAMETER Experiment Name: Zm_5mM_SA_P Parameter: Tissue Value: Aerial
  misc_feature: MA Experiment 20000477 PARAMETER Experiment Name: Zm_5mM_SA_P Parameter: Treatment Value: 5mM SA vs. No Treatment
  misc_feature: MA Experiment ID: 20000478 Result: Down-regulated in Transcription
  misc_feature: MA Experiment 20000478 PARAMETER Experiment Name: Zm_5mM_SA_P Parameter: Age (day) Value: 11
  misc_feature: MA Experiment 20000478 PARAMETER Experiment Name: Zm_5mM_SA_P Parameter: Organism Value: Zea mays
  misc_feature: MA Experiment 20000478 PARAMETER Experiment Name: Zm_5mM_SA_P Parameter: Plant Line Value: 35A19
  misc_feature: MA Experiment 20000478 PARAMETER Experiment Name: Zm_5mM_SA_P Parameter: Timepoint (hr) Value: 72
  misc_feature: MA Experiment 20000478 PARAMETER Experiment Name: Zm_5mM_SA_P Parameter: Tissue Value: Aerial
  misc_feature: MA Experiment 20000478 PARAMETER Experiment Name: Zm_5mM_SA_P Parameter: Treatment Value: 5mM SA vs. No Treatment
  misc_feature: MA Experiment ID: 20000479 Result: Down-regulated in Transcription
  misc_feature: MA Experiment 20000479 PARAMETER Experiment Name: Zm_Drought_P Parameter: Age (day) Value: 10
  misc_feature: MA Experiment 20000479 PARAMETER Experiment Name: Zm_Drought_P Parameter: Organism Value: Zea mays
  misc_feature: MA Experiment 20000479 PARAMETER Experiment Name: Zm_Drought_P Parameter: Plant Line Value: 35A19
  misc_feature: MA Experiment 20000479 PARAMETER Experiment Name: Zm_Drought_P Parameter: Timepoint (hr) Value: 48
  misc_feature: MA Experiment 20000479 PARAMETER Experiment Name: Zm_Drought_P Parameter: Tissue Value: Aerial
  misc_feature: MA Experiment 20000479 PARAMETER Experiment Name: Zm_Drought_P Parameter: Treatment Value: Drought vs. No Drought
  misc_feature: MA Experiment ID: 20000535 Result: Down-regulated in Transcription
  misc_feature: MA Experiment 20000535 PARAMETER Experiment Name: Zm_Hybrid_Seed_Dev_P Parameter: DAP Value: 30 vs. 12
  misc_feature: MA Experiment 20000535 PARAMETER Experiment Name: Zm_Hybrid_Seed_Dev_P Parameter: Organism Value: Zea mays
  misc_feature: MA Experiment 20000535 PARAMETER Experiment Name: Zm_Hybrid_Seed_Dev_P Parameter: Plant Line Value: 35A19
  misc_feature: MA Experiment 20000535 PARAMETER Experiment Name: Zm_Hybrid_Seed_Dev_P Parameter: Tissue Value: Embryo vs. Unfert Floret
atctcgatcgtgctccattccatccacgtatgtagctagagctgccaatcggagatacgtacatggcccgtgtcgcgtcgctgctgctcaccgtcatcgtggctgcggcggcgtcgctgctgctgctgcttgcgccgtcggcggcggagctgacgcgggtggagcacccgcccaagaacgagggctcgctcgccatccttgcagttggcgactgggggcgccgggggcagttcaaccagaccctcgtggcccagcagatgggagtggtgggggagaagttggacatcgacttcgtcatctccacgggcgacaacatctacgacgacggcatcgccaacaccagcgaccccctcttcaaggagtgcttcaccaacatctacaccgcgcagagcctccagacgccttggtacatcgtcctcggcaaccatgactacacgggcaacgcgctggcgcagcaagaccccgccatccgcgaagtcgacagccggtacctcaacctcgccaagtccttcatcgtcaactcaggaatcgcggatttcttcctcctggacacgtcgccgttctacctcaagtactggaacagcagcaagtacgactggagagacgtcgctcctcgcgacacctacatccaaaacctcctcgatgatttggacgacgccctggtccaatccgaggcgccctggaagattgtcgtcggccaccaccccatcagcagcggctgcgagcatgggaacaccactgagctccaggagctcctcagaccaatcctcgaggcgcgcggggtcgacatgtacgtgaacggccacgaccactgcttgcagcacatcagcagcagaaacagcccggttcagttcatgacgagcggcggcgggtccaaggcatgggcgggcaagttcaagaccacgtccgacaagatagagttcatctacgacggccagggattcatgtccatgcaactgagcagcacggaggcgcacctcgtcttctacgacgtcgccggcaatgtcctgcacagctatgacagcaccaaaaacgaagaagaggacgatggctggccagctggacaacaagcagctgtgaggggatcaattgatcgaggcaacttataatatgtgtgtgggccggaagcaattcgtttgtgtatcttatgatgtgtgtatgtgctatgtttaaaatgtgcattattgtgtgcacaagagaggattattgttgtatcttctagctagttgggtcacttgaggggctcagggctagaaaccaatttaaaatcacaatcattggatagtagctggactctcataatataaactatacatataatatatagttactagcc

SEQ ID NO: 2264 - protein, 348 aa, Zea mays subsp. mays
  peptide (1)..(348): Ceres Seq. ID no. 12407835
  misc_feature (43)..(252): Pfam Name: Calcineurin-like phosphoesterase Pfam Description: Calcineurin-like phosphoesterase
  misc_feature (6)..(332): Homolog of NCBI NO: 25752248 NR Description: probable acid phosphatase (EC 3.1.3.2) F4F7.38
  misc_feature (26)..(325): Homolog of NCBI NO: 25752249 NR Description: probable acid phosphatase (EC 3.1.3.2) F10B6.10
  misc_feature (19)..(324): Homolog of NCBI NO: 22325419 NR Description: putative purple acid phosphatase
  misc_feature (26)..(325): Homolog of NCBI NO: 30911094 NR Description: putative purple acid phosphatase [Arabidopsis
  misc_feature (26)..(325): Homolog of NCBI NO: 30683951 NR Description: calcineurin-like phosphoesterase family
  misc_feature (6)..(332): Homolog of NCBI NO: 22329781 NR Description: hypothetical protein
  misc_feature (12)..(323): Homolog of NCBI NO: 37530584 NR Description: putative purple acid phosphatase
MARVASLLLTVIVAAAASLLLLLAPSAAELTRVEHPPKNEGSLAILAVGDWGRRGQFNQTLVAQQMGVVGEKLDIDFVISTGDNIYDDGIANTSDPLFKECFTNIYTAQSLQTPWYIVLGNHDYTGNALAQQDPAIREVDSRYLNLAKSFIVNSGIADFFLLDTSPFYLKYWNSSKYDWRDVAPRDTYIQNLLDDLDDALVQSEAPWKIVVGHHPISSGCEHGNTTELQELLRPILEARGVDMYVNGHDHCLQHISSRNSPVQFMTSGGGSKAWAGKFKTTSDKIEFIYDGQGFMSMQLSSTEAHLVFYDVAGNVLHSYDSTKNEEEDDGWPAGQQAAVRGSIDRGNL

SEQ ID NO: 2265 - protein, 283 aa, Zea mays subsp. mays
  peptide (1)..(283): Ceres Seq. ID no. 12407836
  misc_feature (1)..(187): Pfam Name: Calcineurin-like phosphoesterase Pfam Description: Calcineurin-like phosphoesterase
  misc_feature (1)..(267): Homolog of NCBI NO: 25752248 NR Description: probable acid phosphatase (EC 3.1.3.2) F4F7.38
  misc_feature (1)..(260): Homolog of NCBI NO: 25752249 NR Description: probable acid phosphatase (EC 3.1.3.2) F10B6.10
  misc_feature (1)..(259): Homolog of NCBI NO: 22325419 NR Description: putative purple acid phosphatase
  misc_feature (1)..(260): Homolog of NCBI NO: 30911094 NR Description: putative purple acid phosphatase [Arabidopsis
  misc_feature (1)..(260): Homolog of NCBI NO: 30683951 NR Description: calcineurin-like phosphoesterase family
  misc_feature (1)..(267): Homolog of NCBI NO: 22329781 NR Description: hypothetical protein
  misc_feature (1)..(258): Homolog of NCBI NO: 37530584 NR Description: putative purple acid phosphatase
MGVVGEKLDIDFVISTGDNIYDDGIANTSDPLFKECFTNIYTAQSLQTPWYIVLGNHDYTGNALAQQDPAIREVDSRYLNLAKSFIVNSGIADFFLLDTSPFYLKYWNSSKYDWRDVAPRDTYIQNLLDDLDDALVQSEAPWKIVVGHHPISSGCEHGNTTELQELLRPILEARGVDMYVNGHDHCLQHISSRNSPVQFMTSGGGSKAWAGKFKTTSDKIEFIYDGQGFMSMQLSSTEAHLVFYDVAGNVLHSYDSTKNEEEDDGWPAGQQAAVRGSIDRGNL

SEQ ID NO: 2266 - DNA, 1514 bp, Zea mays subsp. mays
  misc_feature (1)..(1514): Ceres Seq. ID no. 12408075
  misc_feature: MA Experiment ID: 108527 Result: Down-regulated in Transcription
  misc_feature: MA Experiment 108527 PARAMETER Experiment Name: Zm_5mM_NO_P Parameter: Age (day) Value: 8
  misc_feature: MA Experiment 108527 PARAMETER Experiment Name: Zm_5mM_NO_P Parameter: Organism Value: Zea mays
  misc_feature: MA Experiment 108527 PARAMETER Experiment Name: Zm_5mM_NO_P Parameter: Plant Line Value: 35A19
  misc_feature: MA Experiment 108527 PARAMETER Experiment Name: Zm_5mM_NO_P Parameter: Timepoint (hr) Value: 6
  misc_feature: MA Experiment 108527 PARAMETER Experiment Name: Zm_5mM_NO_P Parameter: Tissue Value: Aerial
  misc_feature: MA Experiment 108527 PARAMETER Experiment Name: Zm_5mM_NO_P Parameter: Treatment Value: 5mM NO vs. No Treatment
  misc_feature: MA Experiment ID: 108544 Result: Down-regulated in Transcription
  misc_feature: MA Experiment ID: 20000477 Result: Down-regulated in Transcription
  misc_feature: MA Experiment 20000477 PARAMETER Experiment Name: Zm_5mM_SA_P Parameter: Age (day) Value: 10
  misc_feature: MA Experiment 20000477 PARAMETER Experiment Name: Zm_5mM_SA_P Parameter: Organism Value: Zea mays
  misc_feature: MA Experiment 20000477 PARAMETER Experiment Name: Zm_5mM_SA_P Parameter: Plant Line Value: 35A19
  misc_feature: MA Experiment 20000477 PARAMETER Experiment Name: Zm_5mM_SA_P Parameter: Timepoint (hr) Value: 48
  misc_feature: MA Experiment 20000477 PARAMETER Experiment Name: Zm_5mM_SA_P Parameter: Tissue Value: Aerial
  misc_feature: MA Experiment 20000477 PARAMETER Experiment Name: Zm_5mM_SA_P Parameter: Treatment Value: 5mM SA vs. No Treatment
  misc_feature: MA Experiment ID: 20000479 Result: Down-regulated in Transcription
  misc_feature: MA Experiment 20000479 PARAMETER Experiment Name: Zm_Drought_P Parameter: Age (day) Value: 10
  misc_feature: MA Experiment 20000479 PARAMETER Experiment Name: Zm_Drought_P Parameter: Organism Value: Zea mays
  misc_feature: MA Experiment 20000479 PARAMETER Experiment Name: Zm_Drought_P Parameter: Plant Line Value: 35A19
  misc_feature: MA Experiment 20000479 PARAMETER Experiment Name: Zm_Drought_P Parameter: Timepoint (hr) Value: 48
  misc_feature: MA Experiment 20000479 PARAMETER Experiment Name: Zm_Drought_P Parameter: Tissue Value: Aerial
  misc_feature: MA Experiment 20000479 PARAMETER Experiment Name: Zm_Drought_P Parameter: Treatment Value: Drought vs. No Drought
  misc_feature: MA Experiment ID: 20000480 Result: Down-regulated in Transcription
  misc_feature: MA Experiment 20000480 PARAMETER Experiment Name: Zm_Drought_P Parameter: Age (day) Value: 11
  misc_feature: MA Experiment 20000480 PARAMETER Experiment Name: Zm_Drought_P Parameter: Organism Value: Zea mays
  misc_feature: MA Experiment 20000480 PARAMETER Experiment Name: Zm_Drought_P Parameter: Plant Line Value: 35A19
  misc_feature: MA Experiment 20000480 PARAMETER Experiment Name: Zm_Drought_P Parameter: Timepoint (hr) Value: 72
  misc_feature: MA Experiment 20000480 PARAMETER Experiment Name: Zm_Drought_P Parameter: Tissue Value: Aerial
  misc_feature: MA Experiment 20000480 PARAMETER Experiment Name: Zm_Drought_P Parameter: Treatment Value: Drought vs. No Drought
aattttcctcgcgccgctgtcccttcgtttccccagacagtgcagaccgaaccgaacaggcgaacagacattggttttccccgccgcgcagcgcgcacacgcctgcctgccatttctaaatccggggccggtcatcctctcttgtttccgtggcaaccgcgcctctcctccttccttgcagcgtgcccctgcggggggctgcgcgtggatctgatctcgtcaattgtcgtgctatgtttttctccagcggcacgaagtgaagaacacgtttttgtgacgccatggctgtggaaagagatatatttggaatttctgggccaacgtatctgaaatcaatcgattggaactgtgagcataatcggagatctgtggctgcaagcttagttcaggctgtatatgtgttggagagagaccggcaactgaatcatcaatcttttgaagccttggcacctgcttggtgggaattcctccattttgagctgattcgcaagctgattgatgatgctgatatgtccatatttggtgcaatatttgaattcaaccctccaaaggaggaagcttctggtgcaaatgctccaagatttgtcatcgcattcagaggcaccataacagagaaggatactatctctagggacctttccctggacctgcaccttgttcaaaatggtctccacaggacctcgagatttaatatagcaatgcaagctgttcaaaacgtagcctcggttttccctggatccacgatttggctagcagggcattcactaggcgctggcctggccatccttacgggaagaaacatggttaagaagggtgtgcttttagaaagctttctcttcaacccaccgttcgttgctgctccagttgaaaggatcagggacgaaagggtaaagcacggatttcgtattgcaagaagcgtgattactgctggattgactattgccatgaaagctaaaactgagggtagcagtcagagatccgtcgctgaagaatctttcagcattttgtcatcatggacgccgtacctgttcgttaatccaggagaccacatttactcagagtacattgggtacttccagcaccggaagaacatggaggatcttggtgccggatttatcgagaagcttgcgacacagaattccatcggagacctgttcttcaaggcactagggtgggagtcagaaccgctgcaccttcttccgtctgccgatctaatcgtcaacgtgagcccttcgtctgatttcaagtacgctcacggcatcagccagtggtggcaacctgagctgaatttgcagtgcagtaaatataggtactcatagttgtacgtcgctagaaatgatgtctcagaaacttagttatcctctctatcccttcagtttattcatgtggttcattctgtttgttgtagtgttggtttcccagctgtggtagactatttcagacatattgactgcattttcctgacctgcaaaatctgttgattgtgtggagtaaagttgtgacatccatcgttc

SEQ ID NO: 2267 - protein, 345 aa, Zea mays subsp. mays
  peptide (1)..(345): Ceres Seq. ID no. 12408076
  misc_feature (1)..(231): Homolog of NCBI NO: 10177082 NR Description: gene_id:MOP9.4~pir||T04290~similar to unknown
  misc_feature (1)..(335): Homolog of NCBI NO: 15237913 NR Description: putative protein; protein id: At5g24200.1
  misc_feature (4)..(332): Homolog of NCBI NO: 15237918 NR Description: putative protein; protein id: At5g24220.1
  misc_feature (4)..(338): Homolog of NCBI NO: 15237909 NR Description: putative protein; protein id: At5g24180.1
  misc_feature (32)..(344): Homolog of NCBI NO: 34910674 NR Description: P0690B02.1 [Oryza sativa (japonica
  misc_feature (24)..(308): Homolog of NCBI NO: 7486718 NR Description: hypothetical protein F8M12.9 - Arabidopsis
  misc_feature (1)..(336): Homolog of NCBI NO: 30689345 NR Description: expressed protein [Arabidopsis thaliana]
  misc_feature (1)..(308): Homolog of NCBI NO: 7486138 NR Description: hypothetical protein F25I24.160 - Arabidopsis
  misc_feature (1)..(344): Homolog of NCBI NO: 18396010 NR Description: expressed protein
  misc_feature (1)..(344): Homolog of NCBI NO: 18413406 NR Description: unknown protein; protein id: At4g10955.1
MAVERDIFGISGPTYLKSIDWNCEHNRRSVAASLVQAVYVLERDRQLNHQSFEALAPAWWEFLHFELIRKLIDDADMSIFGAIFEFNPPKEEASGANAPRFVIAFRGTITEKDTISRDLSLDLHLVQNGLHRTSRFNIAMQAVQNVASVFPGSTIWLAGHSLGAGLAILTGRNMVKKGVLLESFLFNPPFVAAPVERIRDERVKHGFRIARSVITAGLTIAMKAKTEGSSQRSVAEESFSILSSWTPYLFVNPGDHIYSEYIGYFQHRKNMEDLGAGFIEKLATQNSIGDLFFKALGWESEPLHLLPSADLIVNVSPSSDFKYAHGISQWWQPELNLQCSKYRYS

SEQ ID NO: 2268 - protein, 269 aa, Zea mays subsp. mays
  peptide (1)..(269): Ceres Seq. ID no. 12408077
  misc_feature (1)..(155): Homolog of NCBI NO: 10177082 NR Description: gene_id:MOP9.4~pir||T04290~similar to unknown
  misc_feature (1)..(259): Homolog of NCBI NO: 15237913 NR Description: putative protein; protein id: At5g24200.1
  misc_feature (1)..(256): Homolog of NCBI NO: 15237918 NR Description: putative protein; protein id: At5g24220.1
  misc_feature (1)..(262): Homolog of NCBI NO: 15237909 NR Description: putative protein; protein id: At5g24180.1
  misc_feature (1)..(268): Homolog of NCBI NO: 34910674 NR Description: P0690B02.1 [Oryza sativa (japonica
  misc_feature (1)..(232): Homolog of NCBI NO: 7486718 NR Description: hypothetical protein F8M12.9 - Arabidopsis
  misc_feature (1)..(260): Homolog of NCBI NO: 30689345 NR Description: expressed protein [Arabidopsis thaliana]
  misc_feature (1)..(232): Homolog of NCBI NO: 7486138 NR Description: hypothetical protein F25I24.160 - Arabidopsis
  misc_feature (1)..(268): Homolog of NCBI NO: 18396010 NR Description: expressed protein
  misc_feature (1)..(268): Homolog of NCBI NO: 18413406 NR Description: unknown protein; protein id: At4g10955.1
MSIFGAIFEFNPPKEEASGANAPRFVIAFRGTITEKDTISRDLSLDLHLVQNGLHRTSRFNIAMQAVQNVASVFPGSTIWLAGHSLGAGLAILTGRNMVKKGVLLESFLFNPPFVAAPVERIRDERVKHGFRIARSVITAGLTIAMKAKTEGSSQRSVAEESFSILSSWTPYLFVNPGDHIYSEYIGYFQHRKNMEDLGAGFIEKLATQNSIGDLFFKALGWESEPLHLLPSADLIVNVSPSSDFKYAHGISQWWQPELNLQCSKYRYS

SEQ ID NO: 2269 - protein, 206 aa, Zea mays subsp. mays
  peptide (1)..(206): Ceres Seq. ID no. 12408078
  misc_feature (1)..(92): Homolog of NCBI NO: 10177082 NR Description: gene_id:MOP9.4~pir||T04290~similar to unknown
  misc_feature (1)..(196): Homolog of NCBI NO: 15237913 NR Description: putative protein; protein id: At5g24200.1
  misc_feature (1)..(193): Homolog of NCBI NO: 15237918 NR Description: putative protein; protein id: At5g24220.1
  misc_feature (1)..(199): Homolog of NCBI NO: 15237909 NR Description: putative protein; protein id: At5g24180.1
  misc_feature (1)..(205): Homolog of NCBI NO: 34910674 NR Description: P0690B02.1 [Oryza sativa (japonica
  misc_feature (1)..(169): Homolog of NCBI NO: 7486718 NR Description: hypothetical protein F8M12.9 - Arabidopsis
  misc_feature (1)..(197): Homolog of NCBI NO: 30689345 NR Description: expressed protein [Arabidopsis thaliana]
  misc_feature (1)..(169): Homolog of NCBI NO: 7486138 NR Description: hypothetical protein F25I24.160 - Arabidopsis
  misc_feature (1)..(205): Homolog of NCBI NO: 18396010 NR Description: expressed protein
  misc_feature (1)..(205): Homolog of NCBI NO: 18413406 NR Description: unknown protein; protein id: At4g10955.1
MQAVQNVASVFPGSTIWLAGHSLGAGLAILTGRNMVKKGVLLESFLFNPPFVAAPVERIRDERVKHGFRIARSVITAGLTIAMKAKTEGSSQRSVAEESFSILSSWTPYLFVNPGDHIYSEYIGYFQHRKNMEDLGAGFIEKLATQNSIGDLFFKALGWESEPLHLLPSADLIVNVSPSSDFKYAHGISQWWQPELNLQCSKYRYS

SEQ ID NO: 2270 - DNA, 1015 bp, Zea mays subsp. mays
  misc_feature (1)..(1015): Ceres Seq. ID no. 12345896
  misc_feature: MA Experiment ID: 108522 Result: Down-regulated in Transcription
  misc_feature: MA Experiment 108522 PARAMETER Experiment Name: Zm_42deg_Heat_P Parameter: Age (day) Value: 8
  misc_feature: MA Experiment 108522 PARAMETER Experiment Name: Zm_42deg_Heat_P Parameter: Organism Value: Zea mays
  misc_feature: MA Experiment 108522 PARAMETER Experiment Name: Zm_42deg_Heat_P Parameter: Plant Line Value: 35A19
  misc_feature: MA Experiment 108522 PARAMETER Experiment Name: Zm_42deg_Heat_P Parameter: Temperature (deg C) Value: 42 vs. 22
  misc_feature: MA Experiment 108522 PARAMETER Experiment Name: Zm_42deg_Heat_P Parameter: Timepoint (hr) Value: 1
  misc_feature: MA Experiment 108522 PARAMETER Experiment Name: Zm_42deg_Heat_P Parameter: Tissue Value: Aerial
  misc_feature: MA Experiment ID: 108535 Result: Up-regulated in Transcription
  misc_feature: MA Experiment 108535 PARAMETER Experiment Name: Zm_Meristem_P Parameter: Age (day) Value: 8
  misc_feature: MA Experiment 108535 PARAMETER Experiment Name: Zm_Meristem_P Parameter: Organism Value: Zea mays
  misc_feature: MA Experiment 108535 PARAMETER Experiment Name: Zm_Meristem_P Parameter: Plant Line Value: 35A19
  misc_feature: MA Experiment 108535 PARAMETER Experiment Name: Zm_Meristem_P Parameter: Tissue Value: Root Meristem vs. Above Root Meristem
  misc_feature: MA Experiment ID: 20000626 Result: Up-regulated in Transcription
  misc_feature: MA Experiment 20000626 PARAMETER Experiment Name: Zm_Herbicide-Treatments_P Parameter: Timepoint (hr) Value: 12
  misc_feature: MA Experiment 20000626 PARAMETER Experiment Name: Zm_Herbicide-Treatments_P Parameter: Tissue Value: Aerial
  misc_feature: MA Experiment 20000626 PARAMETER Experiment Name: Zm_Herbicide-Treatments_P Parameter: Treatment Value: Roundup vs. No Treatment
aaacctcctgccctagtctcctctctgtctcacagcacagcccctgctttccccccaccgtcccacggccgccacgccgccacgcttcttcttccctttcccgtccaacctccaaccctgccggctgccgcggcggcggattaacacaataccttggcgagagacgtaatagtttctgaactcaccgcgctacgcccgatgtcggagacggcggcgccgatcggcctgtcatgggctcccaagcttccttcctttgcaacgaccagcggcggcagcaagatcgaccacgcgccggatccgagcaccgcgcagggctcgctctggaagcgcacgagcgagctcgtggacgggctgttcgtgcccccgagggaccctaggcagctgaataagctggctaggaagaacgtcaaggacaccgccggcaagggctggttcgacatgcccgcgccgaccatcactcccgagttgaagaaggatctcgagattttgcagctgaggcatgtaattgacccaaaaaggcacttcaagcgggcaggaaagtccaaggcccttcccaagtacttccaagttggtacggttgttgagcctgcatctgagttctactcaagtaggctgaaaaatagggaacgcaaggcaacattggtggacgagctgctatcagatcaatctcttaagagctacaggatgcgcaaggtacgggaaattcaggagatccgtacaccaggaggcaaccaaaagtggaagaacaagggcaagaaaacactgaagagggcgaaggataggagaaaatgagactggtgcgcccagctttgtgctccagttgtgagggaaccaaggaacgccttcaagtcgctctagtgcttttctctcaactttgcagtatagattctggttccagtgtagtgttgtggacttcatgatgaattgatttgtatttctataaattttataatattgctgtaacagcggaattcagaaatatgagttggtagactctttcaagttagctagcttc

SEQ ID NO: 2271 - protein, 197 aa, Zea mays subsp. mays
  peptide (1)..(197): Ceres Seq. ID no. 12345897
  misc_feature (1)..(173): Homolog of NCBI NO: 25405768 NR Description: T22H22.18 [imported] - Arabidopsis thaliana
  misc_feature (1)..(196): Homolog of NCBI NO: 15221891 NR Description: hypothetical protein; protein id: At1g54770.1
  misc_feature (1)..(196): Homolog of NCBI NO: 30692242 NR Description: expressed protein [Arabidopsis thaliana]
  misc_feature (60)..(195): Homolog of NCBI NO: 31237250 NR Description: ENSANGP00000016794 [Anopheles gambiae]
  misc_feature (63)..(197): Homolog of NCBI NO: 39580393 NR Description: Hypothetical protein CBG17763 [Caenorhabditis
  misc_feature (64)..(197): Homolog of NCBI NO: 17537287 NR Description: Acidic protein mRNA (29.6 kD) [Caenorhabditis
  misc_feature (54)..(186): Homolog of NCBI NO: 24418931 NR Description: hypothetical protein MGC27716 [Mus musculus]
  misc_feature (54)..(186): Homolog of NCBI NO: 8218113 NR Description: dJ561L24.2 (acidic 82 kDa protein) [Homo sapiens]
  misc_feature (54)..(187): Homolog of NCBI NO: 34859943 NR Description: similar to expressed sequence AA408582 [Rattus
  misc_feature (67)..(182): Homolog of NCBI NO: 19114999 NR Description: hypothetical protein [Schizosaccharomyces pombe]
MSETAAPIGLSWAPKLPSFATTSGGSKIDHAPDPSTAQGSLWKRTSELVDGLFVPPRDPRQLNKLARKNVKDTAGKGWFDMPAPTITPELKKDLEILQLRHVIDPKRHFKRAGKSKALPKYFQVGTVVEPASEFYSSRLKNRERKATLVDELLSDQSLKSYRMRKVREIQEIRTPGGNQKWKNKGKKTLKRAKDRRK

SEQ ID NO: 2272 - protein, 117 aa, Zea mays subsp. mays
  peptide (1)..(117): Ceres Seq. ID no. 12345898
  misc_feature (1)..(115): Homolog of NCBI NO: 31237250 NR Description: ENSANGP00000016794 [Anopheles gambiae]
  misc_feature (1)..(117): Homolog of NCBI NO: 39580393 NR Description: Hypothetical protein CBG17763 [Caenorhabditis
  misc_feature (1)..(117): Homolog of NCBI NO: 17537287 NR Description: Acidic protein mRNA (29.6 kD) [Caenorhabditis
  misc_feature (1)..(106): Homolog of NCBI NO: 24418931 NR Description: hypothetical protein MGC27716 [Mus musculus]
  misc_feature (1)..(106): Homolog of NCBI NO: 8218113 NR Description: dJ561L24.2 (acidic 82 kDa protein) [Homo sapiens]
  misc_feature (1)..(107): Homolog of NCBI NO: 34859943 NR Description: similar to expressed sequence AA408582 [Rattus
  misc_feature (1)..(102): Homolog of NCBI NO: 19114999 NR Description: hypothetical protein [Schizosaccharomyces pombe]
  misc_feature (1)..(93): Homolog of NCBI NO: 25405768 NR Description: T22H22.18 [imported] - Arabidopsis thaliana
  misc_feature (1)..(116): Homolog of NCBI NO: 15221891 NR Description: hypothetical protein; protein id: At1g54770.1
  misc_feature (1)..(116): Homolog of NCBI NO: 30692242 NR Description: expressed protein [Arabidopsis thaliana]
MPAPTITPELKKDLEILQLRHVIDPKRHFKRAGKSKALPKYFQVGTVVEPASEFYSSRLKNRERKATLVDELLSDQSLKSYRMRKVREIQEIRTPGGNQKWKNKGKKTLKRAKDRRK

SEQ ID NO: 2273 - DNA, 1304 bp, Zea mays subsp. mays
  misc_feature (1)..(1304): Ceres Seq. ID no. 12347730
  misc_feature: MA Experiment ID: 108687 Result: Down-regulated in Transcription
  misc_feature: MA Experiment 108687 PARAMETER Experiment Name: Zm_Embryos-Flowers__P Parameter: Tissue Value: Embryo vs. Aerial+
cctaatcaaaaaaaaatccgcgccatggtcccccatcccgtccctcccctagtcccctccgacctcttctaaaaatcctggtggctggctctcgttgtcctcaagcagtcaagctcctcctcctcctccccccagtccctcccaggctcccaccccgccttgctcgcagcctccccaaaaccctagccctagccctagccctagccctagctctcccacacccgcactgggagatggacggcggcggcacgcaccgcacgccggaagacgtgttccgggatttccgcgcgcggcgggctggtatgatcaaagcgctcaccaccgacgtggagaagttctaccagcagtgtgacccagagaaagagaatctgtgtttgtatggtcttcccaatgaaacatgggaagtgaacctgcctgcagaggaggttcctcctgaacttccagagccagctctgggaattaattttgctcgtgacgggatggatgaaaaagattggctgtcactagtcgcggtgcacagtgatgcttggttgctggctgtggccttttacttcggtgcaagatttggttttgacaaagaatccaggaagcgcctttttgtcatgattaataacctccctacaatatatgaagttgtcacgggaactgccaagaagcaaaccaaggagaaaactcccaaaagcagcagcaagagcaataaagctggcccaaaaccgccacgccagccagaacccaactcaaggggttcgaagatgccacctccgaaggatgaggatgacagcggaggcgaggaagaggaggaagaggaagatcacgaaaacacgctgtgtggttcttgtggtgacaactacggacaggatgagttctggatatgctgtgatgcgtgcgagacttggttccatggcaagtgtgtcaagatcactcctgccaaggccgaacacatcaagcactacaagtgtccgaactgcagcggtagtggcaagagagcccgagcatgatgatgctggctggatatatccatctctcatgcctgacttgatgtaaaacgcccacatggggaccgaatgcccgatggctgttgctttcagtgtaggaccagctgtgtaggttcttgatgtgctgtttgctgtagtatgtcaaagacgttctagatctattgttagtaactagcaactaattgtagtagcctgtatttcttcaatcttctcccagggcgcctgtgctgaactcaaaactgttttagatctaagttgtgcattatgtatcactcatgttagtttgttaaaaagtgtgttagcattcgc

SEQ ID NO: 2274 - protein, 254 aa, Zea mays subsp. mays
  peptide (1)..(254): Ceres Seq. ID no. 12347731
  misc_feature (198)..(248): Pfam Name: PHD-finger Pfam Description: PHD-finger
  misc_feature (3)..(254): Homolog of NCBI NO: 34907474 NR Description: nucleic acid binding protein [Oryza sativa
  misc_feature (3)..(254): Homolog of NCBI NO: 4091080 NR Description: nucleic acid binding protein [Oryza sativa]
  misc_feature (3)..(254): Homolog of NCBI NO: 11281498 NR Description: nucleic acid binding protein [imported] - rice
  misc_feature (8)..(250): Homolog of NCBI NO: 15223786 NR Description: nucleic acid binding protein (alfin-1), putative;
  misc_feature (4)..(253): Homolog of NCBI NO: 15226967 NR Description: putative PHD-type zinc finger protein; protein
  misc_feature (4)..(253): Homolog of NCBI NO: 21593407 NR Description: putative PHD-type zinc finger protein
  misc_feature (32)..(250): Homolog of NCBI NO: 25346630 NR Description: F14L17.29 protein - Arabidopsis thaliana
  misc_feature (8)..(30): Homolog of NCBI NO: 25346630 NR Description: F14L17.29 protein - Arabidopsis thaliana
  misc_feature (1)..(254): Homolog of NCBI NO: 15239624 NR Description: nucleic acid binding protein - like; protein id:
  misc_feature (1)..(253): Homolog of NCBI NO: 30687843 NR Description: zinc finger protein - like [Arabidopsis thaliana]
MDGGGTHRTPEDVFRDFRARRAGMIKALTTDVEKFYQQCDPEKENLCLYGLPNETWEVNLPAEEVPPELPEPALGINFARDGMDEKDWLSLVAVHSDAWLLAVAFYFGARFGFDKESRKRLFVMINNLPTIYEVVTGTAKKQTKEKTPKSSSKSNKAGPKPPRQPEPNSRGSKMPPPKDEDDSGGEEEEEEEDHENTLCGSCGDNYGQDEFWICCDACETWFHGKCVKITPAKAEHIKHYKCPNCSGSGKRARA

SEQ ID NO: 2275 - protein, 231 aa, Zea mays subsp. mays
  peptide (1)..(231): Ceres Seq. ID no. 12347732
  misc_feature (175)..(225): Pfam Name: PHD-finger Pfam Description: PHD-finger
  misc_feature (1)..(231): Homolog of NCBI NO: 11281498 NR Description: nucleic acid binding protein [imported] - rice
  misc_feature (1)..(227): Homolog of NCBI NO: 15223786 NR Description: nucleic acid binding protein (alfin-1), putative;
  misc_feature (1)..(230): Homolog of NCBI NO: 15226967 NR Description: putative PHD-type zinc finger protein; protein
  misc_feature (1)..(230): Homolog of NCBI NO: 21593407 NR Description: putative PHD-type zinc finger protein
  misc_feature (1)..(231): Homolog of NCBI NO: 34907474 NR Description: nucleic acid binding protein [Oryza sativa
  misc_feature (1)..(231): Homolog of NCBI NO: 4091080 NR Description: nucleic acid binding protein [Oryza sativa]
  misc_feature (9)..(227): Homolog of NCBI NO: 25346630 NR Description: F14L17.29 protein - Arabidopsis thaliana
  misc_feature (1)..(231): Homolog of NCBI NO: 15239624 NR Description: nucleic acid binding protein - like; protein id:
  misc_feature (1)..(230): Homolog of NCBI NO: 30687843 NR Description: zinc finger protein - like [Arabidopsis thaliana]
  misc_feature (1)..(223): Homolog of NCBI NO: 7488751 NR Description: probable zinc finger protein - alfalfa (fragment)
MIKALTTDVEKFYQQCDPEKENLCLYGLPNETWEVNLPAEEVPPELPEPALGINFARDGMDEKDWLSLVAVHSDAWLLAVAFYFGARFGFDKESRKRLFVMINNLPTIYEVVTGTAKKQTKEKTPKSSSKSNKAGPKPPRQPEPNSRGSKMPPPKDEDDSGGEEEEEEEDHENTLCGSCGDNYGQDEFWICCDACETWFHGKCVKITPAKAEHIKHYKCPNCSGSGKRARA

SEQ ID NO: 2276 - protein, 172 aa, Zea mays subsp. mays
  peptide (1)..(172): Ceres Seq. ID no. 12347733
  misc_feature (116)..(166): Pfam Name: PHD-finger Pfam Description: PHD-finger
  misc_feature (1)..(172): Homolog of NCBI NO: 34907474 NR Description: nucleic acid binding protein [Oryza sativa
  misc_feature (1)..(172): Homolog of NCBI NO: 4091080 NR Description: nucleic acid binding protein [Oryza sativa]
  misc_feature (1)..(172): Homolog of NCBI NO: 11281498 NR Description: nucleic acid binding protein [imported] - rice
  misc_feature (1)..(168): Homolog of NCBI NO: 15223786 NR Description: nucleic acid binding protein (alfin-1), putative;
  misc_feature (1)..(171): Homolog of NCBI NO: 15226967 NR Description: putative PHD-type zinc finger protein; protein
  misc_feature (1)..(171): Homolog of NCBI NO: 21593407 NR Description: putative PHD-type zinc finger protein
  misc_feature (1)..(168): Homolog of NCBI NO: 25346630 NR Description: F14L17.29 protein - Arabidopsis thaliana
  misc_feature (1)..(172): Homolog of NCBI NO: 15239624 NR Description: nucleic acid binding protein - like; protein id:
  misc_feature (1)..(171): Homolog of NCBI NO: 30687843 NR Description: zinc finger protein - like [Arabidopsis thaliana]
  misc_feature (1)..(164): Homolog of NCBI NO: 7488751 NR Description: probable zinc finger protein - alfalfa (fragment)
MDEKDWLSLVAVHSDAWLLAVAFYFGARFGFDKESRKRLFVMINNLPTIYEVVTGTAKKQTKEKTPKSSSKSNKAGPKPPRQPEPNSRGSKMPPPKDEDDSGGEEEEEEEDHENTLCGSCGDNYGQDEFWICCDACETWFHGKCVKITPAKAEHIKHYKCPNCSGSGKRARA

SEQ ID NO: 2277 - DNA, 1020 bp, Zea mays subsp. mays
  misc_feature (1)..(1020): Ceres Seq. ID no. 12355909
  misc_feature: MA Experiment ID: 108527 Result: Down-regulated in Transcription
  misc_feature: MA Experiment 108527 PARAMETER Experiment Name: Zm_5mM_NO_P Parameter: Age (day) Value: 8
  misc_feature: MA Experiment 108527 PARAMETER Experiment Name: Zm_5mM_NO_P Parameter: Organism Value: Zea mays
  misc_feature: MA Experiment 108527 PARAMETER Experiment Name: Zm_5mM_NO_P Parameter: Plant Line Value: 35A19
  misc_feature: MA Experiment 108527 PARAMETER Experiment Name: Zm_5mM_NO_P Parameter: Timepoint (hr) Value: 6
  misc_feature: MA Experiment 108527 PARAMETER Experiment Name: Zm_5mM_NO_P Parameter: Tissue Value: Aerial
  misc_feature: MA Experiment 108527 PARAMETER Experiment Name: Zm_5mM_NO_P Parameter: Treatment Value: 5mM NO vs. No Treatment
  misc_feature: MA Experiment ID: 108529 Result: Up-regulated in Transcription
  misc_feature: MA Experiment 108529 PARAMETER Experiment Name: Zm_Imbibed_Seeds_P Parameter: Age (day) Value: 5 vs. 2
  misc_feature: MA Experiment 108529 PARAMETER Experiment Name: Zm_Imbibed_Seeds_P Parameter: Organism Value: Zea mays
  misc_feature: MA Experiment 108529 PARAMETER Experiment Name: Zm_Imbibed_Seeds_P Parameter: Plant Line Value: 35A19
  misc_feature: MA Experiment 108529 PARAMETER Experiment Name: Zm_Imbibed_Seeds_P Parameter: Tissue Value: Roots vs. Embryo
  misc_feature: MA Experiment ID: 108530 Result: Up-regulated in Transcription
  misc_feature: MA Experiment 108530 PARAMETER Experiment Name: Zm_Imbibed_Seeds_P Parameter: Age (day) Value: 6 vs. 2
  misc_feature: MA Experiment 108530 PARAMETER Experiment Name: Zm_Imbibed_Seeds_P Parameter: Organism Value: Zea mays
  misc_feature: MA Experiment 108530 PARAMETER Experiment Name: Zm_Imbibed_Seeds_P Parameter: Plant Line Value: 35A19
  misc_feature: MA Experiment 108530 PARAMETER Experiment Name: Zm_Imbibed_Seeds_P Parameter: Tissue Value: Aerial vs. Embryo
  misc_feature: MA Experiment ID: 108535 Result: Down-regulated in Transcription
  misc_feature: MA Experiment 108535 PARAMETER Experiment Name: Zm_Meristem_P Parameter: Age (day) Value: 8
  misc_feature: MA Experiment 108535 PARAMETER Experiment Name: Zm_Meristem_P Parameter: Organism Value: Zea mays
  misc_feature: MA Experiment 108535 PARAMETER Experiment Name: Zm_Meristem_P Parameter: Plant Line Value: 35A19
  misc_feature: MA Experiment 108535 PARAMETER Experiment Name: Zm_Meristem_P Parameter: Tissue Value: Root Meristem vs. Above Root Meristem
  misc_feature: MA Experiment ID: 108547 Result: Up-regulated in Transcription
  misc_feature: MA Experiment 108547 PARAMETER Experiment Name: Zm_Imbibed_Seeds_P Parameter: Age (day) Value: 4 vs. 2
  misc_feature: MA Experiment 108547 PARAMETER Experiment Name: Zm_Imbibed_Seeds_P Parameter: Organism Value: Zea mays
  misc_feature: MA Experiment 108547 PARAMETER Experiment Name: Zm_Imbibed_Seeds_P Parameter: Plant Line Value: 35A19
  misc_feature: MA Experiment 108547 PARAMETER Experiment Name: Zm_Imbibed_Seeds_P Parameter: Tissue Value: Aerial vs. Embryo
  misc_feature: MA Experiment ID: 108559 Result: Down-regulated in Transcription
  misc_feature: MA Experiment 108559 PARAMETER Experiment Name: Zm_5mM_NO_P Parameter: Age (day) Value: 8
  misc_feature: MA Experiment 108559 PARAMETER Experiment Name: Zm_5mM_NO_P Parameter: Organism Value: Zea mays
  misc_feature: MA Experiment 108559 PARAMETER Experiment Name: Zm_5mM_NO_P Parameter: Plant Line Value: 35A19
  misc_feature: MA Experiment 108559 PARAMETER Experiment Name: Zm_5mM_NO_P Parameter: Timepoint (hr) Value: 12
  misc_feature: MA Experiment 108559 PARAMETER Experiment Name: Zm_5mM_NO_P Parameter: Tissue Value: Aerial
  misc_feature: MA Experiment 108559 PARAMETER Experiment Name: Zm_5mM_NO_P Parameter: Treatment Value: 5mM NO vs. No Treatment
  misc_feature: MA Experiment ID: 20000478 Result: Down-regulated in Transcription
  misc_feature: MA Experiment 20000478 PARAMETER Experiment Name: Zm_5mM_SA_P Parameter: Age (day) Value: 11
  misc_feature: MA Experiment 20000478 PARAMETER Experiment Name: Zm_5mM_SA_P Parameter: Organism Value: Zea mays
  misc_feature: MA Experiment 20000478 PARAMETER Experiment Name: Zm_5mM_SA_P Parameter: Plant Line Value: 35A19
  misc_feature: MA Experiment 20000478 PARAMETER Experiment Name: Zm_5mM_SA_P Parameter: Timepoint (hr) Value: 72
  misc_feature: MA Experiment 20000478 PARAMETER Experiment Name: Zm_5mM_SA_P Parameter: Tissue Value: Aerial
  misc_feature: MA Experiment 20000478 PARAMETER Experiment Name: Zm_5mM_SA_P Parameter: Treatment Value: 5mM SA vs. No Treatment
  misc_feature: MA Experiment ID: 20000535 Result: Down-regulated in Transcription
  misc_feature: MA Experiment 20000535 PARAMETER Experiment Name: Zm_Hybrid_Seed_Dev_P Parameter: DAP Value: 30 vs. 12
  misc_feature: MA Experiment 20000535 PARAMETER Experiment Name: Zm_Hybrid_Seed_Dev_P Parameter: Organism Value: Zea mays
  misc_feature: MA Experiment 20000535 PARAMETER Experiment Name: Zm_Hybrid_Seed_Dev_P Parameter: Plant Line Value: 35A19
  misc_feature: MA Experiment 20000535 PARAMETER Experiment Name: Zm_Hybrid_Seed_Dev_P Parameter: Tissue Value: Embryo vs. Unfert Floret
cccgcactctctctcaactcattggcagcagcaaccgcagccgcgagggccaagcaggggggacaaggaaaagggccgacgaagaggaaaaaggaagaacgcgtcgcggagccatggggcttggccttggcgtgcgggcggcgcccttcacgtacgcggcgcacgcactggccgtcgcggcggcggccatggttctcgtctggtccatccagttccgcggcgggctcgccatcgagtccaccaacaagaacctcatcttcaacgttcaccctgttcttatgcttatcggttatgttattatcggcggtgaagctataatggtgtacagggtacttccaacatcgaatcatgacacaactaagctgatccatctaattctccacgggattgcacttgtccttggtgcggttggaatatactttgctttcaaaaatcacaatgagagtgggattgccaatctttacagcctgcactcttggattgggataggaacaattactttgtatggtattcagtggataattggattcgtcacgttcttcttccctggtgctgcgccaaacgtgaagaagggtgttcttccttggcacgtactctttgggctctttgtctacatcttagcactggctaatgcagaactcggctttcttgagaagctcactttcctcgagagctcaggtctcgacaaatatggcacagaggcattcttagtgaacttcacagcattggttgtcgtgttatttggtgcctctgttgtggtggctgctatagctccagttcgccttgaagaaccacagggttatgatccaattccagaaaactagtgcaaatgaaatgtacagcgtatgcagttgccaagattggctgttaccacatggagataagatattcatgtctctttattgacggagaagaaggtgatggaattatcacaataaagatgtagacataaatgtgtgtgtatatacattctgtgacacttcaaaatttcagtatatgcaaaactgaatatcctgcttc

SEQ ID NO: 2278 - protein, 273 aa, Zea mays subsp. mays
  peptide (1)..(273): Ceres Seq. ID no. 12355910
  misc_feature (48)..(259): Homolog of NCBI NO: 15240965 NR Description: cytochrome b-561 (gb|AAD45585.1)
  misc_feature (53)..(254): Homolog of NCBI NO: 38637027 NR Description: putative cytochrome b561 [Oryza sativa (japonica
  misc_feature (38)..(227): Homolog of NCBI NO: 6822123 NR Description: putative cytochrome B 561 [Craterostigma
  misc_feature (40)..(257): Homolog of NCBI NO: 12597245 NR Description: cytochrome b561 [Arabidopsis thaliana]
  misc_feature (23)..(257): Homolog of NCBI NO: 25407597 NR Description: hypothetical protein AT4g25570 [imported] -
  misc_feature (40)..(257): Homolog of NCBI NO: 21553731 NR Description: cytochrome b561 [Arabidopsis thaliana]
  misc_feature (40)..(257): Homolog of NCBI NO: 18416576 NR Description: putative protein
  misc_feature (23)..(257): Homolog of NCBI NO: 7486819 NR Description: hypothetical protein M7J2.60 - Arabidopsis
  misc_feature (46)..(270): Homolog of NCBI NO: 37535830 NR Description: putative cytochrome b-561
  misc_feature (38)..(273): Homolog of NCBI NO: 38346996 NR Description: OSJNBb0039L24.15 [Oryza sativa (japonica
RTLSQLIGSSNRSREGQAGGTRKRADEEEKGRTRRGAMGLGLGVRAAPFTYAAHALAVAAAAMVLVWSIQFRGGLAIESTNKNLIFNVHPVLMLIGYVIIGGEAIMVYRVLPTSNHDTTKLIHLILHGIALVLGAVGIYFAFKNHNESGIANLYSLHSWIGIGTITLYGIQWIIGFVTFFFPGAAPNVKKGVLPWHVLFGLFVYILALANAELGFLEKLTFLESSGLDKYGTEAFLVNFTALVVVLFGASVVVAAIAPVRLEEPQGYDPIPEN

SEQ ID NO: 2279 - protein, 236 aa, Zea mays subsp. mays
  peptide (1)..(236): Ceres Seq. ID no. 12355911
  misc_feature (11)..(222): Homolog of NCBI NO: 15240965 NR Description: cytochrome b-561 (gb|AAD45585.1)
  misc_feature (16)..(217): Homolog of NCBI NO: 38637027 NR Description: putative cytochrome b561 [Oryza sativa (japonica
  misc_feature (1)..(190): Homolog of NCBI NO: 6822123 NR Description: putative cytochrome B 561 [Craterostigma
  misc_feature (3)..(220): Homolog of NCBI NO: 12597245 NR Description: cytochrome b561 [Arabidopsis thaliana]
  misc_feature (1)..(220): Homolog of NCBI NO: 25407597 NR Description: hypothetical protein AT4g25570 [imported] -
  misc_feature (3)..(220): Homolog of NCBI NO: 21553731 NR Description: cytochrome b561 [Arabidopsis thaliana]
  misc_feature (3)..(220): Homolog of NCBI NO: 18416576 NR Description: putative protein
  misc_feature (1)..(220): Homolog of NCBI NO: 7486819 NR Description: hypothetical protein M7J2.60 - Arabidopsis
  misc_feature (9)..(233): Homolog of NCBI NO: 37535830 NR Description: putative cytochrome b-561
  misc_feature (1)..(236): Homolog of NCBI NO: 38346996 NR Description: OSJNBb0039L24.15 [Oryza sativa (japonica
MGLGLGVRAAPFTYAAHALAVAAAAMVLVWSIQFRGGLAIESTNKNLIFNVHPVLMLIGYVIIGGEAIMVYRVLPTSNHDTTKLIHLILHGIALVLGAVGIYFAFKNHNESGIANLYSLHSWIGIGTITLYGIQWIIGFVTFFFPGAAPNVKKGVLPWHVLFGLFVYILALANAELGFLEKLTFLESSGLDKYGTEAFLVNFTALVVVLFGASVVVAAIAPVRLEEPQGYDPIPEN

SEQ ID NO: 2280 - protein, 211 aa, Zea mays subsp. mays
  peptide (1)..(211): Ceres Seq. ID no. 12355912
  misc_feature (1)..(197): Homolog of NCBI NO: 15240965 NR Description: cytochrome b-561 (gb|AAD45585.1)
  misc_feature (1)..(192): Homolog of NCBI NO: 38637027 NR Description: putative cytochrome b561 [Oryza sativa (japonica
  misc_feature (1)..(165): Homolog of NCBI NO: 6822123 NR Description: putative cytochrome B 561 [Craterostigma
  misc_feature (1)..(195): Homolog of NCBI NO: 12597245 NR Description: cytochrome b561 [Arabidopsis thaliana]
  misc_feature (1)..(195): Homolog of NCBI NO: 25407597 NR Description: hypothetical protein AT4g25570 [imported] -
  misc_feature (1)..(195): Homolog of NCBI NO: 21553731 NR Description: cytochrome b561 [Arabidopsis thaliana]
  misc_feature (1)..(195): Homolog of NCBI NO: 18416576 NR Description: putative protein
  misc_feature (1)..(195): Homolog of NCBI NO: 7486819 NR Description: hypothetical protein M7J2.60 - Arabidopsis
  misc_feature (1)..(208): Homolog of NCBI NO: 37535830 NR Description: putative cytochrome b-561
  misc_feature (1)..(211): Homolog of NCBI NO: 38346996 NR Description: OSJNBb0039L24.15 [Oryza sativa (japonica
MVLVWSIQFRGGLAIESTNKNLIFNVHPVLMLIGYVIIGGEAIMVYRVLPTSNHDTTKLIHLILHGIALVLGAVGIYFAFKNHNESGIANLYSLHSWIGIGTITLYGIQWIIGFVTFFFPGAAPNVKKGVLPWHVLFGLFVYILALANAELGFLEKLTFLESSGLDKYGTEAFLVNFTALVVVLFGASVVVAAIAPVRLEEPQGYDPIPEN

SEQ ID NO: 2281 - DNA, 1155 bp, Zea mays subsp. mays
  misc_feature (1)..(1155): Ceres Seq. ID no. 12353616
  misc_feature: MA Experiment ID: 108528 Result: Up-regulated in Transcription
  misc_feature: MA Experiment 108528 PARAMETER Experiment Name: Zm_Imbibed_Seeds_P Parameter: Age (day) Value: 5 vs. 2
  misc_feature: MA Experiment 108528 PARAMETER Experiment Name: Zm_Imbibed_Seeds_P Parameter: Organism Value: Zea mays
  misc_feature: MA Experiment 108528 PARAMETER Experiment Name: Zm_Imbibed_Seeds_P Parameter: Plant Line Value: 35A19
  misc_feature: MA Experiment 108528 PARAMETER Experiment Name: Zm_Imbibed_Seeds_P Parameter: Tissue Value: Aerial vs. Embryo
  misc_feature: MA Experiment ID: 108529 Result: Down-regulated in Transcription
  misc_feature: MA Experiment 108529 PARAMETER Experiment Name: Zm_Imbibed_Seeds_P Parameter: Age (day) Value: 5 vs. 2
  misc_feature: MA Experiment 108529 PARAMETER Experiment Name: Zm_Imbibed_Seeds_P Parameter: Organism Value: Zea mays
  misc_feature: MA Experiment 108529 PARAMETER Experiment Name: Zm_Imbibed_Seeds_P Parameter: Plant Line Value: 35A19
  misc_feature: MA Experiment 108529 PARAMETER Experiment Name: Zm_Imbibed_Seeds_P Parameter: Tissue Value: Roots vs. Embryo
  misc_feature: MA Experiment ID: 108530 Result: Up-regulated in Transcription
  misc_feature: MA Experiment 108530 PARAMETER Experiment Name: Zm_Imbibed_Seeds_P Parameter: Age (day) Value: 6 vs. 2
  misc_feature: MA Experiment 108530 PARAMETER Experiment Name: Zm_Imbibed_Seeds_P Parameter: Organism Value: Zea mays
  misc_feature: MA Experiment 108530 PARAMETER Experiment Name: Zm_Imbibed_Seeds_P Parameter: Plant Line Value: 35A19
  misc_feature: MA Experiment 108530 PARAMETER Experiment Name: Zm_Imbibed_Seeds_P Parameter: Tissue Value: Aerial vs. Embryo
  misc_feature: MA Experiment ID: 108534 Result: Down-regulated in Transcription
  misc_feature: MA Experiment 108534 PARAMETER Experiment Name: Zm_4deg_Cold_P Parameter: Age (hr) Value: 8
  misc_feature: MA Experiment 108534 PARAMETER Experiment Name: Zm_4deg_Cold_P Parameter: Organism Value: Zea mays
  misc_feature: MA Experiment 108534 PARAMETER Experiment Name: Zm_4deg_Cold_P Parameter: Plant Line Value: 35A19
  misc_feature: MA Experiment 108534 PARAMETER Experiment Name: Zm_4deg_Cold_P Parameter: Temperature (deg C) Value: 4 vs. 22
  misc_feature: MA Experiment 108534 PARAMETER Experiment Name: Zm_4deg_Cold_P Parameter: Timepoint (hr) Value: 6
  misc_feature: MA Experiment 108534 PARAMETER Experiment Name: Zm_4deg_Cold_P Parameter: Tissue Value: Aerial
  misc_feature: MA Experiment ID: 108544 Result: Down-regulated in Transcription
  misc_feature: MA Experiment ID: 108556 Result: Down-regulated in Transcription
  misc_feature: MA Experiment 108556 PARAMETER Experiment Name: Zm_Drought_P Parameter: Age (day) Value: 9
  misc_feature: MA Experiment 108556 PARAMETER Experiment Name: Zm_Drought_P Parameter: Organism Value: Zea mays
  misc_feature: MA Experiment 108556 PARAMETER Experiment Name: Zm_Drought_P Parameter: Plant Line Value: 35A19
  misc_feature: MA Experiment 108556 PARAMETER Experiment Name: Zm_Drought_P Parameter: Timepoint (hr) Value: 24
  misc_feature: MA Experiment 108556 PARAMETER Experiment Name: Zm_Drought_P Parameter: Tissue Value: Aerial
  misc_feature: MA Experiment 108556 PARAMETER Experiment Name: Zm_Drought_P Parameter: Treatment Value: Drought vs. No Drought
  misc_feature: MA Experiment ID: 108689 Result: Down-regulated in Transcription
  misc_feature: MA Experiment 108689 PARAMETER Experiment Name: Zm_Drought_Roots_P Parameter: Age (day) Value: 9
  misc_feature: MA Experiment 108689 PARAMETER Experiment Name: Zm_Drought_Roots_P Parameter: Organism Value: Zea mays
  misc_feature: MA Experiment 108689 PARAMETER Experiment Name: Zm_Drought_Roots_P Parameter: Plant Line Value: 35A19
  misc_feature: MA Experiment 108689 PARAMETER Experiment Name: Zm_Drought_Roots_P Parameter: Timepoint (hr) Value: 24
  misc_feature: MA Experiment 108689 PARAMETER Experiment Name: Zm_Drought_Roots_P Parameter: Tissue Value: Roots
  misc_feature: MA Experiment 108689 PARAMETER Experiment Name: Zm_Drought_Roots_P Parameter: Treatment Value: Drought vs. No Drought
  misc_feature: MA Experiment ID: 20000477 Result: Down-regulated in Transcription
  misc_feature: MA Experiment 20000477 PARAMETER Experiment Name: Zm_5mM_SA_P Parameter: Age (day) Value: 10
  misc_feature: MA Experiment 20000477 PARAMETER Experiment Name: Zm_5mM_SA_P Parameter: Organism Value: Zea mays
  misc_feature: MA Experiment 20000477 PARAMETER Experiment Name: Zm_5mM_SA_P Parameter: Plant Line Value: 35A19
  misc_feature: MA Experiment 20000477 PARAMETER Experiment Name: Zm_5mM_SA_P Parameter: Timepoint (hr) Value: 48
  misc_feature: MA Experiment 20000477 PARAMETER Experiment Name: Zm_5mM_SA_P Parameter: Tissue Value: Aerial
  misc_feature: MA Experiment 20000477 PARAMETER Experiment Name: Zm_5mM_SA_P Parameter: Treatment Value: 5mM SA vs. No Treatment
  misc_feature: MA Experiment ID: 20000478 Result: Down-regulated in Transcription
  misc_feature: MA Experiment 20000478 PARAMETER Experiment Name: Zm_5mM_SA_P Parameter: Age (day) Value: 11
  misc_feature: MA Experiment 20000478 PARAMETER Experiment Name: Zm_5mM_SA_P Parameter: Organism Value: Zea mays
  misc_feature: MA Experiment 20000478 PARAMETER Experiment Name: Zm_5mM_SA_P Parameter: Plant Line Value: 35A19
  misc_feature: MA Experiment 20000478 PARAMETER Experiment Name: Zm_5mM_SA_P Parameter: Timepoint (hr) Value: 72
  misc_feature: MA Experiment 20000478 PARAMETER Experiment Name: Zm_5mM_SA_P Parameter: Tissue Value: Aerial
  misc_feature: MA Experiment 20000478 PARAMETER Experiment Name: Zm_5mM_SA_P Parameter: Treatment Value: 5mM SA vs. No Treatment
  misc_feature: MA Experiment ID: 20000480 Result: Down-regulated in Transcription
  misc_feature: MA Experiment 20000480 PARAMETER Experiment Name: Zm_Drought_P Parameter: Age (day) Value: 11
  misc_feature: MA Experiment 20000480 PARAMETER Experiment Name: Zm_Drought_P Parameter: Organism Value: Zea mays
  misc_feature: MA Experiment 20000480 PARAMETER Experiment Name: Zm_Drought_P Parameter: Plant Line Value: 35A19
  misc_feature: MA Experiment 20000480 PARAMETER Experiment Name: Zm_Drought_P Parameter: Timepoint (hr) Value: 72
  misc_feature: MA Experiment 20000480 PARAMETER Experiment Name: Zm_Drought_P Parameter: Tissue Value: Aerial
  misc_feature: MA Experiment 20000480 PARAMETER Experiment Name: Zm_Drought_P Parameter: Treatment Value: Drought vs. No Drought
  misc_feature: MA Experiment ID: 20000534 Result: Down-regulated in Transcription
  misc_feature: MA Experiment 20000534 PARAMETER Experiment Name: Zm_Hybrid_Pollen_P Parameter: Age (day) Value: 8
  misc_feature: MA Experiment 20000534 PARAMETER Experiment Name: Zm_Hybrid_Pollen_P Parameter: Organism Value: Zea mays
  misc_feature: MA Experiment 20000534 PARAMETER Experiment Name: Zm_Hybrid_Pollen_P Parameter: Plant Line Value: 35A19
  misc_feature: MA Experiment 20000534 PARAMETER Experiment Name: Zm_Hybrid_Pollen_P Parameter: Tissue Value: Pollen vs. Aerial
cacgggcgcctgcctctacgaggtggcctacggcgacggctcctacaccgtgggcgacttcgccaccgagacgctcacgctgggggactccaccccggtcggcaacgtcgccatcgggtgcggccacgacaacgagggcctcttcgtcggcgccgcggggctgctggcgctgggcggcgggccgctctccttcccgtcccagatctccgcgtccaccttctcctactgcctcgtggaccgcgactccccggccgcgtccacgctccagttcggcgacggcgccgccgaggcgggcaccgtgacggcgcctctcgtgcgcagcccgcgcacgagcaccttctactacgtggcgctgtcgggcatctcggtgggcgggcagccgctgtccatcccggcatccgccttcgccatggacgccacgtcgggctcgggcggcgtcatcgtggactccggcaccgccgtgacgcggctccagtccgccgcctacgcggcgctccgcgacgccttcgtccagggcgcgccgtcgcttccccggacctccggggtgtcgctgttcgacacgtgctacgacctgtcggaccggacgagcgtggaggtgcccgcggtgtcgctgcggttcgagggcggcggcgcgctgcggctgccggcgaagaactacctgatccccgtggacggagccggcacctactgcctggccttcgcgccgacgaacgcggccgtgtccatcatcgggaacgtgcagcagcagggcacccgcgtcagcttcgacaccgccaggggcgccgtcggcttcacccccaacaagtgctagcctagcctagcctaagcctgccttctggccctgttagccacggttgtcagtagtaatgacaagccggtgtttaattagcgggagaatgattagatggggggtaattaagcggtgggccctgccgggtctggggaggagcgaaaggcaaaggcgaggacagatgatgccattgccatgccagcctgtgtccggccgatgggtccagctccagcagtgtttctctctttctctcgagtatgcgtgcgtggagccttgtcatgacgaattagatcgtgggggctcccaagttaagagtatttatttttattttatttgctatgtcaagaaaatggaagtttccatcc

SEQ ID NO: 2282 - protein, 271 aa, Zea mays subsp. mays
  peptide (1)..(271): Ceres Seq. ID no. 12353617
  misc_feature (2)..(193): Pfam Name: Amidohydrolase family Pfam Description: Amidohydrolase family
HGRLPLRGGLRRRLLHRGRLRHRDAHAGGLHPGRQRRHRVRPRQRGPLRRRRGAAGAGRRAALLPVPDLRVHLLLLPRGPRLPGRVHAPVRRRRRRGGHRDGASRAQPAHEHLLLRGAVGHLGGRAAAVHPGIRLRHGRHVGLGRRHRGLRHRRDAAPVRRLRGAPRRLRPGRAVASPDLRGVAVRHVLRPVGPDERGGARGVAAVRGRRRAAAAGEELPDPRGRSRHLLPGLRADERGRVHHRERAAAGHPRQLRHRQGRRRLHPQQVLA

SEQ ID NO: 2283 - protein, 269 aa, Zea mays subsp. mays
  peptide (1)..(269): Ceres Seq. ID no. 12353618
  misc_feature (1)..(267): Pfam Name: Eukaryotic aspartyl protease Pfam Description: Eukaryotic aspartyl protease
  misc_feature (4)..(269): Homolog of NCBI NO: 15229656 NR Description: putative chloroplast nucleoid DNA-binding protein
  misc_feature (4)..(269): Homolog of NCBI NO: 15222611 NR Description: hypothetical protein
  misc_feature (4)..(269): Homolog of NCBI NO: 15223368 NR Description: chloroplast nucleoid DNA binding protein, putative
  misc_feature (1)..(269): Homolog of NCBI NO: 28392860 NR Description: unknown protein [Arabidopsis thaliana]
  misc_feature (3)..(269): Homolog of NCBI NO: 15290061 NR Description: nucleoid DNA-binding protein cnd41-like protein
  misc_feature (4)..(269): Homolog of NCBI NO: 19424106 NR Description: putative chloroplast nucleoid DNA-binding protein
  misc_feature (1)..(269): Homolog of NCBI NO: 15231010 NR Description: hypothetical protein, 5' partial
  misc_feature (4)..(269): Homolog of NCBI NO: 15228618 NR Description: putative protein
  misc_feature (4)..(269): Homolog of NCBI NO: 21594980 NR Description: chloroplast nucleoid DNA binding protein,
  misc_feature (1)..(269): Homolog of NCBI NO: 34895664 NR Description: nucleoid DNA-binding protein cnd41-like protein
TGACLYEVAYGDGSYTVGDFATETLTLGDSTPVGNVAIGCGHDNEGLFVGAAGLLALGGGPLSFPSQISASTFSYCLVDRDSPAASTLQFGDGAAEAGTVTAPLVRSPRTSTFYYVALSGISVGGQPLSIPASAFAMDATSGSGGVIVDSGTAVTRLQSAAYAALRDAFVQGAPSLPRTSGVSLFDTCYDLSDRTSVEVPAVSLRFEGGGALRLPAKNYLIPVDGAGTYCLAFAPTNAAVSIIGNVQQQGTRVSFDTARGAVGFTPNKC

SEQ ID NO: 2284 - DNA, 1821 bp, Zea mays subsp. mays
  misc_feature (1)..(1821): Ceres Seq. ID no. 12443245
  misc_feature: MA Experiment ID: 108530 Result: Down-regulated in Transcription
  misc_feature: MA Experiment 108530 PARAMETER Experiment Name: Zm_Imbibed_Seeds_P Parameter: Age (day) Value: 6 vs. 2
  misc_feature: MA Experiment 108530 PARAMETER Experiment Name: Zm_Imbibed_Seeds_P Parameter: Organism Value: Zea mays
  misc_feature: MA Experiment 108530 PARAMETER Experiment Name: Zm_Imbibed_Seeds_P Parameter: Plant Line Value: 35A19
  misc_feature: MA Experiment 108530 PARAMETER Experiment Name: Zm_Imbibed_Seeds_P Parameter: Tissue Value: Aerial vs. Embryo
  misc_feature: MA Experiment ID: 108535 Result: Up-regulated in Transcription
  misc_feature: MA Experiment 108535 PARAMETER Experiment Name: Zm_Meristem_P Parameter: Age (day) Value: 8
  misc_feature: MA Experiment 108535 PARAMETER Experiment Name: Zm_Meristem_P Parameter: Organism Value: Zea mays
  misc_feature: MA Experiment 108535 PARAMETER Experiment Name: Zm_Meristem_P Parameter: Plant Line Value: 35A19
  misc_feature: MA Experiment 108535 PARAMETER Experiment Name: Zm_Meristem_P Parameter: Tissue Value: Root Meristem vs. Above Root Meristem
  misc_feature: MA Experiment ID: 108544 Result: Down-regulated in Transcription
  misc_feature: MA Experiment ID: 108556 Result: Down-regulated in Transcription
  misc_feature: MA Experiment 108556 PARAMETER Experiment Name: Zm_Drought_P Parameter: Age (day) Value: 9
  misc_feature: MA Experiment 108556 PARAMETER Experiment Name: Zm_Drought_P Parameter: Organism Value: Zea mays
  misc_feature: MA Experiment 108556 PARAMETER Experiment Name: Zm_Drought_P Parameter: Plant Line Value: 35A19
  misc_feature: MA Experiment 108556 PARAMETER Experiment Name: Zm_Drought_P Parameter: Timepoint (hr) Value: 24
  misc_feature: MA Experiment 108556 PARAMETER Experiment Name: Zm_Drought_P Parameter: Tissue Value: Aerial
  misc_feature: MA Experiment 108556 PARAMETER Experiment Name: Zm_Drought_P Parameter: Treatment Value: Drought vs. No Drought
  misc_feature: MA Experiment ID: 20000492 Result: Up-regulated in Transcription
  misc_feature: MA Experiment 20000492 PARAMETER Experiment Name: Zm_Hybrid_Seed_Dev_P Parameter: DAP Value: 12
  misc_feature: MA Experiment 20000492 PARAMETER Experiment Name: Zm_Hybrid_Seed_Dev_P Parameter: Organism Value: Zea mays
  misc_feature: MA Experiment 20000492 PARAMETER Experiment Name: Zm_Hybrid_Seed_Dev_P Parameter: Plant Line Value: 35A19
  misc_feature: MA Experiment 20000492 PARAMETER Experiment Name: Zm_Hybrid_Seed_Dev_P Parameter: Tissue Value: Fert Kernel vs. Unfert Floret
  misc_feature: MA Experiment ID: 20000534 Result: Down-regulated in Transcription
  misc_feature: MA Experiment 20000534 PARAMETER Experiment Name: Zm_Hybrid_Pollen_P Parameter: Age (day) Value: 8
  misc_feature: MA Experiment 20000534 PARAMETER Experiment Name: Zm_Hybrid_Pollen_P Parameter: Organism Value: Zea mays
  misc_feature: MA Experiment 20000534 PARAMETER Experiment Name: Zm_Hybrid_Pollen_P Parameter: Plant Line Value: 35A19
  misc_feature: MA Experiment 20000534 PARAMETER Experiment Name: Zm_Hybrid_Pollen_P Parameter: Tissue Value: Pollen vs. Aerial
gcacgagaccattacctagaacatcctaatcgaaaacttttaatttcatttcctctcttttgacgacggaaacgaggcacgatcacacgctgaacgcttccgccccgccgccaccttccccgctctcctccctccgctcgcctccgcttccgttccgcgccctgcccccggaaggcaagcaaagccctcgctacttgcggagcgtcgttggtcaaaccctagcacacgtacgagcaggccagccccgcccgctcccattcccaggccctcatccatggcggcgctctccgtgcccctccacgccgccgccggatcccgcgccgccgcggccgaccccgtcaaggttccgtgcgtgaggagcactggttcagcccatttcggccgcgccttcccctccgtcgcggtctcctctttggctgcgaggcacatcgagccgatgagagcgatagctacacaggcgccccctgccgtgccacaatatttgagtggcgagaagacaaagatcggcatcaacggctttgggcggattggcaggttggtcctgcgaattgcaactagcagagacgatattgaagttgtggctgtgaatgaccctttcgttgatgctaagtacatggcctatatgttcaagtatgactctactcatggcccgtttaaaggttctatttgtgttgtggatgattcaaccctggagatcaatgggaagaaggtcacaattacaagcaaaagagatcctgcagagattccatggggtaactttggggctgaatatgttgttgaatcttctggtgtctttacaacgactgataaagcatcagcacacttaaagggtggtgctaagaaagtggtgatatctgcaccatcagcagatgctcccatgtttgtagttggagttaatgagaatagctatgattcgaagatgaatgttgtttctaatgcaagttgcaccaccaactgccttgctccacttgccaaggttgtacatgaggaatttggcatcgtggagggccttatgacaactgttcatgccacaacagccacccagaagaccgttgatggtccttcaatgaaggattggagaggaggacgtggtgctggccaaaacataattcctagctccactggtgcagcaaaggctgttggaaaagttctgcctgagctgaatggaaagctcactggcatggccttccgagttccaacaccaaatgtctctgttgtggacttgacatgccggattgagaaaaacgcctcctatgatgatgtgaaagcagccatcaaggcggcatcagagggtgcactcaaaggtattcttggctacacagacgaggacgttgtttccaatgattttgttggtgattctaggtcaagcatctttgatgccaaggctggtatcggactgagctcttctttcatgaagcttgtgtcttggtatgacaacgagtggggctacagcaaccgggttctggatctgatcgcccacatggctctcgtcagtgccgccgccaagctctgatgtccgtactcgtttctccagtagtagcttagaaaaaaagactgcaattttgacggccattttctgttagctgttgtttggaataagatcaaatgctggaacacttcgaactcgcgcgagactggactcagatccatggcctgtattttagttgtagaagtgggcaaatttgcaccgtagtaccctggcatggttatatgcggaattgttgattgatgagtcgttgtacggtttgtcgacttgatgatatgttgatgtgggagcccctgaatgaggcggtattaatggaaatataggatggcaatggc

SEQ ID NO: 2285 - protein, 412 aa, Zea mays subsp. mays
  peptide (1)..(412): Ceres Seq. ID no. 12443246
  misc_feature (225)..(386): Pfam Name: Glyceraldehyde 3-phosphate dehydrogenase, Pfam Description: Glyceraldehyde 3-phosphate dehydrogenase,
  misc_feature (48)..(411): Homolog of NCBI NO: 3059122 NR Description: glyeraldehyde-3-phosphate dehydrogenase [Marsilea
  misc_feature (29)..(409): Homolog of NCBI NO: 25284351 NR Description: hypothetical protein F3O9.10 - Arabidopsis
  misc_feature (39)..(409): Homolog of NCBI NO: 15219406 NR Description: glyceraldehyde-3-phosphate dehydrogenase, putative
  misc_feature (48)..(408): Homolog of NCBI NO: 3059140 NR Description: NAD-dependent glyceraldehyde-3-phosphate
  misc_feature (29)..(409): Homolog of NCBI NO: 21618027 NR Description: putative glyceraldehyde-3-phosphate dehydrogenase
  misc_feature (29)..(409): Homolog of NCBI NO: 15219206 NR Description: putative glyceraldehyde-3-phosphate dehydrogenase
  misc_feature (29)..(409): Homolog of NCBI NO: 27754473 NR Description: putative glyceraldehyde-3-phosphate dehydrogenase
  misc_feature (32)..(410): Homolog of NCBI NO: 18072805 NR Description: glyceraldehyde-3-phosphate dehydrogenase
  misc_feature (5)..(408): Homolog of NCBI NO: 2129472 NR Description: glyceraldehyde-3-phosphate dehydrogenase
  misc_feature (5)..(408): Homolog of NCBI NO: 2129471 NR Description: glyceraldehyde-3-phosphate dehydrogenase
MAALSVPLHAAAGSRAAAADPVKVPCVRSTGSAHFGRAFPSVAVSSLAARHIEPMRAIATQAPPAVPQYLSGEKTKIGINGFGRIGRLVLRIATSRDDIEVVAVNDPFVDAKYMAYMFKYDSTHGPFKGSICVVDDSTLEINGKKVTITSKRDPAEIPWGNFGAEYVVESSGVFTTTDKASAHLKGGAKKVVISAPSADAPMFVVGVNENSYDSKMNVVSNASCTTNCLAPLAKVVHEEFGIVEGLMTTVHATTATQKTVDGPSMKDWRGGRGAGQNIIPSSTGAAKAVGKVLPELNGKLTGMAFRVPTPNVSVVDLTCRIEKNASYDDVKAAIKAASEGALKGILGYTDEDVVSNDFVGDSRSSIFDAKAGIGLSSSFMKLVSWYDNEWGYSNRVLDLIAHMALVSAAAKL

SEQ ID NO: 2286 - protein, 358 aa, Zea mays subsp. mays
  peptide (1)..(358): Ceres Seq. ID no. 12443247
  misc_feature (171)..(332): Pfam Name: Glyceraldehyde 3-phosphate dehydrogenase, Pfam Description: Glyceraldehyde 3-phosphate dehydrogenase,
  misc_feature (1)..(357): Homolog of NCBI NO: 3059122 NR Description: glyeraldehyde-3-phosphate dehydrogenase [Marsilea
  misc_feature (1)..(355): Homolog of NCBI NO: 25284351 NR Description: hypothetical protein F3O9.10 - Arabidopsis
  misc_feature (1)..(355): Homolog of NCBI NO: 15219406 NR Description: glyceraldehyde-3-phosphate dehydrogenase, putative
  misc_feature (1)..(354): Homolog of NCBI NO: 3059140 NR Description: NAD-dependent glyceraldehyde-3-phosphate
  misc_feature (1)..(355): Homolog of NCBI NO: 21618027 NR Description: putative glyceraldehyde-3-phosphate dehydrogenase
  misc_feature (1)..(355): Homolog of NCBI NO: 15219206 NR Description: putative glyceraldehyde-3-phosphate dehydrogenase
  misc_feature (1)..(355): Homolog of NCBI NO: 27754473 NR Description: putative glyceraldehyde-3-phosphate dehydrogenase
  misc_feature (1)..(356): Homolog of NCBI NO: 18072805 NR Description: glyceraldehyde-3-phosphate dehydrogenase
  misc_feature (1)..(354): Homolog of NCBI NO: 2129472 NR Description: glyceraldehyde-3-phosphate dehydrogenase
  misc_feature (1)..(354): Homolog of NCBI NO: 2129471 NR Description: glyceraldehyde-3-phosphate dehydrogenase
MRAIATQAPPAVPQYLSGEKTKIGINGFGRIGRLVLRIATSRDDIEVVAVNDPFVDAKYMAYMFKYDSTHGPFKGSICVVDDSTLEINGKKVTITSKRDPAEIPWGNFGAEYVVESSGVFTTTDKASAHLKGGAKKVVISAPSADAPMFVVGVNENSYDSKMNVVSNASCTTNCLAPLAKVVHEEFGIVEGLMTTVHATTATQKTVDGPSMKDWRGGRGAGQNIIPSSTGAAKAVGKVLPELNGKLTGMAFRVPTPNVSVVDLTCRIEKNASYDDVKAAIKAASEGALKGILGYTDEDVVSNDFVGDSRSSIFDAKAGIGLSSSFMKLVSWYDNEWGYSNRVLDLIAHMALVSAAAKL

SEQ ID NO: 2287 - protein, 299 aa, Zea mays subsp. mays
  peptide (1)..(299): Ceres Seq. ID no. 12443248
  misc_feature (112)..(273): Pfam Name: Glyceraldehyde 3-phosphate dehydrogenase, Pfam Description: Glyceraldehyde 3-phosphate dehydrogenase,
  misc_feature (1)..(298): Homolog of NCBI NO: 3059122 NR Description: glyeraldehyde-3-phosphate dehydrogenase [Marsilea
  misc_feature (1)..(296): Homolog of NCBI NO: 25284351 NR Description: hypothetical protein F3O9.10 - Arabidopsis
  misc_feature (1)..(296): Homolog of NCBI NO: 15219406 NR Description: glyceraldehyde-3-phosphate dehydrogenase, putative
  misc_feature (1)..(295): Homolog of NCBI NO: 3059140 NR Description: NAD-dependent glyceraldehyde-3-phosphate
  misc_feature (1)..(296): Homolog of NCBI NO: 21618027 NR Description: putative glyceraldehyde-3-phosphate dehydrogenase
  misc_feature (1)..(296): Homolog of NCBI NO: 15219206 NR Description: putative glyceraldehyde-3-phosphate dehydrogenase
  misc_feature (1)..(296): Homolog of NCBI NO: 27754473 NR Description: putative glyceraldehyde-3-phosphate dehydrogenase
  misc_feature (1)..(297): Homolog of NCBI NO: 18072805 NR Description: glyceraldehyde-3-phosphate dehydrogenase
  misc_feature (1)..(295): Homolog of NCBI NO: 2129472 NR Description: glyceraldehyde-3-phosphate dehydrogenase
  misc_feature (1)..(295): Homolog of NCBI NO: 2129471 NR Description: glyceraldehyde-3-phosphate dehydrogenase
MAYMFKYDSTHGPFKGSICVVDDSTLEINGKKVTITSKRDPAEIPWGNFGAEYVVESSGVFTTTDKASAHLKGGAKKVVISAPSADAPMFVVGVNENSYDSKMNVVSNASCTTNCLAPLAKVVHEEFGIVEGLMTTVHATTATQKTVDGPSMKDWRGGRGAGQNIIPSSTGAAKAVGKVLPELNGKLTGMAFRVPTPNVSVVDLTCRIEKNASYDDVKAAIKAASEGALKGILGYTDEDVVSNDFVGDSRSSIFDAKAGIGLSSSFMKLVSWYDNEWGYSNRVLDLIAHMALVSAAAKL

SEQ ID NO: 2288 - DNA, 1476 bp, Zea mays subsp. mays
  misc_feature (1)..(1476): Ceres Seq. ID no. 12410810
  misc_feature: MA Experiment ID: 108534 Result: Up-regulated in Transcription
  misc_feature: MA Experiment 108534 PARAMETER Experiment Name: Zm_4deg_Cold_P Parameter: Age (hr) Value: 8
  misc_feature: MA Experiment 108534 PARAMETER Experiment Name: Zm_4deg_Cold_P Parameter: Organism Value: Zea mays
  misc_feature: MA Experiment 108534 PARAMETER Experiment Name: Zm_4deg_Cold_P Parameter: Plant Line Value: 35A19
  misc_feature: MA Experiment 108534 PARAMETER Experiment Name: Zm_4deg_Cold_P Parameter: Temperature (deg C) Value: 4 vs. 22
  misc_feature: MA Experiment 108534 PARAMETER Experiment Name: Zm_4deg_Cold_P Parameter: Timepoint (hr) Value: 6
  misc_feature: MA Experiment 108534 PARAMETER Experiment Name: Zm_4deg_Cold_P Parameter: Tissue Value: Aerial
atctcttctcctcacaaggcttcctcccaccacctccagtcctccaccggaccaccacctccaccactccctctctcacgacacgcgcaaaccgcttgaaccctagctggcggcgggaggcggaggtggctccgggatgacgcggcggtgctcgcactgcagccacaacgggcacaactcgcggacgtgccccaaccgcggggtcaagatcttcggggtgcacctcaccgatggctcggccatccgcaagagcgcgagcatggggaacctctccctcctctccgcgggatccaccagcggcggcgcttcccccgccgacgggcccgacctcgccgacggcggcgggggctacgcctccgacgacttcgtccaggggtcgtcctccgccagccgcgatcgcaagaaaggtgttccttggactgaagaagaacaccggaggtttttgctgggattacaaaagctcgggaaaggggattggcgaggaatttctcgtaattttgtggtctcaagaacacctactcaagtagcaagtcatgctcaaaagtattttatacgccaatcaaatatgagcagaaggaagagaaggtctagccttttcgacatggttcctgatgagtccatggaccttccaccccttcctggaagtcaagaaccagagatctcacagttaaatcaaccgccactgccgcctcctgtggaggaggaggtggaatcgatggagtcagatacttctgctgtcgcagagagttctggagcttctgctctcatgcccgagagtttacagcctacctatccgatgattgttccagcttatttctcgccgttcttgcaattctcagttcctttctggccaaatcaggaagatggaggcgatcttccccaagaaacacacgagattgtcaagcctgttgcagttcattcccagaatccaattaatgttgatgaactcgtgggcatgtcaaagctaagcatatgggagcatggtcaggagacagtgtctacttctctgtcgctaaatctgctagggggtcaaaataggcagtcggctttccatgcaaaccctcaaacaagagctcaagcctgatcatcccctaccagcacagaaactgtattttagatggaatcctgggcaaaataagctttgctctttttttcttcttctaaatttaagatcaccgagtcacaaggtcactggttggaagtagcttctccgtatttgcggggaaagcctgccctggtttctctccatcatcagagccttcaatattgtcttttttatatatttaagattgaccgtgctctgtagcttgtatcatgtgctgtaagttatgctatgtatgaatgtacctgtagtttgtatggcacgcatggtatgacactcttatgttagcaaagtcattaatgttagtgctgatctttatggttgtaatgttataaacttctaaaaaaaagtataagccagttcttttcaactgc

SEQ ID NO: 2289 - protein, 315 aa, Zea mays subsp. mays
  peptide (1)..(315): Ceres Seq. ID no. 12410811
  misc_feature (91)..(138): Pfam Name: Myb-like DNA-binding domain Pfam Description: Myb-like DNA-binding domain
  misc_feature (71)..(308): Homolog of NCBI NO: 2062176 NR Description: Myb-related transcription activator (MybSt1)
  misc_feature (1)..(309): Homolog of NCBI NO: 34906364 NR Description: unnamed protein product [Oryza sativa (japonica
  misc_feature (196)..(311): Homolog of NCBI NO: 15238083 NR Description: Myb-related transcription activator-like
  misc_feature (1)..(205): Homolog of NCBI NO: 15238083 NR Description: Myb-related transcription activator-like
  misc_feature (108)..(315): Homolog of NCBI NO: 18873832 NR Description: putative DNA binding protein, 5'-partial [Oryza
  misc_feature (1)..(311): Homolog of NCBI NO: 1076660 NR Description: D13F(MYBST1) protein - potato
  misc_feature (1)..(311): Homolog of NCBI NO: 7705206 NR Description: MybSt1 [Solanum tuberosum]
  misc_feature (1)..(315): Homolog of NCBI NO: 24850307 NR Description: transcription factor MYBS3
  misc_feature (1)..(315): Homolog of NCBI NO: 37536856 NR Description: putative Myb-related protein
  misc_feature (1)..(315): Homolog of NCBI NO: 28848628 NR Description: ZmMybst1 [Zea mays]
MTRRCSHCSHNGHNSRTCPNRGVKIFGVHLTDGSAIRKSASMGNLSLLSAGSTSGGASPADGPDLADGGGGYASDDFVQGSSSASRDRKKGVPWTEEEHRRFLLGLQKLGKGDWRGISRNFVVSRTPTQVASHAQKYFIRQSNMSRRKRRSSLFDMVPDESMDLPPLPGSQEPEISQLNQPPLPPPVEEEVESMESDTSAVAESSGASALMPESLQPTYPMIVPAYFSPFLQFSVPFWPNQEDGGDLPQETHEIVKPVAVHSQNPINVDELVGMSKLSIWEHGQETVSTSLSLNLLGGQNRQSAFHANPQTRAQA

SEQ ID NO: 2290 - protein, 274 aa, Zea mays subsp. mays
  peptide (1)..(274): Ceres Seq. ID no. 12410812
  misc_feature (50)..(97): Pfam Name: Myb-like DNA-binding domain Pfam Description: Myb-like DNA-binding domain
  misc_feature (30)..(267): Homolog of NCBI NO: 2062176 NR Description: Myb-related transcription activator (MybSt1)
  misc_feature (1)..(268): Homolog of NCBI NO: 34906364 NR Description: unnamed protein product [Oryza sativa (japonica
  misc_feature (155)..(270): Homolog of NCBI NO: 15238083 NR Description: Myb-related transcription activator-like
  misc_feature (1)..(164): Homolog of NCBI NO: 15238083 NR Description: Myb-related transcription activator-like
  misc_feature (67)..(274): Homolog of NCBI NO: 18873832 NR Description: putative DNA binding protein, 5'-partial [Oryza
  misc_feature (1)..(270): Homolog of NCBI NO: 1076660 NR Description: D13F(MYBST1) protein - potato
  misc_feature (1)..(270): Homolog of NCBI NO: 7705206 NR Description: MybSt1 [Solanum tuberosum]
  misc_feature (1)..(274): Homolog of NCBI NO: 24850307 NR Description: transcription factor MYBS3
  misc_feature (1)..(274): Homolog of NCBI NO: 37536856 NR Description: putative Myb-related protein
  misc_feature (1)..(274): Homolog of NCBI NO: 28848628 NR Description: ZmMybst1 [Zea mays]
MGNLSLLSAGSTSGGASPADGPDLADGGGGYASDDFVQGSSSASRDRKKGVPWTEEEHRRFLLGLQKLGKGDWRGISRNFVVSRTPTQVASHAQKYFIRQSNMSRRKRRSSLFDMVPDESMDLPPLPGSQEPEISQLNQPPLPPPVEEEVESMESDTSAVAESSGASALMPESLQPTYPMIVPAYFSPFLQFSVPFWPNQEDGGDLPQETHEIVKPVAVHSQNPINVDELVGMSKLSIWEHGQETVSTSLSLNLLGGQNRQSAFHANPQTRAQA

SEQ ID NO: 2291 - protein, 172 aa, Zea mays subsp. mays
  peptide (1)..(172): Ceres Seq. ID no. 12410813
  misc_feature (1)..(165): Homolog of NCBI NO: 2062176 NR Description: Myb-related transcription activator (MybSt1)
  misc_feature (1)..(166): Homolog of NCBI NO: 34906364 NR Description: unnamed protein product [Oryza sativa (japonica
  misc_feature (53)..(168): Homolog of NCBI NO: 15238083 NR Description: Myb-related transcription activator-like
  misc_feature (1)..(62): Homolog of NCBI NO: 15238083 NR Description: Myb-related transcription activator-like
  misc_feature (1)..(172): Homolog of NCBI NO: 18873832 NR Description: putative DNA binding protein, 5'-partial [Oryza
  misc_feature (1)..(168): Homolog of NCBI NO: 1076660 NR Description: D13F(MYBST1) protein - potato
  misc_feature (1)..(168): Homolog of NCBI NO: 7705206 NR Description: MybSt1 [Solanum tuberosum]
  misc_feature (1)..(172): Homolog of NCBI NO: 24850307 NR Description: transcription factor MYBS3
  misc_feature (1)..(172): Homolog of NCBI NO: 37536856 NR Description: putative Myb-related protein
  misc_feature (1)..(172): Homolog of NCBI NO: 28848628 NR Description: ZmMybst1 [Zea mays]
MSRRKRRSSLFDMVPDESMDLPPLPGSQEPEISQLNQPPLPPPVEEEVESMESDTSAVAESSGASALMPESLQPTYPMIVPAYFSPFLQFSVPFWPNQEDGGDLPQETHEIVKPVAVHSQNPINVDELVGMSKLSIWEHGQETVSTSLSLNLLGGQNRQSAFHANPQTRAQA

SEQ ID NO: 2292 - DNA, 1445 bp, Zea mays subsp. mays
  misc_feature (1)..(1445): Ceres Seq. ID no. 12373364
  misc_feature: MA Experiment ID: 108522 Result: Down-regulated in Transcription
  misc_feature: MA Experiment 108522 PARAMETER Experiment Name: Zm_42deg_Heat_P Parameter: Age (day) Value: 8
  misc_feature: MA Experiment 108522 PARAMETER Experiment Name: Zm_42deg_Heat_P Parameter: Organism Value: Zea mays
  misc_feature: MA Experiment 108522 PARAMETER Experiment Name: Zm_42deg_Heat_P Parameter: Plant Line Value: 35A19
  misc_feature: MA Experiment 108522 PARAMETER Experiment Name: Zm_42deg_Heat_P Parameter: Temperature (deg C) Value: 42 vs. 22
  misc_feature: MA Experiment 108522 PARAMETER Experiment Name: Zm_42deg_Heat_P Parameter: Timepoint (hr) Value: 1
  misc_feature: MA Experiment 108522 PARAMETER Experiment Name: Zm_42deg_Heat_P Parameter: Tissue Value: Aerial
  misc_feature: MA Experiment ID: 108559 Result: Up-regulated in Transcription
  misc_feature: MA Experiment 108559 PARAMETER Experiment Name: Zm_5mM_NO_P Parameter: Age (day) Value: 8
  misc_feature: MA Experiment 108559 PARAMETER Experiment Name: Zm_5mM_NO_P Parameter: Organism Value: Zea mays
  misc_feature: MA Experiment 108559 PARAMETER Experiment Name: Zm_5mM_NO_P Parameter: Plant Line Value: 35A19
  misc_feature: MA Experiment 108559 PARAMETER Experiment Name: Zm_5mM_NO_P Parameter: Timepoint (hr) Value: 12
  misc_feature: MA Experiment 108559 PARAMETER Experiment Name: Zm_5mM_NO_P Parameter: Tissue Value: Aerial
  misc_feature: MA Experiment 108559 PARAMETER Experiment Name: Zm_5mM_NO_P Parameter: Treatment Value: 5mM NO vs. No Treatment
atacatcccttgcctctttctcctcccccgcatctgcttctttctctccacgccaacccgacaccgcgcggtcggctcggctcggccatccccgccagctcccgctcgagatcccagcgccatgacgatcggcgtcgctctcttgctcgacctcacctcccgcctgccccgcgccggggcatccgccgcctccgcagccgtccgctcccaccccggtctctctaccaccgccttcgccgcgactgccgcggccgcgttgtcgtcctccggggtgccgctctccgcgcgccacctcttcggttttcatgggtttactgttgctcattgtgatgctggcacacctgcctggatggaatgatggttctgatgatcttgttaatgagattaataccaagattattgattccttgcaatatgcaagaaaagactacttccagaacacaacaaaggaatacccttcagagctgaagccactcttttctgcctttgggttgaaaaattttactatcacaaccctaaggtctttcctattatattatttgccactcatacaacctaaacctcacactggttctgatgatgaggatgatgatctgcttcatgacactcaagagaaaaccatggatctggttactcccttctacaattcagtaaagcaaatcgtgcgggagacttctattgtaacgaccagacgagtatttgaaaggattgtagttcgtcatgtttcacaaagaacagcatggaaacttctcaaagatgcttcaaaatcatcaaaaaggaaagctgcaagggggatgccaactccacagtacacatactgtgttgccagaacaactttccgagcacatgcactgggaataaccgctgcttgggtagtgcaatccataattgaagtatacagatgtttcatccgtaagcctagtgaggactgtgaagcactatcaagcgacggcaatgcacagtttgacgatatgaataaattcagattgtttgggaggaagatttatgggattaccatcaaaagttgtttctctttggttttggcctcagctggagcaggcattggtgccctcgtgcatccagtgcatggacaatggttgggttgtgccttgggagatattgcaggtccaattatcgctataattgtttttgagaagatgcagctaccactatgagaaactggatttttggcgaccactggttttgggtcccttgtgcaagtcatggccttcagtcttctgtgtggttggagatccctgatctaacttgaaagttcacagttgatgaataacagctttcacctcagtgctcgtagttttgtagctccctttacagatgccttcgggtcttgtgggacatgagcatgtacttttgcagttttgctaaattttgtactctcagatttgaagaatccaaacaagaaatttaattttactagatttgag

SEQ ID NO: 2293 - protein, 289 aa, Zea mays subsp. mays
  peptide (1)..(289): Ceres Seq. ID no. 12373365
  misc_feature (21)..(284): Homolog of NCBI NO: 15240548 NR Description: unknown protein; protein id: At5g55610.1
MGLLLLIVMLAHLPGWNDGSDDLVNEINTKIIDSLQYARKDYFQNTTKEYPSELKPLFSAFGLKNFTITTLRSFLLYYLPLIQPKPHTGSDDEDDDLLHDTQEKTMDLVTPFYNSVKQIVRETSIVTTRRVFERIVVRHVSQRTAWKLLKDASKSSKRKAARGMPTPQYTYCVARTTFRAHALGITAAWVVQSIIEVYRCFIRKPSEDCEALSSDGNAQFDDMNKFRLFGRKIYGITIKSCFSLVLASAGAGIGALVHPVHGQWLGCALGDIAGPIIAIIVFEKMQLPL

SEQ ID NO: 2294 - protein, 281 aa, Zea mays subsp. mays
  peptide (1)..(281): Ceres Seq. ID no. 12373366
  misc_feature (13)..(276): Homolog of NCBI NO: 15240548 NR Description: unknown protein; protein id: At5g55610.1
MLAHLPGWNDGSDDLVNEINTKIIDSLQYARKDYFQNTTKEYPSELKPLFSAFGLKNFTITTLRSFLLYYLPLIQPKPHTGSDDEDDDLLHDTQEKTMDLVTPFYNSVKQIVRETSIVTTRRVFERIVVRHVSQRTAWKLLKDASKSSKRKAARGMPTPQYTYCVARTTFRAHALGITAAWVVQSIIEVYRCFIRKPSEDCEALSSDGNAQFDDMNKFRLFGRKIYGITIKSCFSLVLASAGAGIGALVHPVHGQWLGCALGDIAGPIIAIIVFEKMQLPL

SEQ ID NO: 2295 - protein, 184 aa, Zea mays subsp. mays
  peptide (1)..(184): Ceres Seq. ID no. 12373367
  misc_feature (1)..(179): Homolog of NCBI NO: 15240548 NR Description: unknown protein; protein id: At5g55610.1
MDLVTPFYNSVKQIVRETSIVTTRRVFERIVVRHVSQRTAWKLLKDASKSSKRKAARGMPTPQYTYCVARTTFRAHALGITAAWVVQSIIEVYRCFIRKPSEDCEALSSDGNAQFDDMNKFRLFGRKIYGITIKSCFSLVLASAGAGIGALVHPVHGQWLGCALGDIAGPIIAIIVFEKMQLPL

SEQ ID NO: 2296 - DNA, 1149 bp, Zea mays subsp. mays
  misc_feature (1)..(1149): Ceres Seq. ID no. 12341590
  misc_feature: MA Experiment ID: 108535 Result: Up-regulated in Transcription
  misc_feature: MA Experiment 108535 PARAMETER Experiment Name: Zm_Meristem_P Parameter: Age (day) Value: 8
  misc_feature: MA Experiment 108535 PARAMETER Experiment Name: Zm_Meristem_P Parameter: Organism Value: Zea mays
  misc_feature: MA Experiment 108535 PARAMETER Experiment Name: Zm_Meristem_P Parameter: Plant Line Value: 35A19
  misc_feature: MA Experiment 108535 PARAMETER Experiment Name: Zm_Meristem_P Parameter: Tissue Value: Root Meristem vs. Above Root Meristem
cccgttcccatcagatcggatcgatcactcgacgagacatctcgcctcctcggccaatcggcatggcggcgctgctgctccgtagactcgccggaacccaccgcggccgcgtcccgctgggggccgccgccgccgccgcctgcggtggagcgacgctcttctacgcgtcgtcttcccccaccgttgcgcacttggaggagacgggcaaagccgctgagcaagttgcacttaaccctgataagtggctagagttcaagctccaagagaaggcaacagtcagtcacaactcacagttattcaggttttcatttgatccatcaactaaactgggacttgatgttgcctcgtgcctcatcacaagggcacctataggcgaggaagctgagggaagaaggaaatatgtgattcgcccgtacacacctatctctgatccagactctaaagggtattttgacctattgatcaaggtttatcctgatggaaaaatgagtcagtattttgcaagtttgaagccaggagatgttgttgaagtcaaagggcccattgaaaagctcagatacaacccgaacatgaaaaaacaaattgggatgatcgctggtggttctggtataacaccaatgctgcaggttgtcagggctatcctcaaaaaccctaatgacaacactcaggtctccttaatttacgccaatgtgtcaccagatgatatcttgctcaaaagagaactggatagacttgccagtagctatcctaacttcaaggtattttatacagttgataaaccgtcaactgactggaggggtggtgttggttttgtatcaaaggacatggttttgaaaggtttgccaggcccagcggaggactctctgattcttgtttgtggtccaccaggaatgatgaatcacatatctggagacaaggccaaggatagatcacagggcgagctctctggcgttctgaaagacttaggatacaccgcagagatggtatacaaattctgagaagacagtagtagactctgctgacgcacacacattcttgctgccctgcagtcaataaaccacacctgaactttttgttgttgttgcagcatctggctctgaactggaaacagttttgacttgtttccctatgtaataataatgctcatcc

SEQ ID NO: 2297 - protein, 331 aa, Zea mays subsp. mays
  peptide (1)..(331): Ceres Seq. ID no. 12341591
  misc_feature (191)..(293): Pfam Name: Oxidoreductase NAD-binding domain Pfam Description: Oxidoreductase NAD-binding domain
  misc_feature (314)..(331): Homolog of NCBI NO: 34910260 NR Description: putative cytochrome b5 reductase
  misc_feature (21)..(293): Homolog of NCBI NO: 34910260 NR Description: putative cytochrome b5 reductase
  misc_feature (30)..(331): Homolog of NCBI NO: 18420117 NR Description: cytochrome-b5 reductase - like protein
RSHQIGSITRRDISPPRPIGMAALLLRRLAGTHRGRVPLGAAAAAACGGATLFYASSSPTVAHLEETGKAAEQVALNPDKWLEFKLQEKATVSHNSQLFRFSFDPSTKLGLDVASCLITRAPIGEEAEGRRKYVIRPYTPISDPDSKGYFDLLIKVYPDGKMSQYFASLKPGDVVEVKGPIEKLRYNPNMKKQIGMIAGGSGITPMLQVVRAILKNPNDNTQVSLIYANVSPDDILLKRELDRLASSYPNFKVFYTVDKPSTDWRGGVGFVSKDMVLKGLPGPAEDSLILVCGPPGMMNHISGDKAKDRSQGELSGVLKDLGYTAEMVYKF

SEQ ID NO: 2298 - protein, 311 aa, Zea mays subsp. mays
  peptide (1)..(311): Ceres Seq. ID no. 12341592
  misc_feature (171)..(273): Pfam Name: Oxidoreductase NAD-binding domain Pfam Description: Oxidoreductase NAD-binding domain
  misc_feature (294)..(311): Homolog of NCBI NO: 34910260 NR Description: putative cytochrome b5 reductase
  misc_feature (1)..(273): Homolog of NCBI NO: 34910260 NR Description: putative cytochrome b5 reductase
  misc_feature (10)..(311): Homolog of NCBI NO: 18420117 NR Description: cytochrome-b5 reductase - like protein
MAALLLRRLAGTHRGRVPLGAAAAAACGGATLFYASSSPTVAHLEETGKAAEQVALNPDKWLEFKLQEKATVSHNSQLFRFSFDPSTKLGLDVASCLITRAPIGEEAEGRRKYVIRPYTPISDPDSKGYFDLLIKVYPDGKMSQYFASLKPGDVVEVKGPIEKLRYNPNMKKQIGMIAGGSGITPMLQVVRAILKNPNDNTQVSLIYANVSPDDILLKRELDRLASSYPNFKVFYTVDKPSTDWRGGVGFVSKDMVLKGLPGPAEDSLILVCGPPGMMNHISGDKAKDRSQGELSGVLKDLGYTAEMVYKF

SEQ ID NO: 2299 - protein, 170 aa, Zea mays subsp. mays
  peptide (1)..(170): Ceres Seq. ID no. 12341593
  misc_feature (30)..(132): Pfam Name: Oxidoreductase NAD-binding domain Pfam Description: Oxidoreductase NAD-binding domain
  misc_feature (1)..(170): Homolog of NCBI NO: 18420117 NR Description: cytochrome-b5 reductase - like protein
  misc_feature (153)..(170): Homolog of NCBI NO: 34910260 NR Description: putative cytochrome b5 reductase
  misc_feature (1)..(132): Homolog of NCBI NO: 34910260 NR Description: putative cytochrome b5 reductase
MSQYFASLKPGDVVEVKGPIEKLRYNPNMKKQIGMIAGGSGITPMLQVVRAILKNPNDNTQVSLIYANVSPDDILLKRELDRLASSYPNFKVFYTVDKPSTDWRGGVGFVSKDMVLKGLPGPAEDSLILVCGPPGMMNHISGDKAKDRSQGELSGVLKDLGYTAEMVYKF

SEQ ID NO: 2300 - DNA, 1323 bp, Zea mays subsp. mays
  misc_feature (1)..(1323): Ceres Seq. ID no. 12410806
  misc_feature: MA Experiment ID: 108556 Result: Up-regulated in Transcription
  misc_feature: MA Experiment 108556 PARAMETER Experiment Name: Zm_Drought_P Parameter: Age (day) Value: 9
  misc_feature: MA Experiment 108556 PARAMETER Experiment Name: Zm_Drought_P Parameter: Organism Value: Zea mays
  misc_feature: MA Experiment 108556 PARAMETER Experiment Name: Zm_Drought_P Parameter: Plant Line Value: 35A19
  misc_feature: MA Experiment 108556 PARAMETER Experiment Name: Zm_Drought_P Parameter: Timepoint (hr) Value: 24
  misc_feature: MA Experiment 108556 PARAMETER Experiment Name: Zm_Drought_P Parameter: Tissue Value: Aerial
  misc_feature: MA Experiment 108556 PARAMETER Experiment Name: Zm_Drought_P Parameter: Treatment Value: Drought vs. No Drought
  misc_feature: MA Experiment ID: 20000535 Result: Down-regulated in Transcription
  misc_feature: MA Experiment 20000535 PARAMETER Experiment Name: Zm_Hybrid_Seed_Dev_P Parameter: DAP Value: 30 vs. 12
  misc_feature: MA Experiment 20000535 PARAMETER Experiment Name: Zm_Hybrid_Seed_Dev_P Parameter: Organism Value: Zea mays
  misc_feature: MA Experiment 20000535 PARAMETER Experiment Name: Zm_Hybrid_Seed_Dev_P Parameter: Plant Line Value: 35A19
  misc_feature: MA Experiment 20000535 PARAMETER Experiment Name: Zm_Hybrid_Seed_Dev_P Parameter: Tissue Value: Embryo vs. Unfert Floret
gcctctcttgtcatcatcggcctgccgcctgcccgcctgctcctcctgccccattaacgccgccggctgccgtgccgccgcgtcctgctccccgccaccgcgttcctcgcccgaagcaccgccgcggcctcgcgccaccgcccagaaaccatctccgggcctcgttcgaccgaagcgccttgtgtcatatctccgcgacctagccgccgcccgccgcngacgctgccgtcgtcgtcatcctcgctggcggtgctgtacctgcgtgccagcgcagatccatccgagctcggattgatttcttcctttgctgtactgtcataaccgaactaaaacagtttcagaggaagcatcgcgattgccatggaagctgggagaatggatcagccatttatggctgctatcaatagccagcctttcgtggaggatattgagccagtgaagaaagccagtggggacatgcctgcgacaacaggaagcggatgcttcgaatgcaacatctgccttgattttgcatcagaaccagtggttactttctgtggtcatctctactgctggccttgtatctacgagtggctgcgccctggggtggagtcagctgccagcgacaacagcagttcggcaaggcggcaatgtcctgtatgcaaggcaacactctcaacggacacccttgtgccactatacggccgtggaggcaactcaaagaagtcacttgatggcatggccatcccgcgccgccccatggtacaccgggagactgttgaggagcaacagaatgcacagagcaatgtcaatgaccagcactaccaccagagcatggaagacaactctcagcgccagccattgctgcaagcgcaccaccatcccattcccactgggtttgacttcatctaccctccagcaccagtagggcgtggcttgatccactcaactgccggaggggtgctcggagggatggcagagattgtgcttcccttggcgctccgtggccagatgccagcgagcttgtactacacgaatccataccatgctgcgacgcagaacgtgaaccccaggctgaggcggcatcagatggaaatcgagaggtccctgcaccagatctggttcttcctctgtgtgtttgtggtgctgtgcctgctcttgttctgagacaagactattctatacacctctttgtagatattgaaagtgggagggggatactaatggatgatgcgtatagtaaacagggtaatggtctgtgtcgacaggcatgtgcttaagcatgctgatgtagagttgtaatatgatgagacacggaggtgaaatgcatatttcattcttccc

SEQ ID NO: 2301 - protein, 261 aa, Zea mays subsp. mays
  peptide (1)..(261): Ceres Seq. ID no. 12410807
  misc_feature (44)..(94): Pfam Name: Zinc finger, C3HC4 type (RING finger) Pfam Description: Zinc finger, C3HC4 type (RING finger)
  misc_feature (40)..(142): Homolog of NCBI NO: 21553849 NR Description: putative RING zinc finger protein [Arabidopsis
  misc_feature (40)..(142): Homolog of NCBI NO: 15224062 NR Description: putative RING zinc finger protein
  misc_feature (39)..(173): Homolog of NCBI NO: 7488309 NR Description: RING zinc finger protein F27G19.70 - Arabidopsis
  misc_feature (39)..(258): Homolog of NCBI NO: 30687607 NR Description: zinc finger (C3HC4-type RING finger) protein
  misc_feature (29)..(261): Homolog of NCBI NO: 18394721 NR Description: expressed protein
  misc_feature (194)..(261): Homolog of NCBI NO: 15235242 NR Description: putative protein; protein id: At4g28270.1
  misc_feature (26)..(126): Homolog of NCBI NO: 15235242 NR Description: putative protein; protein id: At4g28270.1
  misc_feature (37)..(261): Homolog of NCBI NO: 15236326 NR Description: E3 ubiquitin ligase, RMA1
  misc_feature (19)..(261): Homolog of NCBI NO: 22795037 NR Description: putative RING protein [Populus x canescens]
  misc_feature (6)..(261): Homolog of NCBI NO: 38346627 NR Description: OSJNBa0074L08.21 [Oryza sativa (japonica
MEAGRMDQPFMAAINSQPFVEDIEPVKKASGDMPATTGSGCFECNICLDFASEPVVTFCGHLYCWPCIYEWLRPGVESAASDNSSSARRQCPVCKATLSTDTLVPLYGRGGNSKKSLDGMAIPRRPMVHRETVEEQQNAQSNVNDQHYHQSMEDNSQRQPLLQAHHHPIPTGFDFIYPPAPVGRGLIHSTAGGVLGGMAEIVLPLALRGQMPASLYYTNPYHAATQNVNPRLRRHQMEIERSLHQIWFFLCVFVVLCLLLF

SEQ ID NO: 2302 - protein, 256 aa, Zea mays subsp. mays
  peptide (1)..(256): Ceres Seq. ID no. 12410808
  misc_feature (39)..(89): Pfam Name: Zinc finger, C3HC4 type (RING finger) Pfam Description: Zinc finger, C3HC4 type (RING finger)
  misc_feature (35)..(137): Homolog of NCBI NO: 21553849 NR Description: putative RING zinc finger protein [Arabidopsis
  misc_feature (35)..(137): Homolog of NCBI NO: 15224062 NR Description: putative RING zinc finger protein
  misc_feature (34)..(168): Homolog of NCBI NO: 7488309 NR Description: RING zinc finger protein F27G19.70 - Arabidopsis
  misc_feature (34)..(253): Homolog of NCBI NO: 30687607 NR Description: zinc finger (C3HC4-type RING finger) protein
  misc_feature (24)..(256): Homolog of NCBI NO: 18394721 NR Description: expressed protein
  misc_feature (189)..(256): Homolog of NCBI NO: 15235242 NR Description: putative protein; protein id: At4g28270.1
  misc_feature (21)..(121): Homolog of NCBI NO: 15235242 NR Description: putative protein; protein id: At4g28270.1
  misc_feature (32)..(256): Homolog of NCBI NO: 15236326 NR Description: E3 ubiquitin ligase, RMA1
  misc_feature (14)..(256): Homolog of NCBI NO: 22795037 NR Description: putative RING protein [Populus x canescens]
  misc_feature (1)..(256): Homolog of NCBI NO: 38346627 NR Description: OSJNBa0074L08.21 [Oryza sativa (japonica
MDQPFMAAINSQPFVEDIEPVKKASGDMPATTGSGCFECNICLDFASEPVVTFCGHLYCWPCIYEWLRPGVESAASDNSSSARRQCPVCKATLSTDTLVPLYGRGGNSKKSLDGMAIPRRPMVHRETVEEQQNAQSNVNDQHYHQSMEDNSQRQPLLQAHHHPIPTGFDFIYPPAPVGRGLIHSTAGGVLGGMAEIVLPLALRGQMPASLYYTNPYHAATQNVNPRLRRHQMEIERSLHQIWFFLCVFVVLCLLLF

SEQ ID NO: 2303 - protein, 251 aa, Zea mays subsp. mays
  peptide (1)..(251): Ceres Seq. ID no. 12410809
  misc_feature (34)..(84): Pfam Name: Zinc finger, C3HC4 type (RING finger) Pfam Description: Zinc finger, C3HC4 type (RING finger)
  misc_feature (30)..(132): Homolog of NCBI NO: 21553849 NR Description: putative RING zinc finger protein [Arabidopsis
  misc_feature (30)..(132): Homolog of NCBI NO: 15224062 NR Description: putative RING zinc finger protein
  misc_feature (29)..(163): Homolog of NCBI NO: 7488309 NR Description: RING zinc finger protein F27G19.70 - Arabidopsis
  misc_feature (29)..(248): Homolog of NCBI NO: 30687607 NR Description: zinc finger (C3HC4-type RING finger) protein
  misc_feature (19)..(251): Homolog of NCBI NO: 18394721 NR Description: expressed protein
  misc_feature (184)..(251): Homolog of NCBI NO: 15235242 NR Description: putative protein; protein id: At4g28270.1
  misc_feature (16)..(116): Homolog of NCBI NO: 15235242 NR Description: putative protein; protein id: At4g28270.1
  misc_feature (27)..(251): Homolog of NCBI NO: 15236326 NR Description: E3 ubiquitin ligase, RMA1
  misc_feature (9)..(251): Homolog of NCBI NO: 22795037 NR Description: putative RING protein [Populus x canescens]
  misc_feature (1)..(251): Homolog of NCBI NO: 38346627 NR Description: OSJNBa0074L08.21 [Oryza sativa (japonica
MAAINSQPFVEDIEPVKKASGDMPATTGSGCFECNICLDFASEPVVTFCGHLYCWPCIYEWLRPGVESAASDNSSSARRQCPVCKATLSTDTLVPLYGRGGNSKKSLDGMAIPRRPMVHRETVEEQQNAQSNVNDQHYHQSMEDNSQRQPLLQAHHHPIPTGFDFIYPPAPVGRGLIHSTAGGVLGGMAEIVLPLALRGQMPASLYYTNPYHAATQNVNPRLRRHQMEIERSLHQIWFFLCVFVVLCLLLF

SEQ ID NO: 2304 - DNA, 1361 bp, Zea mays subsp. mays
  misc_feature (1)..(1361): Ceres Seq. ID no. 13636326
  misc_feature: MA Experiment ID: 108530 Result: Down-regulated in Transcription
  misc_feature: MA Experiment 108530 PARAMETER Experiment Name: Zm_Imbibed_Seeds_P Parameter: Age (day) Value: 6 vs. 2
  misc_feature: MA Experiment 108530 PARAMETER Experiment Name: Zm_Imbibed_Seeds_P Parameter: Organism Value: Zea mays
  misc_feature: MA Experiment 108530 PARAMETER Experiment Name: Zm_Imbibed_Seeds_P Parameter: Plant Line Value: 35A19
  misc_feature: MA Experiment 108530 PARAMETER Experiment Name: Zm_Imbibed_Seeds_P Parameter: Tissue Value: Aerial vs. Embryo
  misc_feature: MA Experiment ID: 108535 Result: Up-regulated in Transcription
  misc_feature: MA Experiment 108535 PARAMETER Experiment Name: Zm_Meristem_P Parameter: Age (day) Value: 8
  misc_feature: MA Experiment 108535 PARAMETER Experiment Name: Zm_Meristem_P Parameter: Organism Value: Zea mays
  misc_feature: MA Experiment 108535 PARAMETER Experiment Name: Zm_Meristem_P Parameter: Plant Line Value: 35A19
  misc_feature: MA Experiment 108535 PARAMETER Experiment Name: Zm_Meristem_P Parameter: Tissue Value: Root Meristem vs. Above Root Meristem
  misc_feature: MA Experiment ID: 108544 Result: Down-regulated in Transcription
  misc_feature: MA Experiment ID: 20000478 Result: Down-regulated in Transcription
  misc_feature: MA Experiment 20000478 PARAMETER Experiment Name: Zm_5mM_SA_P Parameter: Age (day) Value: 11
  misc_feature: MA Experiment 20000478 PARAMETER Experiment Name: Zm_5mM_SA_P Parameter: Organism Value: Zea mays
  misc_feature: MA Experiment 20000478 PARAMETER Experiment Name: Zm_5mM_SA_P Parameter: Plant Line Value: 35A19
  misc_feature: MA Experiment 20000478 PARAMETER Experiment Name: Zm_5mM_SA_P Parameter: Timepoint (hr) Value: 72
  misc_feature: MA Experiment 20000478 PARAMETER Experiment Name: Zm_5mM_SA_P Parameter: Tissue Value: Aerial
  misc_feature: MA Experiment 20000478 PARAMETER Experiment Name: Zm_5mM_SA_P Parameter: Treatment Value: 5mM SA vs. No Treatment
  misc_feature: MA Experiment ID: 20001612 Result: Up-regulated in Transcription
  misc_feature: MA Experiment 20001612 PARAMETER Experiment Name: Zm_50ppm_KNO3_L-to-H_P Parameter: Age (day) Value: 19
  misc_feature: MA Experiment 20001612 PARAMETER Experiment Name: Zm_50ppm_KNO3_L-to-H_P Parameter: Organism Value: Zea mays
  misc_feature: MA Experiment 20001612 PARAMETER Experiment Name: Zm_50ppm_KNO3_L-to-H_P Parameter: Plant Line Value: 35A19
  misc_feature: MA Experiment 20001612 PARAMETER Experiment Name: Zm_50ppm_KNO3_L-to-H_P Parameter: Timepoint (hr) Value: 8
  misc_feature: MA Experiment 20001612 PARAMETER Experiment Name: Zm_50ppm_KNO3_L-to-H_P Parameter: Tissue Value: Roots
  misc_feature: MA Experiment 20001612 PARAMETER Experiment Name: Zm_50ppm_KNO3_L-to-H_P Parameter: Treatment Value: 50ppm KNO3 vs. 50ppm KCl
attcgcaccaccgccgcgccgcccaaatcacagccaccgccgccatggccgcctccagccgccctctcgtctccgtgaaagccctggagggcgacatggtcacggacgcccccggcatcgccttaccgcccgtcttcggggcaccgatccgcccggacgtggtccgcttcacccacaagctgctgtcctgcaacaagcgccagccttacgcagtctcccgccgcgctggccaccagacgtcggccgagtcctggggtacgggccgcgctgtgtcccgtatcccccgtgtccccggcggcggcacccaccgcgccggccagggagcattcggcaacatgtgccgcggcggacgcatgttcgcgcccaccaagatctggcgcaagtggcaccgccgcgtcaacgtcaacctccgccgcgtcgccgtcgcctcggcgctcgccgccaccgccgtcccggccctcgtccaggcgcgcggccaccgcatcgagaccgttcccgagatgcccctggttatctccgactcggcagagtccatcgagaagacctcccaggcgctcaagatcctgaagcaggtcggcgcctacgccgacgccgagaaggccaaggactccgtcggcatccgccccggcaagggtaagatgcgcaaccgccgctacattaaccgcaagggcccgctcgtcgtctacggcacagaaggctccaaggtcgtcaaggccttccgcaacctccccggcgtggacgtcgccaacgtcgagcgcctcaacctgctcgacctcgcccccggtggccacctcgggcgctttgtgatctggaccgagagcgcgttcaagaagctcgaggaggtgtatgggagcttcgacgcgccgtcgcagaagaagaagggctttgttctgccgaggcccaagatggccaacgctgacctgggcaggattatcaactctaacgaggtgcagtctgtggttaagccactcaacaaggaggtgaagcgcagggagaagaggaagaacccgctcaagaacatggctgctgtgctcaagctgaacccctacctcggcactgcccggaagatggccacccttgctgaggctgcccgagtcaaggcccggaaggagaagcttgattccaagaggaccaagcttacctcggaggagactgccaaggtcaaggctgccggcaaggcgtggtacaagaccatgatctcggacagtgactacaccgagtttgagaacttcaccaagtggctcggagtgacgcagtgaagcggcctttgagacctagttaagttttgattagttgtgtcgctgaactttgtattgagacgaaatagtattttatcaatctgtcttatcctgcatcttcrc

SEQ ID NO: 2305 - protein, 418 aa, Zea mays subsp. mays
  peptide (1)..(418): Ceres Seq. ID no. 15219393
  misc_feature (39)..(281): Pfam Name: Ribosomal protein L4/L1 family Pfam Description: Ribosomal protein L4/L1 family
  misc_feature (15)..(418): Homolog of NCBI NO: 34393487 NR Description: putative 60S ribosomal protein L4/L1 [Oryza
  misc_feature (15)..(418): Homolog of NCBI NO: 34897236 NR Description: putative 60S ribosomal protein L1 [Oryza sativa
  misc_feature (16)..(418): Homolog of NCBI NO: 15232723 NR Description: 60S ribosomal protein L4/L1 (RPL4A) [Arabidopsis
  misc_feature (16)..(418): Homolog of NCBI NO: 21593543 NR Description: 60S ribosomal protein L4-B (L1) [Arabidopsis
  misc_feature (16)..(418): Homolog of NCBI NO: 15242558 NR Description: 60S ribosomal protein L4/L1 (RPL4D) [Arabidopsis
  misc_feature (13)..(418): Homolog of NCBI NO: 17367847 NR Description: 60S ribosomal protein L4 (L1)
  misc_feature (16)..(418): Homolog of NCBI NO: 26450328 NR Description: putative 60S ribosomal protein [Arabidopsis
  misc_feature (112)..(418): Homolog of NCBI NO: 13605831 NR Description: AT5g02870/F9G14_180 [Arabidopsis thaliana]
  misc_feature (64)..(418): Homolog of NCBI NO: 6441068 NR Description: 60S ribosomal protein L4 [Chlamydomonas sp. HS-5]
  misc_feature (13)..(388): Homolog of NCBI NO: 32822849 NR Description: Ribosomal protein [Xenopus laevis]
SHHRRAAQITATAAMAASSRPLVSVKALEGDMVTDAPGIALPPVFGAPIRPDVVRFTHKLLSCNKRQPYAVSRRAGHQTSAESWGTGRAVSRIPRVPGGGTHRAGQGAFGNMCRGGRMFAPTKIWRKWHRRVNVNLRRVAVASALAATAVPALVQARGHRIETVPEMPLVISDSAESIEKTSQALKILKQVGAYADAEKAKDSVGIRPGKGKMRNRRYINRKGPLVVYGTEGSKVVKAFRNLPGVDVANVERLNLLDLAPGGHLGRFVIWTESAFKKLEEVYGSFDAPSQKKKGFVLPRPKMANADLGRIINSNEVQSVVKPLNKEVKRREKRKNPLKNMAAVLKLNPYLGTARKMATLAEAARVKARKEKLDSKRTKLTSEETAKVKAAGKAWYKTMISDSDYTEFENFTKWLGVTQ

SEQ ID NO: 2306 - protein, 404 aa, Zea mays subsp. mays
  peptide (1)..(404): Ceres Seq. ID no. 15219394
  misc_feature (25)..(267): Pfam Name: Ribosomal protein L4/L1 family Pfam Description: Ribosomal protein L4/L1 family
  misc_feature (1)..(404): Homolog of NCBI NO: 34393487 NR Description: putative 60S ribosomal protein L4/L1 [Oryza
  misc_feature (1)..(404): Homolog of NCBI NO: 34897236 NR Description: putative 60S ribosomal protein L1 [Oryza sativa
  misc_feature (2)..(404): Homolog of NCBI NO: 15232723 NR Description: 60S ribosomal protein L4/L1 (RPL4A) [Arabidopsis
  misc_feature (2)..(404): Homolog of NCBI NO: 21593543 NR Description: 60S ribosomal protein L4-B (L1) [Arabidopsis
  misc_feature (2)..(404): Homolog of NCBI NO: 15242558 NR Description: 60S ribosomal protein L4/L1 (RPL4D) [Arabidopsis
  misc_feature (1)..(404): Homolog of NCBI NO: 17367847 NR Description: 60S ribosomal protein L4 (L1)
  misc_feature (2)..(404): Homolog of NCBI NO: 26450328 NR Description: putative 60S ribosomal protein [Arabidopsis
  misc_feature (98)..(404): Homolog of NCBI NO: 13605831 NR Description: AT5g02870/F9G14_180 [Arabidopsis thaliana]
  misc_feature (50)..(404): Homolog of NCBI NO: 6441068 NR Description: 60S ribosomal protein L4 [Chlamydomonas sp. HS-5]
  misc_feature (1)..(374): Homolog of NCBI NO: 32822849 NR Description: Ribosomal protein [Xenopus laevis]
MAASSRPLVSVKALEGDMVTDAPGIALPPVFGAPIRPDVVRFTHKLLSCNKRQPYAVSRRAGHQTSAESWGTGRAVSRIPRVPGGGTHRAGQGAFGNMCRGGRMFAPTKIWRKWHRRVNVNLRRVAVASALAATAVPALVQARGHRIETVPEMPLVISDSAESIEKTSQALKILKQVGAYADAEKAKDSVGIRPGKGKMRNRRYINRKGPLVVYGTEGSKVVKAFRNLPGVDVANVERLNLLDLAPGGHLGRFVIWTESAFKKLEEVYGSFDAPSQKKKGFVLPRPKMANADLGRIINSNEVQSVVKPLNKEVKRREKRKNPLKNMAAVLKLNPYLGTARKMATLAEAARVKARKEKLDSKRTKLTSEETAKVKAAGKAWYKTMISDSDYTEFENFTKWLGVTQ

SEQ ID NO: 2307 - protein, 387 aa, Zea mays subsp. mays
  peptide (1)..(387): Ceres Seq. ID no. 15219395
  misc_feature (8)..(250): Pfam Name: Ribosomal protein L4/L1 family Pfam Description: Ribosomal protein L4/L1 family
  misc_feature (1)..(387): Homolog of NCBI NO: 34393487 NR Description: putative 60S ribosomal protein L4/L1 [Oryza
  misc_feature (1)..(387): Homolog of NCBI NO: 34897236 NR Description: putative 60S ribosomal protein L1 [Oryza sativa
  misc_feature (1)..(387): Homolog of NCBI NO: 15232723 NR Description: 60S ribosomal protein L4/L1 (RPL4A) [Arabidopsis
  misc_feature (1)..(387): Homolog of NCBI NO: 21593543 NR Description: 60S ribosomal protein L4-B (L1) [Arabidopsis
  misc_feature (1)..(387): Homolog of NCBI NO: 15242558 NR Description: 60S ribosomal protein L4/L1 (RPL4D) [Arabidopsis
  misc_feature (1)..(387): Homolog of NCBI NO: 17367847 NR Description: 60S ribosomal protein L4 (L1)
  misc_feature (1)..(387): Homolog of NCBI NO: 26450328 NR Description: putative 60S ribosomal protein [Arabidopsis
  misc_feature (81)..(387): Homolog of NCBI NO: 13605831 NR Description: AT5g02870/F9G14_180 [Arabidopsis thaliana]
  misc_feature (33)..(387): Homolog of NCBI NO: 6441068 NR Description: 60S ribosomal protein L4 [Chlamydomonas sp. HS-5]
  misc_feature (1)..(357): Homolog of NCBI NO: 32822849 NR Description: Ribosomal protein [Xenopus laevis]
MVTDAPGIALPPVFGAPIRPDVVRFTHKLLSCNKRQPYAVSRRAGHQTSAESWGTGRAVSRIPRVPGGGTHRAGQGAFGNMCRGGRMFAPTKIWRKWHRRVNVNLRRVAVASALAATAVPALVQARGHRIETVPEMPLVISDSAESIEKTSQALKILKQVGAYADAEKAKDSVGIRPGKGKMRNRRYINRKGPLVVYGTEGSKVVKAFRNLPGVDVANVERLNLLDLAPGGHLGRFVIWTESAFKKLEEVYGSFDAPSQKKKGFVLPRPKMANADLGRIINSNEVQSVVKPLNKEVKRREKRKNPLKNMAAVLKLNPYLGTARKMATLAEAARVKARKEKLDSKRTKLTSEETAKVKAAGKAWYKTMISDSDYTEFENFTKWLGVTQ

SEQ ID NO: 2308 - DNA, 1618 bp, Zea mays subsp. mays
  misc_feature (1)..(1618): Ceres Seq. ID no. 12410796
  misc_feature: MA Experiment ID: 108543 Result: Down-regulated in Transcription
  misc_feature: MA Experiment ID: 108689 Result: Down-regulated in Transcription
  misc_feature: MA Experiment 108689 PARAMETER Experiment Name: Zm_Drought_Roots_P Parameter: Age (day) Value: 9
  misc_feature: MA Experiment 108689 PARAMETER Experiment Name: Zm_Drought_Roots_P Parameter: Organism Value: Zea mays
  misc_feature: MA Experiment 108689 PARAMETER Experiment Name: Zm_Drought_Roots_P Parameter: Plant Line Value: 35A19
  misc_feature: MA Experiment 108689 PARAMETER Experiment Name: Zm_Drought_Roots_P Parameter: Timepoint (hr) Value: 24
  misc_feature: MA Experiment 108689 PARAMETER Experiment Name: Zm_Drought_Roots_P Parameter: Tissue Value: Roots
  misc_feature: MA Experiment 108689 PARAMETER Experiment Name: Zm_Drought_Roots_P Parameter: Treatment Value: Drought vs. No Drought
ctcatcgctgacgctgatggcggagcccagtcctcacccgaccgtggtgctgcacgcttgcctcggcgtgggccacctgatccccatggtggagctcgccaagctcctcctccgccgcgacctggctgtcataatcgccgtcccgaccccgccgtcgtccactgccgacttcttcgcctcctccgcatccgccgtcgccacgctcgaggccgccaaccccgccgtatccttccaccacctcccgccgccggactaccctgtcccggacccggaccccttcctccggatgctggacgcgctccgcctcacagtcccctccctcaccgccttcctccgctcccttccctccgtcgccggggctcgtgctcgacctcttctgcggcgacgcgctcgacgcggccgcatccgccggcatcccggcctacttctactacacctcctgcgctggcgacctcgccgcgttcctccaccttccccactacttcgccacgacggagggcgggcccagcttcaaagacatgggcaaggcgctcctccacttccccggcgtcccgccgatcccggcttcggacatgcctcacaccgtgctcgaccgcgcggcccggacctgcgcctcgcggatcgtgcactacggccgcgtgccccgaggctcggggcttgctgatcaacacctacgagtggctggaggcgcgggccgtcagggcactcagggacggcgtctgcgtccctggtcgccccacgccgccggtttaccccatcggcccgattatcgtcaggggccaggaggcggcggagaaaggggagcggcacgcgtgcctgtcgtggctggacgcacagccggaacggagcgtggtgttcctctgcttcggcagcctgggcgccgtctccgcggcgcaggtgaaggagatcgctcgcgggctggagagctccgggcatcggttcctgtgggtcgtgcggagcccgccggaggacccgaccaagttcttcctcgcgcgtcctgagccggacctggactcgctgctcccggaggggtttctggagcgcacgagtgacagggggatggtggtgaagatgtgggcgccgcaggtggaggtgctgcggcacgcagccacgggcgcgttcatgacccactgcgggtggaactcggtgctggaggcggcgtcggccggcgtccccatgctgtgctggccgatgtacgccgagcagagggtgaacaaggtgttcgtagtggacgagatcaaggccggggtggtgatggacggctacgacgaggagctggtgagcgcggcggaggtggagaagaaggtgaggctggtgatggagtctgaggaaggggagaagctcagggagaggctggcgttggcaaaggagaaggcggcagaggcgctggctgatggcgggccgtcgcggatggcgtttgaggagttcttgaaggatatcatgctcgccaaatgatcatgcactaaagtgagcatcatggctgatcctgttacctgatctgttctaatgttagcttggactatgatctatgtgagatatttccgggtttgttcggttgatttctcccaaagagattcgagggagcatgagtttgacaaataaatatatgctgggtgat

SEQ ID NO: 2309 - protein, 484 aa, Zea mays subsp. mays
  peptide (1)..(484): Ceres Seq. ID no. 12410797
  misc_feature (212)..(484): Pfam Name: UDP-glucoronosyl and UDP-glucosyl transferase Pfam Description: UDP-glucoronosyl and UDP-glucosyl transferase
  misc_feature (216)..(465): Homolog of NCBI NO: 18401155 NR Description: putative glucosyltransferase; protein id:
  misc_feature (215)..(478): Homolog of NCBI NO: 21593785 NR Description: putative glucosyltransferase [Arabidopsis
  misc_feature (216)..(478): Homolog of NCBI NO: 18401158 NR Description: putative glucosyltransferase
  misc_feature (217)..(472): Homolog of NCBI NO: 34910208 NR Description: putative flavonol glucosyltransferase
  misc_feature (216)..(480): Homolog of NCBI NO: 34910206 NR Description: putative flavonol glucosyltransferase
  misc_feature (218)..(478): Homolog of NCBI NO: 22535568 NR Description: putative glucosyltransferase
  misc_feature (215)..(482): Homolog of NCBI NO: 34910204 NR Description: putative flavonol glucosyltransferase
  misc_feature (209)..(480): Homolog of NCBI NO: 34910222 NR Description: putative flavonol glucosyltransferase
  misc_feature (216)..(483): Homolog of NCBI NO: 34910218 NR Description: putative flavonol glucosyltransferase
  misc_feature (212)..(484): Homolog of NCBI NO: 34910228 NR Description: putative flavonol glucosyltransferase
LIADADGGAQSSPDRGAARLPRRGPPDPHGGARQAPPPPRPGCHNRRPDPAVVHCRLLRLLRIRRRHARGRQPRRILPPPPAAGLPCPGPGPLPPDAGRAPPHSPLPHRLPPLPSLRRRGSCSTSSAATRSTRPHPPASRPTSTTPPALATSPRSSTFPTTSPRRRAGPASKTWARRSSTSPASRRSRLRTCLTPCSTARPGPAPRGSCTTAACPEARGLLINTYEWLEARAVRALRDGVCVPGRPTPPVYPIGPIIVRGQEAAEKGERHACLSWLDAQPERSVVFLCFGSLGAVSAAQVKEIARGLESSGHRFLWVVRSPPEDPTKFFLARPEPDLDSLLPEGFLERTSDRGMVVKMWAPQVEVLRHAATGAFMTHCGWNSVLEAASAGVPMLCWPMYAEQRVNKVFVVDEIKAGVVMDGYDEELVSAAEVEKKVRLVMESEEGEKLRERLALAKEKAAEALADGGPSRMAFEEFLKDIMLAK

SEQ ID NO: 2310 - DNA, 1582 bp, Zea mays subsp. mays
  misc_feature (1)..(1582): Ceres Seq. ID no. 12367584
  misc_feature: MA Experiment ID: 20000535 Result: Up-regulated in Transcription
  misc_feature: MA Experiment 20000535 PARAMETER Experiment Name: Zm_Hybrid_Seed_Dev_P Parameter: DAP Value: 30 vs. 12
  misc_feature: MA Experiment 20000535 PARAMETER Experiment Name: Zm_Hybrid_Seed_Dev_P Parameter: Organism Value: Zea mays
  misc_feature: MA Experiment 20000535 PARAMETER Experiment Name: Zm_Hybrid_Seed_Dev_P Parameter: Plant Line Value: 35A19
  misc_feature: MA Experiment 20000535 PARAMETER Experiment Name: Zm_Hybrid_Seed_Dev_P Parameter: Tissue Value: Embryo vs. Unfert Floret
  misc_feature: MA Experiment ID: 20000632 Result: Down-regulated in Transcription
  misc_feature: MA Experiment 20000632 PARAMETER Experiment Name: Zm_Herbicide-Treatments_P Parameter: Timepoint (hr) Value: 4
  misc_feature: MA Experiment 20000632 PARAMETER Experiment Name: Zm_Herbicide-Treatments_P Parameter: Tissue Value: Aerial
  misc_feature: MA Experiment 20000632 PARAMETER Experiment Name: Zm_Herbicide-Treatments_P Parameter: Treatment Value: Glean vs. No Treatment
ctttttctctctccccgtctgcctccccctccacaccaggccacgccacacacaggatagcgagcgggagcgacggcggcggcggaggagctagggttttgatccggcctcgccggctaggctgcgccgccccgacgccgaagccatggacagggagcttctagagacgtttgacgcggccaagaaggcggccgacgcggcggcaggggacggcaactcgccggaggctggccgctgcctcgacgcgctgcggcggctgcgcgacattcgcgtcaacaccgacatcctcgtctcgacgcaggttggcaaacgccttcgaccccttactaagcatcctcactcaggcattcaagcagttgctgccgacctttttgggtactggaaaaaggttgtccttgaagagtcaggaaagaaaaatggcggctcagagaatgaaagatcaagtgactcttcaggaaaggttgagaaggcgaggtccgtgaagattgaaaagaactctgcatcagcaagcatgaagcttgagaaaagagatgtggatgttaggggtcagaagcctaacaatgccaaagttgagaagactactagtaatggttccaaagctcaatctgtgaaggtggaaagggtatccaaagaagtcataaggactcctgacgcgaagaggccagcatccgtccccaatggccacccaaagcttacatctcttgtcaaatgcaatgatcctacccgagataaaatccgggaactacttgcctgaagcctttgtaagggtttccagagagactagtgatgatgacagagacgaagtgagaaacatcttggatgaagtcgaggcacgcgacccatacagggttgccgtgacagtagagctctgcactattcgagaggcttggaccttcccactgggactcacagggcgaaatacaggtcaatcatgttcaacctgagggctgaaagcaataccgatttccggaggagggtcctcatcggtctagtggcgccggagaggcttccagacgtatcccccgatgagatggctagcgacgcaaggaagcaagagaacatgcagatcaaggagaaggctctgttcgactgcgagcgtggagcggcaccaaaggcgacgacggaccagttcaagtgtgccagatgtgggcagcggaagacgacctactaccagctgcagactcggagtgctgatgaaccgatgacgacgttcgtcacatgcgtgaactgcaacaatcactggaagttctgctgagtggcagccttggtaaagtgtttacttagttgtgctgagcacactatcctgctgtgatgtgtgtgctctgttagttgtgactggaagttcgacagggcaggctgaacaactcaccttttttccccttttttaccccccgtaaactaggagcagttatcctcttcctctgtcaggcagcctcctgattcattcagattgtactagtcgaacgcgtgaatgttgttgacttgatcgcatcgtcaccagctgtgaattttcttgggtggagttagaatagaatggtgccaagctcagacgatgctgatggattagtggtgctgtgtgctc

SEQ ID NO: 2311 - protein, 202 aa, Zea mays subsp. mays
  peptide (1)..(202): Ceres Seq. ID no. 12367585
  misc_feature (1)..(202): Homolog of NCBI NO: 15224901 NR Description: putative elongation factor; protein id:
  misc_feature (1)..(202): Homolog of NCBI NO: 28876018 NR Description: putative transcription elongation factor
  misc_feature (3)..(116): Homolog of NCBI NO: 15227992 NR Description: hypothetical protein; protein id: At2g42730.1
  misc_feature (35)..(199): Homolog of NCBI NO: 23612520 NR Description: transcription elongation factor s-ii, putative
  misc_feature (38)..(162): Homolog of NCBI NO: 23485845 NR Description: transcription elongation factor TFIIS.h, putative
  misc_feature (1)..(202): Homolog of NCBI NO: 18377737 NR Description: putative elongation factor [Arabidopsis thaliana]
MDRELLETFDAAKKAADAAAGDGNSPEAGRCLDALRRLRDIRVNTDILVSTQVGKRLRPLTKHPHSGIQAVAADLFGYWKKVVLEESGKKNGGSENERSSDSSGKVEKARSVKIEKNSASASMKLEKRDVDVRGQKPNNAKVEKTTSNGSKAQSVKVERVSKEVIRTPDAKRPASVPNGHPKLTSLVKCNDPTRDKIRELLA

SEQ ID NO: 2312 - protein, 107 aa, Zea mays subsp. mays
  peptide (1)..(107): Ceres Seq. ID no. 12367586
  misc_feature (67)..(105): Pfam Name: Transcription factor S-II (TFIIS) Pfam Description: Transcription factor S-II (TFIIS)
  misc_feature (1)..(107): Homolog of NCBI NO: 1373400 NR Description: transcription elongation factor
  misc_feature (1)..(107): Homolog of NCBI NO: 17536493 NR Description: Transcription factor II [Caenorhabditis elegans]
  misc_feature (1)..(106): Homolog of NCBI NO: 23612520 NR Description: transcription elongation factor s-ii, putative
  misc_feature (1)..(107): Homolog of NCBI NO: 19074096 NR Description: TRANSCRIPTION ELONGATION FACTOR SII
  misc_feature (1)..(106): Homolog of NCBI NO: 19114535 NR Description: transcription elongation factor s-ii
  misc_feature (1)..(106): Homolog of NCBI NO: 23485845 NR Description: transcription elongation factor TFIIS.h, putative
  misc_feature (1)..(107): Homolog of NCBI NO: 23617251 NR Description: putative transcription elongation factor
  misc_feature (1)..(107): Homolog of NCBI NO: 18377737 NR Description: putative elongation factor [Arabidopsis thaliana]
  misc_feature (1)..(107): Homolog of NCBI NO: 15224901 NR Description: putative elongation factor; protein id:
  misc_feature (1)..(107): Homolog of NCBI NO: 28876018 NR Description: putative transcription elongation factor
MFNLRAESNTDFRRRVLIGLVAPERLPDVSPDEMASDARKQENMQIKEKALFDCERGAAPKATTDQFKCARCGQRKTTYYQLQTRSADEPMTTFVTCVNCNNHWKFC

SEQ ID NO: 2313 - DNA, 1816 bp, Zea mays subsp. mays
  misc_feature (1)..(1816): Ceres Seq. ID no. 12352030
  misc_feature: MA Experiment ID: 108504 Result: Up-regulated in Transcription
  misc_feature: MA Experiment 108504 PARAMETER Experiment Name: Zm_Drought_P Parameter: Age (day) Value: 8
  misc_feature: MA Experiment 108504 PARAMETER Experiment Name: Zm_Drought_P Parameter: Organism Value: Zea mays
  misc_feature: MA Experiment 108504 PARAMETER Experiment Name: Zm_Drought_P Parameter: Plant Line Value: 35A19
  misc_feature: MA Experiment 108504 PARAMETER Experiment Name: Zm_Drought_P Parameter: Timepoint (hr) Value: 12
  misc_feature: MA Experiment 108504 PARAMETER Experiment Name: Zm_Drought_P Parameter: Tissue Value: Aerial
  misc_feature: MA Experiment 108504 PARAMETER Experiment Name: Zm_Drought_P Parameter: Treatment Value: Drought vs. No Drought
  misc_feature: MA Experiment ID: 108513 Result: Up-regulated in Transcription
  misc_feature: MA Experiment 108513 PARAMETER Experiment Name: Zm_100uM_ABA_P Parameter: Age (day) Value: 8
  misc_feature: MA Experiment 108513 PARAMETER Experiment Name: Zm_100uM_ABA_P Parameter: Organism Value: Zea mays
  misc_feature: MA Experiment 108513 PARAMETER Experiment Name: Zm_100uM_ABA_P Parameter: Plant Line Value: 35A19
  misc_feature: MA Experiment 108513 PARAMETER Experiment Name: Zm_100uM_ABA_P Parameter: Timepoint (hr) Value: 6
  misc_feature: MA Experiment 108513 PARAMETER Experiment Name: Zm_100uM_ABA_P Parameter: Tissue Value: Aerial
  misc_feature: MA Experiment 108513 PARAMETER Experiment Name: Zm_100uM_ABA_P Parameter: Treatment Value: 100uM ABA vs. No Treatment
  misc_feature: MA Experiment ID: 108523 Result: Down-regulated in Transcription
  misc_feature: MA Experiment 108523 PARAMETER Experiment Name: Zm_42deg_Heat_P Parameter: Age (day) Value: 8
  misc_feature: MA Experiment 108523 PARAMETER Experiment Name: Zm_42deg_Heat_P Parameter: Organism Value: Zea mays
  misc_feature: MA Experiment 108523 PARAMETER Experiment Name: Zm_42deg_Heat_P Parameter: Plant Line Value: 35A19
  misc_feature: MA Experiment 108523 PARAMETER Experiment Name: Zm_42deg_Heat_P Parameter: Temperature (deg C) Value: 42 vs. 22
  misc_feature: MA Experiment 108523 PARAMETER Experiment Name: Zm_42deg_Heat_P Parameter: Timepoint (hr) Value: 6
  misc_feature: MA Experiment 108523 PARAMETER Experiment Name: Zm_42deg_Heat_P Parameter: Tissue Value: Aerial
  misc_feature: MA Experiment ID: 108527 Result: Down-regulated in Transcription
  misc_feature: MA Experiment 108527 PARAMETER Experiment Name: Zm_5mM_NO_P Parameter: Age (day) Value: 8
  misc_feature: MA Experiment 108527 PARAMETER Experiment Name: Zm_5mM_NO_P Parameter: Organism Value: Zea mays
  misc_feature: MA Experiment 108527 PARAMETER Experiment Name: Zm_5mM_NO_P Parameter: Plant Line Value: 35A19
  misc_feature: MA Experiment 108527 PARAMETER Experiment Name: Zm_5mM_NO_P Parameter: Timepoint (hr) Value: 6
  misc_feature: MA Experiment 108527 PARAMETER Experiment Name: Zm_5mM_NO_P Parameter: Tissue Value: Aerial
  misc_feature: MA Experiment 108527 PARAMETER Experiment Name: Zm_5mM_NO_P Parameter: Treatment Value: 5mM NO vs. No Treatment
  misc_feature: MA Experiment ID: 108529 Result: Down-regulated in Transcription
  misc_feature: MA Experiment 108529 PARAMETER Experiment Name: Zm_Imbibed_Seeds_P Parameter: Age (day) Value: 5 vs. 2
  misc_feature: MA Experiment 108529 PARAMETER Experiment Name: Zm_Imbibed_Seeds_P Parameter: Organism Value: Zea mays
  misc_feature: MA Experiment 108529 PARAMETER Experiment Name: Zm_Imbibed_Seeds_P Parameter: Plant Line Value: 35A19
  misc_feature: MA Experiment 108529 PARAMETER Experiment Name: Zm_Imbibed_Seeds_P Parameter: Tissue Value: Roots vs. Embryo
  misc_feature: MA Experiment ID: 108540 Result: Up-regulated in Transcription
  misc_feature: MA Experiment 108540 PARAMETER Experiment Name: Zm_20percent_PEG_P Parameter: Age (day) Value: 8
  misc_feature: MA Experiment 108540 PARAMETER Experiment Name: Zm_20percent_PEG_P Parameter: Organism Value: Zea mays
  misc_feature: MA Experiment 108540 PARAMETER Experiment Name: Zm_20percent_PEG_P Parameter: Plant Line Value: 35A19
  misc_feature: MA Experiment 108540 PARAMETER Experiment Name: Zm_20percent_PEG_P Parameter: Timepoint (hr) Value: 6
  misc_feature: MA Experiment 108540 PARAMETER Experiment Name: Zm_20percent_PEG_P Parameter: Tissue Value: Aerial
  misc_feature: MA Experiment 108540 PARAMETER Experiment Name: Zm_20percent_PEG_P Parameter: Treatment Value: 20percent PEG vs. No Treatment
  misc_feature: MA Experiment ID: 108543 Result: Up-regulated in Transcription
  misc_feature: MA Experiment ID: 108544 Result: Down-regulated in Transcription
  misc_feature: MA Experiment ID: 108556 Result: Up-regulated in Transcription
  misc_feature: MA Experiment 108556 PARAMETER Experiment Name: Zm_Drought_P Parameter: Age (day) Value: 9
  misc_feature: MA Experiment 108556 PARAMETER Experiment Name: Zm_Drought_P Parameter: Organism Value: Zea mays
  misc_feature: MA Experiment 108556 PARAMETER Experiment Name: Zm_Drought_P Parameter: Plant Line Value: 35A19
  misc_feature: MA Experiment 108556 PARAMETER Experiment Name: Zm_Drought_P Parameter: Timepoint (hr) Value: 24
  misc_feature: MA Experiment 108556 PARAMETER Experiment Name: Zm_Drought_P Parameter: Tissue Value: Aerial
  misc_feature: MA Experiment 108556 PARAMETER Experiment Name: Zm_Drought_P Parameter: Treatment Value: Drought vs. No Drought
  misc_feature: MA Experiment ID: 108559 Result: Down-regulated in Transcription
  misc_feature: MA Experiment 108559 PARAMETER Experiment Name: Zm_5mM_NO_P Parameter: Age (day) Value: 8
  misc_feature: MA Experiment 108559 PARAMETER Experiment Name: Zm_5mM_NO_P Parameter: Organism Value: Zea mays
  misc_feature: MA Experiment 108559 PARAMETER Experiment Name: Zm_5mM_NO_P Parameter: Plant Line Value: 35A19
  misc_feature: MA Experiment 108559 PARAMETER Experiment Name: Zm_5mM_NO_P Parameter: Timepoint (hr) Value: 12
  misc_feature: MA Experiment 108559 PARAMETER Experiment Name: Zm_5mM_NO_P Parameter: Tissue Value: Aerial
  misc_feature: MA Experiment 108559 PARAMETER Experiment Name: Zm_5mM_NO_P Parameter: Treatment Value: 5mM NO vs. No Treatment
  misc_feature: MA Experiment ID: 108597 Result: Up-regulated in Transcription
  misc_feature: MA Experiment 108597 PARAMETER Experiment Name: Zm_100uM_ABA_P Parameter: Age (day) Value: 9
  misc_feature: MA Experiment 108597 PARAMETER Experiment Name: Zm_100uM_ABA_P Parameter: Organism Value: Zea mays
  misc_feature: MA Experiment 108597 PARAMETER Experiment Name: Zm_100uM_ABA_P Parameter: Plant Line Value: 35A19
  misc_feature: MA Experiment 108597 PARAMETER Experiment Name: Zm_100uM_ABA_P Parameter: Timepoint (hr) Value: 24
  misc_feature: MA Experiment 108597 PARAMETER Experiment Name: Zm_100uM_ABA_P Parameter: Tissue Value: Aerial
  misc_feature: MA Experiment 108597 PARAMETER Experiment Name: Zm_100uM_ABA_P Parameter: Treatment Value: 100uM ABA vs. No Treatment
  misc_feature: MA Experiment ID: 108687 Result: Down-regulated in Transcription
  misc_feature: MA Experiment 108687 PARAMETER Experiment Name: Zm_Embryos-Flowers__P Parameter: Tissue Value: Embryo vs. Aerial+
  misc_feature: MA Experiment ID: 108689 Result: Up-regulated in Transcription
  misc_feature: MA Experiment 108689 PARAMETER Experiment Name: Zm_Drought_Roots_P Parameter: Age (day) Value: 9
  misc_feature: MA Experiment 108689 PARAMETER Experiment Name: Zm_Drought_Roots_P Parameter: Organism Value: Zea mays
  misc_feature: MA Experiment 108689 PARAMETER Experiment Name: Zm_Drought_Roots_P Parameter: Plant Line Value: 35A19
  misc_feature: MA Experiment 108689 PARAMETER Experiment Name: Zm_Drought_Roots_P Parameter: Timepoint (hr) Value: 24
  misc_feature: MA Experiment 108689 PARAMETER Experiment Name: Zm_Drought_Roots_P Parameter: Tissue Value: Roots
  misc_feature: MA Experiment 108689 PARAMETER Experiment Name: Zm_Drought_Roots_P Parameter: Treatment Value: Drought vs. No Drought
  misc_feature: MA Experiment ID: 20000477 Result: Up-regulated in Transcription
  misc_feature: MA Experiment 20000477 PARAMETER Experiment Name: Zm_5mM_SA_P Parameter: Age (day) Value: 10
  misc_feature: MA Experiment 20000477 PARAMETER Experiment Name: Zm_5mM_SA_P Parameter: Organism Value: Zea mays
  misc_feature: MA Experiment 20000477 PARAMETER Experiment Name: Zm_5mM_SA_P Parameter: Plant Line Value: 35A19
  misc_feature: MA Experiment 20000477 PARAMETER Experiment Name: Zm_5mM_SA_P Parameter: Timepoint (hr) Value: 48
  misc_feature: MA Experiment 20000477 PARAMETER Experiment Name: Zm_5mM_SA_P Parameter: Tissue Value: Aerial
  misc_feature: MA Experiment 20000477 PARAMETER Experiment Name: Zm_5mM_SA_P Parameter: Treatment Value: 5mM SA vs. No Treatment
  misc_feature: MA Experiment ID: 20000478 Result: Up-regulated in Transcription
  misc_feature: MA Experiment 20000478 PARAMETER Experiment Name: Zm_5mM_SA_P Parameter: Age (day) Value: 11
  misc_feature: MA Experiment 20000478 PARAMETER Experiment Name: Zm_5mM_SA_P Parameter: Organism Value: Zea mays
  misc_feature: MA Experiment 20000478 PARAMETER Experiment Name: Zm_5mM_SA_P Parameter: Plant Line Value: 35A19
  misc_feature: MA Experiment 20000478 PARAMETER Experiment Name: Zm_5mM_SA_P Parameter: Timepoint (hr) Value: 72
  misc_feature: MA Experiment 20000478 PARAMETER Experiment Name: Zm_5mM_SA_P Parameter: Tissue Value: Aerial
  misc_feature: MA Experiment 20000478 PARAMETER Experiment Name: Zm_5mM_SA_P Parameter: Treatment Value: 5mM SA vs. No Treatment
  misc_feature: MA Experiment ID: 20000487 Result: Down-regulated in Transcription
  misc_feature: MA Experiment 20000487 PARAMETER Experiment Name: Zm_50mM_NH4NO3_L_to_H_P Parameter: Organism Value: Zea mays
  misc_feature: MA Experiment 20000487 PARAMETER Experiment Name: Zm_50mM_NH4NO3_L_to_H_P Parameter: Timepoint (hr) Value: 4
  misc_feature: MA Experiment 20000487 PARAMETER Experiment Name: Zm_50mM_NH4NO3_L_to_H_P Parameter: Tissue Value: Leaves
  misc_feature: MA Experiment 20000487 PARAMETER Experiment Name: Zm_50mM_NH4NO3_L_to_H_P Parameter: Treatment Value: 50mM NH4NO3 vs. 100mM Mannitol
  misc_feature: MA Experiment ID: 20000488 Result: Down-regulated in Transcription
  misc_feature: MA Experiment 20000488 PARAMETER Experiment Name: Zm_50mM_NH4NO3_L_to_H_P Parameter: Organism Value: Zea mays
  misc_feature: MA Experiment 20000488 PARAMETER Experiment Name: Zm_50mM_NH4NO3_L_to_H_P Parameter: Timepoint (hr) Value: 8
  misc_feature: MA Experiment 20000488 PARAMETER Experiment Name: Zm_50mM_NH4NO3_L_to_H_P Parameter: Tissue Value: Leaves
  misc_feature: MA Experiment 20000488 PARAMETER Experiment Name: Zm_50mM_NH4NO3_L_to_H_P Parameter: Treatment Value: 50mM NH4NO3 vs. 100mM Mannitol
  misc_feature: MA Experiment ID: 20000535 Result: Down-regulated in Transcription
  misc_feature: MA Experiment 20000535 PARAMETER Experiment Name: Zm_Hybrid_Seed_Dev_P Parameter: DAP Value: 30 vs. 12
  misc_feature: MA Experiment 20000535 PARAMETER Experiment Name: Zm_Hybrid_Seed_Dev_P Parameter: Organism Value: Zea mays
  misc_feature: MA Experiment 20000535 PARAMETER Experiment Name: Zm_Hybrid_Seed_Dev_P Parameter: Plant Line Value: 35A19
  misc_feature: MA Experiment 20000535 PARAMETER Experiment Name: Zm_Hybrid_Seed_Dev_P Parameter: Tissue Value: Embryo vs. Unfert Floret
  misc_feature: MA Experiment ID: 20001606 Result: Down-regulated in Transcription
  misc_feature: MA Experiment 20001606 PARAMETER Experiment Name: Zm_50ppm_KNO3_L-to-H_P Parameter: Age (day) Value: 19
  misc_feature: MA Experiment 20001606 PARAMETER Experiment Name: Zm_50ppm_KNO3_L-to-H_P Parameter: Organism Value: Zea mays
  misc_feature: MA Experiment 20001606 PARAMETER Experiment Name: Zm_50ppm_KNO3_L-to-H_P Parameter: Plant Line Value: 35A19
  misc_feature: MA Experiment 20001606 PARAMETER Experiment Name: Zm_50ppm_KNO3_L-to-H_P Parameter: Timepoint (hr) Value: 8
  misc_feature: MA Experiment 20001606 PARAMETER Experiment Name: Zm_50ppm_KNO3_L-to-H_P Parameter: Tissue Value: Shoots
  misc_feature: MA Experiment 20001606 PARAMETER Experiment Name: Zm_50ppm_KNO3_L-to-H_P Parameter: Treatment Value: 50ppm KNO3 vs. 50ppm KCl
  misc_feature: MA Experiment ID: 20001608 Result: Down-regulated in Transcription
  misc_feature: MA Experiment 20001608 PARAMETER Experiment Name: Zm_50ppm_KNO3_L-to-H_P Parameter: Age (day) Value: 21
  misc_feature: MA Experiment 20001608 PARAMETER Experiment Name: Zm_50ppm_KNO3_L-to-H_P Parameter: Organism Value: Zea mays
  misc_feature: MA Experiment 20001608 PARAMETER Experiment Name: Zm_50ppm_KNO3_L-to-H_P Parameter: Plant Line Value: 35A19
  misc_feature: MA Experiment 20001608 PARAMETER Experiment Name: Zm_50ppm_KNO3_L-to-H_P Parameter: Timepoint (hr) Value: 48
  misc_feature: MA Experiment 20001608 PARAMETER Experiment Name: Zm_50ppm_KNO3_L-to-H_P Parameter: Tissue Value: Shoots
  misc_feature: MA Experiment 20001608 PARAMETER Experiment Name: Zm_50ppm_KNO3_L-to-H_P Parameter: Treatment Value: 50ppm KNO3 vs. 50ppm KCl
  misc_feature: MA Experiment ID: 20001614 Result: Down-regulated in Transcription
  misc_feature: MA Experiment 20001614 PARAMETER Experiment Name: Zm_50ppm_KNO3_L-to-H_P Parameter: Age (day) Value: 21
  misc_feature: MA Experiment 20001614 PARAMETER Experiment Name: Zm_50ppm_KNO3_L-to-H_P Parameter: Organism Value: Zea mays
  misc_feature: MA Experiment 20001614 PARAMETER Experiment Name: Zm_50ppm_KNO3_L-to-H_P Parameter: Plant Line Value: 35A19
  misc_feature: MA Experiment 20001614 PARAMETER Experiment Name: Zm_50ppm_KNO3_L-to-H_P Parameter: Timepoint (hr) Value: 48
  misc_feature: MA Experiment 20001614 PARAMETER Experiment Name: Zm_50ppm_KNO3_L-to-H_P Parameter: Tissue Value: Roots
  misc_feature: MA Experiment 20001614 PARAMETER Experiment Name: Zm_50ppm_KNO3_L-to-H_P Parameter: Treatment Value: 50ppm KNO3 vs. 50ppm KCl
aaaatcaccaattctagcaaggcagctcagcagcttttgtagcgagcttcttggagccttgaaatgagtagtagtggtagcctagccaccacgagtagcaagtaggcactataggcactaggaagtagctaaagcagtcataaccatgggttcgctgccgccggtgtacgggcagagacgccccccacacgttgtgatgatcccgtacccggcgcagggccacatcacgccgatgctgcagtttgccaagctcctccatactcgcggcttccacgtcaccttcgtcaacaacgagttcaatcatcgacgccacctgcgtgcgcgagggcccaacgcgctcgacggcacggatgggtttcgcttcgccgccatcgacgacggtctcccgctctttgaagcggacgccacccaggacatccccgcgctctgccactccaccttgaccacctgcctgccccggtttaaggatctcatcgccaggattaacgccgaggctgaggccgagggacaacccaccgtgacatgcgtcgtcggcgacagcaccatgaccttcgcgctccgcgccgcgcgagagctcggcctccgctgcgctacactctggaccgccagcgcctgcggcttcatcggctacttccactaccgccacctcgtcgagcgtggtatggtccccctcaagaacgaggagcagctcacggacgggtacctagacaccatcgtcgactggatcccgggcgcgcccaaggacctgcggctccgggacttcccgagcttcgtgcgcaccacggatccgaacgacgtcatgctcaacttcttcatccacgagacggagggcatgtcgcangcgtcggcggtggtcatcaacaccttcgacgagctcgacgcgacgctgctcgctgccatggcgaagctcctgccgcccatctacaccgtgggcccgctccagctgacggtgcggaacaacgtgcaggcgaacagtcctgtcgctgctattgggtccaacctgtggaaggagcaggaggcgccgctccggtggctcaacggccgtgcgccgcgctccgttgtgtatgtcaacttcgggagcatcacggtgatgtccaacgagcagctggtcgagttcgcgtgggggctggccaacaccggctactacttcctatggaacgtacgcccggacctcgtcaagagtggcgactccgccgggctgccgccagagttctcagctgcgacagagggacgaagcatgctgtctacgtggtgcccgcaggcagctgtgctggagcatgatgccgtgggggtgttcctgacgcactccgggtggaactccacgctggagagtattgcggcggcgttcccatgctgtgctggcccttcttcgccgagcagcagaccaactgccgatacaagtgcaccgagtggggcatcggaaaagagatcggtgacgatgtacagcggggcgaggtagagtcgctcatacgggaggccatggagggggagaaagggcaaggagatgctccggcgcgtgactgaactcagggacagcgccgtggccgctgcagggcctgacggacggtctatgcgcaacgtagacaggctcatcgaagaggtgctcctagcctagattgagcactggtgagcatcctagcagtcatgtgtcttcgcgtctggcactccaatcgattcaaatcctttgtgttttgatgtcaagcgtttaccttcggtacccataaaagtattttctcgtacaaggtggtgattacacgcaaagcacattgttataagttcagtttgtaagatctatgggtaaaaccaagcgttttgt

SEQ ID NO: 2314 - protein, 437 aa, Zea mays subsp. mays
  peptide (1)..(437): Ceres Seq. ID no. 12352031
  misc_feature (15)..(437): Pfam Name: UDP-glucoronosyl and UDP-glucosyl transferase Pfam Description: UDP-glucoronosyl and UDP-glucosyl transferase
  misc_feature (15)..(437): Homolog of NCBI NO: 15219870 NR Description: UDP-glucose glucosyltransferase
  misc_feature (15)..(437): Homolog of NCBI NO: 17065006 NR Description: UDP-glucose glucosyltransferase [Arabidopsis
  misc_feature (14)..(402): Homolog of NCBI NO: 15220950 NR Description: UDP-glucose glucosyltransferase, putative
  misc_feature (12)..(437): Homolog of NCBI NO: 38347667 NR Description: OSJNBa0054D14.2 [Oryza sativa (japonica
  misc_feature (1)..(437): Homolog of NCBI NO: 38569188 NR Description: OSJNBa0086B14.13 [Oryza sativa (japonica
  misc_feature (18)..(437): Homolog of NCBI NO: 38344775 NR Description: OSJNBb0026L04.6 [Oryza sativa (japonica
  misc_feature (14)..(307): Homolog of NCBI NO: 38347664 NR Description: OSJNBa0041M06.6 [Oryza sativa (japonica
  misc_feature (11)..(437): Homolog of NCBI NO: 38569139 NR Description: OSJNBb0033P05.7 [Oryza sativa (japonica
  misc_feature (11)..(437): Homolog of NCBI NO: 38569140 NR Description: OSJNBb0033P05.8 [Oryza sativa (japonica
  misc_feature (11)..(437): Homolog of NCBI NO: 38344776 NR Description: OSJNBb0026L04.7 [Oryza sativa (japonica
  misc_feature (232)..(232): Xaa is any aa, unknown or other
MGSLPPVYGQRRPPHVVMIPYPAQGHITPMLQFAKLLHTRGFHVTFVNNEFNHRRHLRARGPNALDGTDGFRFAAIDDGLPLFEADATQDIPALCHSTLTTCLPRFKDLIARINAEAEAEGQPTVTCVVGDSTMTFALRAARELGLRCATLWTASACGFIGYFHYRHLVERGMVPLKNEEQLTDGYLDTIVDWIPGAPKDLRLRDFPSFVRTTDPNDVMLNFFIHETEGMSXASAVVINTFDELDATLLAAMAKLLPPIYTVGPLQLTVRNNVQANSPVAAIGSNLWKEQEAPLRWLNGRAPRSVVYVNFGSITVMSNEQLVEFAWGLANTGYYFLWNVRPDLVKSGDSAGLPPEFSAATEGRSMLSTWCPQAAVLEHDAVGVFLTHSGWNSTLESIAAAFPCCAGPSSPSSRPTADTSAPSGASEKRSVTMYSGAR

SEQ ID NO: 2315 - protein, 420 aa, Zea mays subsp. mays
  peptide (1)..(420): Ceres Seq. ID no. 12352032
  misc_feature (1)..(420): Pfam Name: UDP-glucoronosyl and UDP-glucosyl transferase Pfam Description: UDP-glucoronosyl and UDP-glucosyl transferase
  misc_feature (1)..(420): Homolog of NCBI NO: 15219870 NR Description: UDP-glucose glucosyltransferase
  misc_feature (1)..(420): Homolog of NCBI NO: 17065006 NR Description: UDP-glucose glucosyltransferase [Arabidopsis
  misc_feature (1)..(385): Homolog of NCBI NO: 15220950 NR Description: UDP-glucose glucosyltransferase, putative
  misc_feature (1)..(420): Homolog of NCBI NO: 38347667 NR Description: OSJNBa0054D14.2 [Oryza sativa (japonica
  misc_feature (1)..(420): Homolog of NCBI NO: 38569188 NR Description: OSJNBa0086B14.13 [Oryza sativa (japonica
  misc_feature (1)..(420): Homolog of NCBI NO: 38344775 NR Description: OSJNBb0026L04.6 [Oryza sativa (japonica
  misc_feature (1)..(290): Homolog of NCBI NO: 38347664 NR Description: OSJNBa0041M06.6 [Oryza sativa (japonica
  misc_feature (1)..(420): Homolog of NCBI NO: 38569139 NR Description: OSJNBb0033P05.7 [Oryza sativa (japonica
  misc_feature (1)..(420): Homolog of NCBI NO: 38569140 NR Description: OSJNBb0033P05.8 [Oryza sativa (japonica
  misc_feature (1)..(420): Homolog of NCBI NO: 38344776 NR Description: OSJNBb0026L04.7 [Oryza sativa (japonica
  misc_feature (215)..(215): Xaa is any aa, unknown or other
MIPYPAQGHITPMLQFAKLLHTRGFHVTFVNNEFNHRRHLRARGPNALDGTDGFRFAAIDDGLPLFEADATQDIPALCHSTLTTCLPRFKDLIARINAEAEAEGQPTVTCVVGDSTMTFALRAARELGLRCATLWTASACGFIGYFHYRHLVERGMVPLKNEEQLTDGYLDTIVDWIPGAPKDLRLRDFPSFVRTTDPNDVMLNFFIHETEGMSXASAVVINTFDELDATLLAAMAKLLPPIYTVGPLQLTVRNNVQANSPVAAIGSNLWKEQEAPLRWLNGRAPRSVVYVNFGSITVMSNEQLVEFAWGLANTGYYFLWNVRPDLVKSGDSAGLPPEFSAATEGRSMLSTWCPQAAVLEHDAVGVFLTHSGWNSTLESIAAAFPCCAGPSSPSSRPTADTSAPSGASEKRSVTMYSGAR

SEQ ID NO: 2316 - protein, 408 aa, Zea mays subsp. mays
  peptide (1)..(408): Ceres Seq. ID no. 12352033
  misc_feature (1)..(408): Pfam Name: UDP-glucoronosyl and UDP-glucosyl transferase Pfam Description: UDP-glucoronosyl and UDP-glucosyl transferase
  misc_feature (1)..(408): Homolog of NCBI NO: 15219870 NR Description: UDP-glucose glucosyltransferase
  misc_feature (1)..(408): Homolog of NCBI NO: 17065006 NR Description: UDP-glucose glucosyltransferase [Arabidopsis
  misc_feature (1)..(373): Homolog of NCBI NO: 15220950 NR Description: UDP-glucose glucosyltransferase, putative
  misc_feature (1)..(408): Homolog of NCBI NO: 38347667 NR Description: OSJNBa0054D14.2 [Oryza sativa (japonica
  misc_feature (1)..(408): Homolog of NCBI NO: 38569188 NR Description: OSJNBa0086B14.13 [Oryza sativa (japonica
  misc_feature (1)..(408): Homolog of NCBI NO: 38344775 NR Description: OSJNBb0026L04.6 [Oryza sativa (japonica
  misc_feature (1)..(278): Homolog of NCBI NO: 38347664 NR Description: OSJNBa0041M06.6 [Oryza sativa (japonica
  misc_feature (1)..(408): Homolog of NCBI NO: 38569139 NR Description: OSJNBb0033P05.7 [Oryza sativa (japonica
  misc_feature (1)..(408): Homolog of NCBI NO: 38569140 NR Description: OSJNBb0033P05.8 [Oryza sativa (japonica
  misc_feature (1)..(408): Homolog of NCBI NO: 38344776 NR Description: OSJNBb0026L04.7 [Oryza sativa (japonica
  misc_feature (203)..(203): Xaa is any aa, unknown or other
MLQFAKLLHTRGFHVTFVNNEFNHRRHLRARGPNALDGTDGFRFAAIDDGLPLFEADATQDIPALCHSTLTTCLPRFKDLIARINAEAEAEGQPTVTCVVGDSTMTFALRAARELGLRCATLWTASACGFIGYFHYRHLVERGMVPLKNEEQLTDGYLDTIVDWIPGAPKDLRLRDFPSFVRTTDPNDVMLNFFIHETEGMSXASAVVINTFDELDATLLAAMAKLLPPIYTVGPLQLTVRNNVQANSPVAAIGSNLWKEQEAPLRWLNGRAPRSVVYVNFGSITVMSNEQLVEFAWGLANTGYYFLWNVRPDLVKSGDSAGLPPEFSAATEGRSMLSTWCPQAAVLEHDAVGVFLTHSGWNSTLESIAAAFPCCAGPSSPSSRPTADTSAPSGASEKRSVTMYSGAR

SEQ ID NO: 2317 - DNA, 1425 bp, Zea mays subsp. mays
  misc_feature (1)..(1425): Ceres Seq. ID no. 12410794
  misc_feature: MA Experiment ID: 108528 Result: Up-regulated in Transcription
  misc_feature: MA Experiment 108528 PARAMETER Experiment Name: Zm_Imbibed_Seeds_P Parameter: Age (day) Value: 5 vs. 2
  misc_feature: MA Experiment 108528 PARAMETER Experiment Name: Zm_Imbibed_Seeds_P Parameter: Organism Value: Zea mays
  misc_feature: MA Experiment 108528 PARAMETER Experiment Name: Zm_Imbibed_Seeds_P Parameter: Plant Line Value: 35A19
  misc_feature: MA Experiment 108528 PARAMETER Experiment Name: Zm_Imbibed_Seeds_P Parameter: Tissue Value: Aerial vs. Embryo
  misc_feature: MA Experiment ID: 108530 Result: Up-regulated in Transcription
  misc_feature: MA Experiment 108530 PARAMETER Experiment Name: Zm_Imbibed_Seeds_P Parameter: Age (day) Value: 6 vs. 2
  misc_feature: MA Experiment 108530 PARAMETER Experiment Name: Zm_Imbibed_Seeds_P Parameter: Organism Value: Zea mays
  misc_feature: MA Experiment 108530 PARAMETER Experiment Name: Zm_Imbibed_Seeds_P Parameter: Plant Line Value: 35A19
  misc_feature: MA Experiment 108530 PARAMETER Experiment Name: Zm_Imbibed_Seeds_P Parameter: Tissue Value: Aerial vs. Embryo
  misc_feature: MA Experiment ID: 108547 Result: Up-regulated in Transcription
  misc_feature: MA Experiment 108547 PARAMETER Experiment Name: Zm_Imbibed_Seeds_P Parameter: Age (day) Value: 4 vs. 2
  misc_feature: MA Experiment 108547 PARAMETER Experiment Name: Zm_Imbibed_Seeds_P Parameter: Organism Value: Zea mays
  misc_feature: MA Experiment 108547 PARAMETER Experiment Name: Zm_Imbibed_Seeds_P Parameter: Plant Line Value: 35A19
  misc_feature: MA Experiment 108547 PARAMETER Experiment Name: Zm_Imbibed_Seeds_P Parameter: Tissue Value: Aerial vs. Embryo
  misc_feature: MA Experiment ID: 108559 Result: Down-regulated in Transcription
  misc_feature: MA Experiment 108559 PARAMETER Experiment Name: Zm_5mM_NO_P Parameter: Age (day) Value: 8
  misc_feature: MA Experiment 108559 PARAMETER Experiment Name: Zm_5mM_NO_P Parameter: Organism Value: Zea mays
  misc_feature: MA Experiment 108559 PARAMETER Experiment Name: Zm_5mM_NO_P Parameter: Plant Line Value: 35A19
  misc_feature: MA Experiment 108559 PARAMETER Experiment Name: Zm_5mM_NO_P Parameter: Timepoint (hr) Value: 12
  misc_feature: MA Experiment 108559 PARAMETER Experiment Name: Zm_5mM_NO_P Parameter: Tissue Value: Aerial
  misc_feature: MA Experiment 108559 PARAMETER Experiment Name: Zm_5mM_NO_P Parameter: Treatment Value: 5mM NO vs. No Treatment
  misc_feature: MA Experiment ID: 108687 Result: Down-regulated in Transcription
  misc_feature: MA Experiment 108687 PARAMETER Experiment Name: Zm_Embryos-Flowers__P Parameter: Tissue Value: Embryo vs. Aerial+
  misc_feature: MA Experiment ID: 108688 Result: Down-regulated in Transcription
  misc_feature: MA Experiment 108688 PARAMETER Experiment Name: Zm_Embryos-Flowers__P Parameter: Tissue Value: Immature Flowers vs. Aerial+
  misc_feature: MA Experiment ID: 20000479 Result: Down-regulated in Transcription
  misc_feature: MA Experiment 20000479 PARAMETER Experiment Name: Zm_Drought_P Parameter: Age (day) Value: 10
  misc_feature: MA Experiment 20000479 PARAMETER Experiment Name: Zm_Drought_P Parameter: Organism Value: Zea mays
  misc_feature: MA Experiment 20000479 PARAMETER Experiment Name: Zm_Drought_P Parameter: Plant Line Value: 35A19
  misc_feature: MA Experiment 20000479 PARAMETER Experiment Name: Zm_Drought_P Parameter: Timepoint (hr) Value: 48
  misc_feature: MA Experiment 20000479 PARAMETER Experiment Name: Zm_Drought_P Parameter: Tissue Value: Aerial
  misc_feature: MA Experiment 20000479 PARAMETER Experiment Name: Zm_Drought_P Parameter: Treatment Value: Drought vs. No Drought
  misc_feature: MA Experiment ID: 20000480 Result: Down-regulated in Transcription
  misc_feature: MA Experiment 20000480 PARAMETER Experiment Name: Zm_Drought_P Parameter: Age (day) Value: 11
  misc_feature: MA Experiment 20000480 PARAMETER Experiment Name: Zm_Drought_P Parameter: Organism Value: Zea mays
  misc_feature: MA Experiment 20000480 PARAMETER Experiment Name: Zm_Drought_P Parameter: Plant Line Value: 35A19
  misc_feature: MA Experiment 20000480 PARAMETER Experiment Name: Zm_Drought_P Parameter: Timepoint (hr) Value: 72
  misc_feature: MA Experiment 20000480 PARAMETER Experiment Name: Zm_Drought_P Parameter: Tissue Value: Aerial
  misc_feature: MA Experiment 20000480 PARAMETER Experiment Name: Zm_Drought_P Parameter: Treatment Value: Drought vs. No Drought
  misc_feature: MA Experiment ID: 20000535 Result: Down-regulated in Transcription
  misc_feature: MA Experiment 20000535 PARAMETER Experiment Name: Zm_Hybrid_Seed_Dev_P Parameter: DAP Value: 30 vs. 12
  misc_feature: MA Experiment 20000535 PARAMETER Experiment Name: Zm_Hybrid_Seed_Dev_P Parameter: Organism Value: Zea mays
  misc_feature: MA Experiment 20000535 PARAMETER Experiment Name: Zm_Hybrid_Seed_Dev_P Parameter: Plant Line Value: 35A19
  misc_feature: MA Experiment 20000535 PARAMETER Experiment Name: Zm_Hybrid_Seed_Dev_P Parameter: Tissue Value: Embryo vs. Unfert Floret
attagcacagactgaagcgcaactagaggatacagccatccattggtagtacacagggtcccacccacaagagaggcatggcggccacatcgtccctgaagagcagccttctcctcccgtctaccatctccgacttcagtggcgcacgcaggccgtctccatctcaacgcagcgccaccatggaatttgatttggcagaagaggagatcacggggggcgagggtgcaggtctcagcggctgcggactccaagaacattctggtcatgggggggactaggttcatcggggtcttcctgtccaggctccttgtcaaggagggccaccaggtcacattgttcaccaggggaaaggcacccataactcagcagctgccaggggagtccgacgcggagtacgcagacttctcctccaaggttctgcacttgaaaggtgacaggcaggacttcgaattcgtgaagacaagcttggctgccaatggatacgatgtggtttacgacatcaatggacgtgaggctgtgcaagttgagcccataattgaggccttgcctaacctgcaacagtacatctattgctcatcggcaggagtgtacctgaaatctgacattcttccgcactgtgaggttgacgcggtggaccccaagagccgtcacaagggcaagctggagacggagagcctgctgacctcgcgcggcgtgaaactggacgtccatcaggcccgtgtacatctacggccccgctcaactacaaccccgtcgaggagtggtttttccaccgcctcaaggccggccgccccatccccatccccggcgccggcaaccagatcacgcagctcggccatgtcaaggatctggcaagagccttcaacctggtgctcgggaacccccaggcgagcaagcagatcttcaacatctccggggccaagtatgtcaccttcgacggccttgcgcgggcatgcgcaaaggctggagggttccctgagccggagctcgtccactacaatcccaaggaattcgacttcggcaagaagaaggccttcccattcagagaccagcacttctttgcgtctgtggagaaggcgacgagcgaactcgggtggacgccggagtttgacctcgtccaggggctcaccaactcgtacaacctcgacttcggccgcggcacgttccggaaggaggcggacttcaccacagacgacatgatcctcgacaagaagcttggccaccgtttgatgcatgtctcgggctagctgtacgtacgtacgattagagaagagataaatgatagcaaatcaaaatttgttgttaagtaaagtgagctcttagcttctatcagggacgattattaaggatacccgaattattcctcccaagaacacactcagagaagtaaggtacctcttaggccgaggcttctcctcgagagtc

SEQ ID NO: 2318 - protein, 311 aa, Zea mays subsp. mays
  peptide (1)..(311): Ceres Seq. ID no. 12410795
  misc_feature (1)..(116): Pfam Name: NAD dependent epimerase/dehydratase family Pfam Description: NAD dependent epimerase/dehydratase family
  misc_feature (1)..(144): Homolog of NCBI NO: 16330056 NR Description: hypothetical protein [Synechocystis sp. PCC 6803]
  misc_feature (1)..(144): Homolog of NCBI NO: 23040971 NR Description: hypothetical protein [Trichodesmium erythraeum
  misc_feature (1)..(144): Homolog of NCBI NO: 23128166 NR Description: hypothetical protein [Nostoc punctiforme]
  misc_feature (1)..(144): Homolog of NCBI NO: 17232323 NR Description: mRNA-binding protein [Nostoc sp. PCC 7120]
  misc_feature (1)..(181): Homolog of NCBI NO: 34398360 NR Description: 38 kDa ribosome-associated protein precursor
  misc_feature (1)..(144): Homolog of NCBI NO: 25454619 NR Description: hypothetical protein g5bf [imported] -
  misc_feature (1)..(144): Homolog of NCBI NO: 17064988 NR Description: g5bf protein [Arabidopsis thaliana]
  misc_feature (1)..(144): Homolog of NCBI NO: 21593201 NR Description: putative RNA-binding protein [Arabidopsis
  misc_feature (1)..(144): Homolog of NCBI NO: 25456171 NR Description: probable RNA binding protein [imported] -
  misc_feature (1)..(144): Homolog of NCBI NO: 15217485 NR Description: putative RNA-binding protein
MGGTRFIGVFLSRLLVKEGHQVTLFTRGKAPITQQLPGESDAEYADFSSKVLHLKGDRQDFEFVKTSLAANGYDVVYDINGREAVQVEPIIEALPNLQQYIYCSSAGVYLKSDILPHCEVDAVDPKSRHKGKLETESLLTSRGVKLDVHQARVHLRPRSTTTPSRSGFSTASRPAAPSPSPAPATRSRSSAMSRIWQEPSTWCSGTPRRASRSSTSPGPSMSPSTALRGHAQRLEGSLSRSSSTTIPRNSTSARRRPSHSETSTSLRLWRRRRANSGGRRSLTSSRGSPTRTTSTSAAARSGRRRTSPQTT

SEQ ID NO: 2319 - DNA, 1026 bp, Zea mays subsp. mays
  misc_feature (1)..(1026): Ceres Seq. ID no. 12414280
  misc_feature: MA Experiment ID: 108522 Result: Down-regulated in Transcription
  misc_feature: MA Experiment 108522 PARAMETER Experiment Name: Zm_42deg_Heat_P Parameter: Age (day) Value: 8
  misc_feature: MA Experiment 108522 PARAMETER Experiment Name: Zm_42deg_Heat_P Parameter: Organism Value: Zea mays
  misc_feature: MA Experiment 108522 PARAMETER Experiment Name: Zm_42deg_Heat_P Parameter: Plant Line Value: 35A19
  misc_feature: MA Experiment 108522 PARAMETER Experiment Name: Zm_42deg_Heat_P Parameter: Temperature (deg C) Value: 42 vs. 22
  misc_feature: MA Experiment 108522 PARAMETER Experiment Name: Zm_42deg_Heat_P Parameter: Timepoint (hr) Value: 1
  misc_feature: MA Experiment 108522 PARAMETER Experiment Name: Zm_42deg_Heat_P Parameter: Tissue Value: Aerial
  misc_feature: MA Experiment ID: 20000492 Result: Up-regulated in Transcription
  misc_feature: MA Experiment 20000492 PARAMETER Experiment Name: Zm_Hybrid_Seed_Dev_P Parameter: DAP Value: 12
  misc_feature: MA Experiment 20000492 PARAMETER Experiment Name: Zm_Hybrid_Seed_Dev_P Parameter: Organism Value: Zea mays
  misc_feature: MA Experiment 20000492 PARAMETER Experiment Name: Zm_Hybrid_Seed_Dev_P Parameter: Plant Line Value: 35A19
  misc_feature: MA Experiment 20000492 PARAMETER Experiment Name: Zm_Hybrid_Seed_Dev_P Parameter: Tissue Value: Fert Kernel vs. Unfert Floret
gactcagactcactcccgtcccccctgcctgcctgcgcgcgctctctgcctcgtggcggcgacgacgccctcctccaggtggccaggccatcgtcggatcgtattcctcggccccttctccggtgatgagcacccagaataaaaggctcaaggatgtggaggtcagtttcccaatcgtctacggaaccatttccttctggctcggcaaaaaggccagcgagtataactctcacaagtggactgtatatgtccgctcggcaaacaatgaggatctgagtgtcatagtcaagcgcgcggtgtttcagcttcacccgagtttccagaacccgacgagagtcgtcggagcagccgcctttcgagctgtccgagtcggggtggggagagtttgagatagccataaccctttatttccacagcgatgtctgtgacaagcgcttggatctgttccatcagcttaagctgtatccagaagaggaagctggacctcaatcgaccaaaaagcctgttgtcgtggaaacgtacgatgagattgtcttccccgagcctacagaggcctttttcctacgcgtgcaaaatcatccagcagctaacgtgcccaggcttcctcctggtataaccttgcctcctccaggccctatggaaattgttccgtatgaaaagaagcgaggtgacactaaggatcatcctttgagtcagtggttctcgaatttctctgaggctgacgagcttttgaaactagctgcagctcggcaacaggttcaggttcacatagccaagctgagaaggcagttaaccatgatagaaggaatgccccagcaatcgaaagccttttctgtccctggacagcagtttaggcacatctaatgtagtgcacctggtttgtaaggaagatgttggaatggaacctttcagcaactgcttgacagattgggttctgtgtattcgcattgaagtcgctgccttgggcttgcaaatgacctgtatattctatgaagtgtagtaccgttaggctcataagagaacact

SEQ ID NO: 2320 - protein, 128 aa, Zea mays subsp. mays
  peptide (1)..(128): Ceres Seq. ID no. 12414281
  misc_feature (55)..(126): Pfam Name: YEATS family Pfam Description: YEATS family
  misc_feature (47)..(126): Homolog of NCBI NO: 39593812 NR Description: Hypothetical protein CBG06140 [Caenorhabditis
  misc_feature (48)..(126): Homolog of NCBI NO: 19920856 NR Description: CG9207-PA [Drosophila melanogaster]
  misc_feature (48)..(126): Homolog of NCBI NO: 18419436 NR Description: GAS41 [Gallus gallus]
  misc_feature (48)..(126): Homolog of NCBI NO: 34864887 NR Description: similar to glioma-amplified sequence-41 [Rattus
  misc_feature (48)..(126): Homolog of NCBI NO: 9755857 NR Description: NuBI-1 protein [Homo sapiens]
  misc_feature (48)..(126): Homolog of NCBI NO: 13386064 NR Description: glioma-amplified sequence-41 [Mus musculus]
  misc_feature (48)..(126): Homolog of NCBI NO: 5729838 NR Description: glioma-amplified sequence-41; NuMA binding
  misc_feature (44)..(126): Homolog of NCBI NO: 6324222 NR Description: Yeast homolog of the human leukemogenic protein
  misc_feature (47)..(126): Homolog of NCBI NO: 15227942 NR Description: unknown protein; protein id: At2g18000.1
  misc_feature (45)..(126): Homolog of NCBI NO: 15242448 NR Description: putative protein
LRLTPVPPACLRALSASWRRRRPPPGGQAIVGSYSSAPSPVMSTQNKRLKDVEVSFPIVYGTISFWLGKKASEYNSHKWTVYVRSANNEDLSVIVKRAVFQLHPSFQNPTRVVGAAAFRAVRVGVGRV

SEQ ID NO: 2321 - protein, 87 aa, Zea mays subsp. mays
  peptide (1)..(87): Ceres Seq. ID no. 12414282
  misc_feature (14)..(85): Pfam Name: YEATS family Pfam Description: YEATS family
  misc_feature (6)..(85): Homolog of NCBI NO: 39593812 NR Description: Hypothetical protein CBG06140 [Caenorhabditis
  misc_feature (7)..(85): Homolog of NCBI NO: 19920856 NR Description: CG9207-PA [Drosophila melanogaster]
  misc_feature (7)..(85): Homolog of NCBI NO: 18419436 NR Description: GAS41 [Gallus gallus]
  misc_feature (7)..(85): Homolog of NCBI NO: 34864887 NR Description: similar to glioma-amplified sequence-41 [Rattus
  misc_feature (7)..(85): Homolog of NCBI NO: 13386064 NR Description: glioma-amplified sequence-41 [Mus musculus]
  misc_feature (7)..(85): Homolog of NCBI NO: 9755857 NR Description: NuBI-1 protein [Homo sapiens]
  misc_feature (7)..(85): Homolog of NCBI NO: 5729838 NR Description: glioma-amplified sequence-41; NuMA binding
  misc_feature (3)..(85): Homolog of NCBI NO: 6324222 NR Description: Yeast homolog of the human leukemogenic protein
  misc_feature (6)..(85): Homolog of NCBI NO: 15227942 NR Description: unknown protein; protein id: At2g18000.1
  misc_feature (4)..(85): Homolog of NCBI NO: 15242448 NR Description: putative protein
MSTQNKRLKDVEVSFPIVYGTISFWLGKKASEYNSHKWTVYVRSANNEDLSVIVKRAVFQLHPSFQNPTRVVGAAAFRAVRVGVGRV

SEQ ID NO: 2322 - protein, 75 aa, Zea mays subsp. mays
  peptide (1)..(75): Ceres Seq. ID no. 12414283
  misc_feature (1)..(73): Homolog of NCBI NO: 40745868 NR Description: hypothetical protein AN1859.2 [Aspergillus
  misc_feature (1)..(66): Homolog of NCBI NO: 15242448 NR Description: putative protein
MEIVPYEKKRGDTKDHPLSQWFSNFSEADELLKLAAARQQVQVHIAKLRRQLTMIEGMPQQSKAFSVPGQQFRHI

SEQ ID NO: 2323 - DNA, 1864 bp, Zea mays subsp. mays
  misc_feature (1)..(1864): Ceres Seq. ID no. 12363824
  misc_feature: MA Experiment ID: 108527 Result: Down-regulated in Transcription
  misc_feature: MA Experiment 108527 PARAMETER Experiment Name: Zm_5mM_NO_P Parameter: Age (day) Value: 8
  misc_feature: MA Experiment 108527 PARAMETER Experiment Name: Zm_5mM_NO_P Parameter: Organism Value: Zea mays
  misc_feature: MA Experiment 108527 PARAMETER Experiment Name: Zm_5mM_NO_P Parameter: Plant Line Value: 35A19
  misc_feature: MA Experiment 108527 PARAMETER Experiment Name: Zm_5mM_NO_P Parameter: Timepoint (hr) Value: 6
  misc_feature: MA Experiment 108527 PARAMETER Experiment Name: Zm_5mM_NO_P Parameter: Tissue Value: Aerial
  misc_feature: MA Experiment 108527 PARAMETER Experiment Name: Zm_5mM_NO_P Parameter: Treatment Value: 5mM NO vs. No Treatment
  misc_feature: MA Experiment ID: 20000488 Result: Down-regulated in Transcription
  misc_feature: MA Experiment 20000488 PARAMETER Experiment Name: Zm_50mM_NH4NO3_L_to_H_P Parameter: Organism Value: Zea mays
  misc_feature: MA Experiment 20000488 PARAMETER Experiment Name: Zm_50mM_NH4NO3_L_to_H_P Parameter: Timepoint (hr) Value: 8
  misc_feature: MA Experiment 20000488 PARAMETER Experiment Name: Zm_50mM_NH4NO3_L_to_H_P Parameter: Tissue Value: Leaves
  misc_feature: MA Experiment 20000488 PARAMETER Experiment Name: Zm_50mM_NH4NO3_L_to_H_P Parameter: Treatment Value: 50mM NH4NO3 vs. 100mM Mannitol
  misc_feature: MA Experiment ID: 20000492 Result: Down-regulated in Transcription
  misc_feature: MA Experiment 20000492 PARAMETER Experiment Name: Zm_Hybrid_Seed_Dev_P Parameter: DAP Value: 12
  misc_feature: MA Experiment 20000492 PARAMETER Experiment Name: Zm_Hybrid_Seed_Dev_P Parameter: Organism Value: Zea mays
  misc_feature: MA Experiment 20000492 PARAMETER Experiment Name: Zm_Hybrid_Seed_Dev_P Parameter: Plant Line Value: 35A19
  misc_feature: MA Experiment 20000492 PARAMETER Experiment Name: Zm_Hybrid_Seed_Dev_P Parameter: Tissue Value: Fert Kernel vs. Unfert Floret
gcacgagaccattacctagaacatcctaatcgaaaaactgtcttgcctgttgcctctgcggctttgcctgcgctcacggacggtcactggctcacgctcccctcgcctgcgtcgcctcgcctagacaagagacaagacgcctagtcgcctccgatcgaaatcgaatcgagtcgggtgggctcgggcccggtcttgttgtcttgtctcccagctaggaatagcgcaacgagatccctcgcgcgcgcggaccccggagaggccgagggagggtgacagggcgtgtcctcgaccgcgaggggaatgggatcggagggacgggcctggaacggcgcgggcatggccgccggcagcggctatggcggcggggtagaggcgaaagcgaccaccacggctgtgtcggccgcggcccccgcggaggttcccacgtcggcggcctccgtcgacatctcgctgccgctcctgaagatgtcgcctcgcatcatagctctctgcaaggaattggtcgaagggtggtcgtcgattgacagctcgctcttctccatcgagaccgtgtccgggggcatcacgaatctattgctgaaggtttctgtcaaagaagacaacggcaatgagtcttctgttactgttcggttgtatggaccaaatacggacttggtgattgataggaaaagggaattgcaggcgataccatatctctcagctgcagggttcggggctcggctacttggaatatttgagaatggagtagttcagtcattcatctatgctcgaacactgtcaccagcagacatgaaagaacctaaaatagcagctgaaattgccaaggagctacgcaaattccatcaagtagacataccagggtctaaataaccacaattgtggaatgatatattcaagtttttgaagaaagctgcagcattgaagtttgaggataacatgaagcagaagagatatgaaaagatctcatttagagaaatacaagatgaagttcaagaacttaaggatctcttggacattctgcgcgcgcctgtggtttatgcacacaatgacttgctttcaggaaatctgatgctcaatgatttggaagggaagctatattttattgattttgagtatgggtcatacagctaccgtggctatgacattgcaaatcatttcaatgagtatgcaggatttgattgtgactataatttgtacccagataaagatgcccagtatcacttcttcaggaattatctacacactgatagacctagtgaggtggatgcacaagatatggaagtactttatgtggaaacaaacactttcagactagcatcgcacatttactgggcattatgggcccttattcaggcaaaggtatccccaattgactttgactatcttggatacttcttcttgcggtatggtgagtacaagaaacaaagggagtcctgcttctccttggcacaaagctttctctccgagctaaaaaatggctagagcctgagaatctgttcacgagtttatactggtgtacgcatgctcggagcgggtacgcgttgtgatcatcgactgctacccagaaactctattatagcggttgtagcagcccctcattgttgtatctgatgttaggttcatcattgtctaaggactagtttggatactctagtatcgagctcaattcatgtgtatgagatggattcgggtgtaacttaaactaatttacacactaatccaactcaacacatgtggattggggtcaatactaaattacccaaacaaagcctaacagggaagtcaccagtggcaaattatgtacttatatttataataataaacacaatcctgatgggttgtgccctgttgaatttgttcttcg

SEQ ID NO: 2324 - protein, 189 aa, Zea mays subsp. mays
  peptide (1)..(189): Ceres Seq. ID no. 12363825
  misc_feature (104)..(189): Pfam Name: Choline/ethanolamine kinase Pfam Description: Choline/ethanolamine kinase
  misc_feature (87)..(189): Homolog of NCBI NO: 37786753 NR Description: putative ethanolamine kinase [Mus musculus]
  misc_feature (23)..(189): Homolog of NCBI NO: 34880218 NR Description: similar to Ethanolamine kinase-like protein EKI2
  misc_feature (22)..(189): Homolog of NCBI NO: 14603244 NR Description: Similar to hypothetical protein FLJ10761 [Homo
  misc_feature (61)..(189): Homolog of NCBI NO: 14194720 NR Description: ETHANOLAMINE KINASE (EKI)
  misc_feature (61)..(189): Homolog of NCBI NO: 10092615 NR Description: ethanolamine kinase [Homo sapiens]
  misc_feature (61)..(189): Homolog of NCBI NO: 26340554 NR Description: unnamed protein product [Mus musculus]
  misc_feature (61)..(189): Homolog of NCBI NO: 26328955 NR Description: unnamed protein product [Mus musculus]
  misc_feature (72)..(189): Homolog of NCBI NO: 28829950 NR Description: similar to Arabidopsis thaliana (Mouse-ear
  misc_feature (27)..(189): Homolog of NCBI NO: 21593269 NR Description: putative choline kinase [Arabidopsis thaliana]
  misc_feature (27)..(189): Homolog of NCBI NO: 15225800 NR Description: putative choline kinase
MGSEGRAWNGAGMAAGSGYGGGVEAKATTTAVSAAAPAEVPTSAASVDISLPLLKMSPRIIALCKELVEGWSSIDSSLFSIETVSGGITNLLLKVSVKEDNGNESSVTVRLYGPNTDLVIDRKRELQAIPYLSAAGFGARLLGIFENGVVQSFIYARTLSPADMKEPKIAAEIAKELRKFHQVDIPGSK

SEQ ID NO: 2325 - protein, 181 aa, Zea mays subsp. mays
  peptide (1)..(181): Ceres Seq. ID no. 12363826
  misc_feature (1)..(162): Pfam Name: Choline/ethanolamine kinase Pfam Description: Choline/ethanolamine kinase
  misc_feature (1)..(170): Homolog of NCBI NO: 14603244 NR Description: Similar to hypothetical protein FLJ10761 [Homo
  misc_feature (1)..(170): Homolog of NCBI NO: 14194720 NR Description: ETHANOLAMINE KINASE (EKI)
  misc_feature (1)..(170): Homolog of NCBI NO: 10092615 NR Description: ethanolamine kinase [Homo sapiens]
  misc_feature (1)..(170): Homolog of NCBI NO: 26340554 NR Description: unnamed protein product [Mus musculus]
  misc_feature (1)..(170): Homolog of NCBI NO: 37786753 NR Description: putative ethanolamine kinase [Mus musculus]
  misc_feature (1)..(167): Homolog of NCBI NO: 34880218 NR Description: similar to Ethanolamine kinase-like protein EKI2
  misc_feature (1)..(170): Homolog of NCBI NO: 26328955 NR Description: unnamed protein product [Mus musculus]
  misc_feature (1)..(170): Homolog of NCBI NO: 28829950 NR Description: similar to Arabidopsis thaliana (Mouse-ear
  misc_feature (1)..(176): Homolog of NCBI NO: 21593269 NR Description: putative choline kinase [Arabidopsis thaliana]
  misc_feature (1)..(176): Homolog of NCBI NO: 15225800 NR Description: putative choline kinase
MKQKRYEKISFREIQDEVQELKDLLDILRAPVVYAHNDLLSGNLMLNDLEGKLYFIDFEYGSYSYRGYDIANHFNEYAGFDCDYNLYPDKDAQYHFFRNYLHTDRPSEVDAQDMEVLYVETNTFRLASHIYWALWALIQAKVSPIDFDYLGYFFLRYGEYKKQRESCFSLAQSFLSELKNG

SEQ ID NO: 2326 - protein, 177 aa, Zea mays subsp. mays
  peptide (1)..(177): Ceres Seq. ID no. 12363827
  misc_feature (92)..(177): Pfam Name: Choline/ethanolamine kinase Pfam Description: Choline/ethanolamine kinase
  misc_feature (75)..(177): Homolog of NCBI NO: 37786753 NR Description: putative ethanolamine kinase [Mus musculus]
  misc_feature (11)..(177): Homolog of NCBI NO: 34880218 NR Description: similar to Ethanolamine kinase-like protein EKI2
  misc_feature (10)..(177): Homolog of NCBI NO: 14603244 NR Description: Similar to hypothetical protein FLJ10761 [Homo
  misc_feature (49)..(177): Homolog of NCBI NO: 14194720 NR Description: ETHANOLAMINE KINASE (EKI)
  misc_feature (49)..(177): Homolog of NCBI NO: 10092615 NR Description: ethanolamine kinase [Homo sapiens]
  misc_feature (49)..(177): Homolog of NCBI NO: 26340554 NR Description: unnamed protein product [Mus musculus]
  misc_feature (49)..(177): Homolog of NCBI NO: 26328955 NR Description: unnamed protein product [Mus musculus]
  misc_feature (60)..(177): Homolog of NCBI NO: 28829950 NR Description: similar to Arabidopsis thaliana (Mouse-ear
  misc_feature (15)..(177): Homolog of NCBI NO: 21593269 NR Description: putative choline kinase [Arabidopsis thaliana]
  misc_feature (15)..(177): Homolog of NCBI NO: 15225800 NR Description: putative choline kinase
MAAGSGYGGGVEAKATTTAVSAAAPAEVPTSAASVDISLPLLKMSPRIIALCKELVEGWSSIDSSLFSIETVSGGITNLLLKVSVKEDNGNESSVTVRLYGPNTDLVIDRKRELQAIPYLSAAGFGARLLGIFENGVVQSFIYARTLSPADMKEPKIAAEIAKELRKFHQVDIPGSK

SEQ ID NO: 2327 - DNA, 1445 bp, Zea mays subsp. mays
  misc_feature (1)..(1445): Ceres Seq. ID no. 12355917
  misc_feature: MA Experiment ID: 108522 Result: Up-regulated in Transcription
  misc_feature: MA Experiment 108522 PARAMETER Experiment Name: Zm_42deg_Heat_P Parameter: Age (day) Value: 8
  misc_feature: MA Experiment 108522 PARAMETER Experiment Name: Zm_42deg_Heat_P Parameter: Organism Value: Zea mays
  misc_feature: MA Experiment 108522 PARAMETER Experiment Name: Zm_42deg_Heat_P Parameter: Plant Line Value: 35A19
  misc_feature: MA Experiment 108522 PARAMETER Experiment Name: Zm_42deg_Heat_P Parameter: Temperature (deg C) Value: 42 vs. 22
  misc_feature: MA Experiment 108522 PARAMETER Experiment Name: Zm_42deg_Heat_P Parameter: Timepoint (hr) Value: 1
  misc_feature: MA Experiment 108522 PARAMETER Experiment Name: Zm_42deg_Heat_P Parameter: Tissue Value: Aerial
accttcttcccagatcaataggggcgaggcgacaccagcgaggagacgaaatcgtttaaaggcgccagcttgtcttctgttccatttgtggtttcatttcctctgcaaacgatttccattttttctgcacgccgtcagctgatccttttcgccgtagtatccccgagcaaaagagaaaacccttttttttgtgcgctgtgctgtttcgccatctctgttcgtcccaccgaggcaccgactcaatccccattcttggcatctggcttcacaaaacaagaccggttcccgttccctagatctctgcgtagaggcggcggcgaggcacctgaatccggcaaaaaagggttcgcggtttggttgggaggagcgcaggagcccggcgccaaaacccaatcttggcgcccgggctgccgtgcgccatcgtcttctccctgtggtgtttagggagaggagaaggccggtggagatggtgccgtgggaagggtacgtcagcgacgagacgatgggcaccttctcgcccatcgtgctctactggctgtacgccggcggctaccagctgatccttcaccgccggccgcttgagcggtacaggctccacacgcgggacgaggaggaggagaagaacctcgtcagcctctccaccgtcgtccgtggcgtactcctgcagcagctcgtgcaggccatcgtcgcgatgattttgttcatggtgacttctgatagctcaataactgttgttcagccacctatcgtcgtccagatcttccagtttctagttgcaatgttagtgatggactcatggcagtactttgtgcaccgctacatgcaccaaaacaagttcctgtatcggcacatccactcgcagcaccatcggctgattgtcccttacgctatcggggctctgtacaaccacccactggagggcctgcttctggacaccttaggaggcgccatctccttcttggtctccggcatgacgccgaggaccgccgtgttcttcttctgcttcgcagtcctcaagacggtcgacgatcactgcgggctttggctaccgtataacatcttccagcacctgttccagaacaacaccgcctatcacgacatccaccaccagctgcaaggaaccaaatacaactactcccagccattcttctcgatctgggacagaatgctaggaacccacatgccgtacgacttagtgagcaggaaagaaggtggatttgaagcaaggccgtcgcgagactagcttgaagtcatggaagtgtacaggctccggtgaatgagtcagacagaatatggttttttagctgtcatggactcatggttcattttttaaaaaaaaattgtgcagggctgccatttacattgctgtgcagatagtgcatttgaaaatccacacttctgtatgtacccagttatttgtgtaattgattgaacctctcgtcgtg

SEQ ID NO: 2328 - protein, 258 aa, Zea mays subsp. mays
  peptide (1)..(258): Ceres Seq. ID no. 12355918
  misc_feature (12)..(80): Homolog of NCBI NO: 19113281 NR Description: hypothetical integral membrane protein, putative
  misc_feature (95)..(240): Homolog of NCBI NO: 19113281 NR Description: hypothetical integral membrane protein, putative
  misc_feature (39)..(203): Homolog of NCBI NO: 5360721 NR Description: acid phosphatase [Lupinus albus]
  misc_feature (6)..(84): Homolog of NCBI NO: 34911990 NR Description: P0694A04.28 [Oryza sativa (japonica
  misc_feature (100)..(255): Homolog of NCBI NO: 34911990 NR Description: P0694A04.28 [Oryza sativa (japonica
  misc_feature (8)..(255): Homolog of NCBI NO: 25511716 NR Description: F14L17.5 protein - Arabidopsis thaliana
  misc_feature (8)..(255): Homolog of NCBI NO: 18394095 NR Description: acid phosphatase, putative
  misc_feature (8)..(258): Homolog of NCBI NO: 25404823 NR Description: probable sterol desaturase T6C23.16
  misc_feature (8)..(258): Homolog of NCBI NO: 22330531 NR Description: acid phosphatase, putative
  misc_feature (13)..(258): Homolog of NCBI NO: 34913184 NR Description: similar to acid phosphatase
MVPWEGYVSDETMGTFSPIVLYWLYAGGYQLILHRRPLERYRLHTRDEEEEKNLVSLSTVVRGVLLQQLVQAIVAMILFMVTSDSSITVVQPPIVVQIFQFLVAMLVMDSWQYFVHRYMHQNKFLYRHIHSQHHRLIVPYAIGALYNHPLEGLLLDTLGGAISFLVSGMTPRTAVFFFCFAVLKTVDDHCGLWLPYNIFQHLFQNNTAYHDIHHQLQGTKYNYSQPFFSIWDRMLGTHMPYDLVSRKEGGFEARPSRD

SEQ ID NO: 2329 - protein, 246 aa, Zea mays subsp. mays
  peptide (1)..(246): Ceres Seq. ID no. 12355919
  misc_feature (1)..(68): Homolog of NCBI NO: 19113281 NR Description: hypothetical integral membrane protein, putative
  misc_feature (83)..(228): Homolog of NCBI NO: 19113281 NR Description: hypothetical integral membrane protein, putative
  misc_feature (27)..(191): Homolog of NCBI NO: 5360721 NR Description: acid phosphatase [Lupinus albus]
  misc_feature (1)..(72): Homolog of NCBI NO: 34911990 NR Description: P0694A04.28 [Oryza sativa (japonica
  misc_feature (88)..(243): Homolog of NCBI NO: 34911990 NR Description: P0694A04.28 [Oryza sativa (japonica
  misc_feature (1)..(243): Homolog of NCBI NO: 25511716 NR Description: F14L17.5 protein - Arabidopsis thaliana
  misc_feature (1)..(243): Homolog of NCBI NO: 18394095 NR Description: acid phosphatase, putative
  misc_feature (1)..(246): Homolog of NCBI NO: 25404823 NR Description: probable sterol desaturase T6C23.16
  misc_feature (1)..(246): Homolog of NCBI NO: 22330531 NR Description: acid phosphatase, putative
  misc_feature (1)..(246): Homolog of NCBI NO: 34913184 NR Description: similar to acid phosphatase
MGTFSPIVLYWLYAGGYQLILHRRPLERYRLHTRDEEEEKNLVSLSTVVRGVLLQQLVQAIVAMILFMVTSDSSITVVQPPIVVQIFQFLVAMLVMDSWQYFVHRYMHQNKFLYRHIHSQHHRLIVPYAIGALYNHPLEGLLLDTLGGAISFLVSGMTPRTAVFFFCFAVLKTVDDHCGLWLPYNIFQHLFQNNTAYHDIHHQLQGTKYNYSQPFFSIWDRMLGTHMPYDLVSRKEGGFEARPSRD

SEQ ID NO: 2330 - protein, 183 aa, Zea mays subsp. mays
  peptide (1)..(183): Ceres Seq. ID no. 12355920
  misc_feature (19)..(162): Homolog of NCBI NO: 32411679 NR Description: hypothetical protein [Neurospora crassa]
  misc_feature (21)..(178): Homolog of NCBI NO: 40746027 NR Description: hypothetical protein AN0640.2 [Aspergillus
  misc_feature (20)..(165): Homolog of NCBI NO: 19113281 NR Description: hypothetical integral membrane protein, putative
  misc_feature (1)..(128): Homolog of NCBI NO: 5360721 NR Description: acid phosphatase [Lupinus albus]
  misc_feature (25)..(180): Homolog of NCBI NO: 34911990 NR Description: P0694A04.28 [Oryza sativa (japonica
  misc_feature (1)..(180): Homolog of NCBI NO: 25511716 NR Description: F14L17.5 protein - Arabidopsis thaliana
  misc_feature (1)..(180): Homolog of NCBI NO: 18394095 NR Description: acid phosphatase, putative
  misc_feature (1)..(183): Homolog of NCBI NO: 25404823 NR Description: probable sterol desaturase T6C23.16
  misc_feature (1)..(183): Homolog of NCBI NO: 22330531 NR Description: acid phosphatase, putative
  misc_feature (1)..(183): Homolog of NCBI NO: 34913184 NR Description: similar to acid phosphatase
MILFMVTSDSSITVVQPPIVVQIFQFLVAMLVMDSWQYFVHRYMHQNKFLYRHIHSQHHRLIVPYAIGALYNHPLEGLLLDTLGGAISFLVSGMTPRTAVFFFCFAVLKTVDDHCGLWLPYNIFQHLFQNNTAYHDIHHQLQGTKYNYSQPFFSIWDRMLGTHMPYDLVSRKEGGFEARPSRD

SEQ ID NO: 2331 - DNA, 1286 bp, Zea mays subsp. mays
  misc_feature (1)..(1286): Ceres Seq. ID no. 12410790
  misc_feature: MA Experiment ID: 20000480 Result: Down-regulated in Transcription
  misc_feature: MA Experiment 20000480 PARAMETER Experiment Name: Zm_Drought_P Parameter: Age (day) Value: 11
  misc_feature: MA Experiment 20000480 PARAMETER Experiment Name: Zm_Drought_P Parameter: Organism Value: Zea mays
  misc_feature: MA Experiment 20000480 PARAMETER Experiment Name: Zm_Drought_P Parameter: Plant Line Value: 35A19
  misc_feature: MA Experiment 20000480 PARAMETER Experiment Name: Zm_Drought_P Parameter: Timepoint (hr) Value: 72
  misc_feature: MA Experiment 20000480 PARAMETER Experiment Name: Zm_Drought_P Parameter: Tissue Value: Aerial
  misc_feature: MA Experiment 20000480 PARAMETER Experiment Name: Zm_Drought_P Parameter: Treatment Value: Drought vs. No Drought
gagagccccgcccccgggaggccgggagagaagagaacacgcgcgtcaggagcgcacaccgcacggcgcacacacacacgcctcccgcggcaagcagcgcaggacaccgacgacgaagcgaggagaggggaggaggcggagccgagcgcccgagcccaaccccgcaaccacgacccacttccccgtcgcgattcgcattgcccttccctcgggttctacccccagcctcgcgccgccgccgccgccgccgcccttgccagagagatcaccccccattcccacaatcccgtccctccctccgtccctcgacgagccgagccctccgcgcggccgtgggatggggcagtgaccggtgagtggcgtggggagccggtgggcggtggcgagggcatatcatggtgcagtgcctggacggggtgaggcagctgctcgcggtcctgctcaattgctgcgacgtcgagctcaagcagccgcgggggctccaagacccccaggtcctcgcgagggagaccgtcttcagcgtgagtgaggtcgaggcgctgtacgagctgtttaagaggatcagcagcgccgtcattgatgatgggctgattaacaaggaggaatttcagttggcgctatttaagaccaacaagaaggagagcctgttcgcggatcgcgtatttgatttatttgacacaaagcacagtggaattttgggatttgaagaatttgctcgtgctctctcagtatttcatcctaatgctccccttgatgagaaaattgatttttcattccggctgtatgatctcaagcagcaaggctatattgagagacaagaggttaagcagatggttgttgcaacacttgccgagtcaggaatgaatctttcggatgaaattgtagagagtataattgacaagacatttgaggaggcagacacaaagcatgatggaagaattgacaaggaagagtggcgcaatctagtcattcggcatccttctttgctgaagaacatgactcttcagtacctcaaggacatcaccactacatttccaagctttgtctttcactctcaggttgatgataactgaaattgatggggttactttgaaaagaaacattagaagatattctcatgggttctgatatggttttcatttttcaaaattgggttgttggattgaaagattgtagtgttgtgaagtacgtgcatgttggattcgaggactcgattttttttgtcaaccttgtttctttcatttgcatgtctggatgcgcatgaataagatatgaagtttatgtct

SEQ ID NO: 2332 - protein, 225 aa, Zea mays subsp. mays
  peptide (1)..(225): Ceres Seq. ID no. 12410791
  misc_feature (166)..(194): Pfam Name: EF hand Pfam Description: EF hand
  misc_feature (24)..(224): Homolog of NCBI NO: 18414931 NR Description: calcineurin B-like protein 1
  misc_feature (1)..(224): Homolog of NCBI NO: 13448027 NR Description: SOS3-like calcium binding protein [Arabidopsis
  misc_feature (1)..(224): Homolog of NCBI NO: 18414640 NR Description: expressed protein
  misc_feature (31)..(219): Homolog of NCBI NO: 38493047 NR Description: Chain A, The Crystal Structure Of The Calcium
  misc_feature (1)..(224): Homolog of NCBI NO: 21593228 NR Description: calcineurin B-like protein 2 [Arabidopsis
  misc_feature (1)..(224): Homolog of NCBI NO: 30687272 NR Description: calcineurin B-like protein 3 (CBL3) [Arabidopsis
  misc_feature (1)..(224): Homolog of NCBI NO: 15241101 NR Description: calcineurin B-like protein 2 (gb|AAC26009.1)
  misc_feature (1)..(224): Homolog of NCBI NO: 15236778 NR Description: calcineurin B-like protein 3
  misc_feature (1)..(224): Homolog of NCBI NO: 22137326 NR Description: calcineurin B [Pisum sativum]
  misc_feature (1)..(224): Homolog of NCBI NO: 16924116 NR Description: putative calcineurin B-like protein [Oryza sativa]
MVQCLDGVRQLLAVLLNCCDVELKQPRGLQDPQVLARETVFSVSEVEALYELFKRISSAVIDDGLINKEEFQLALFKTNKKESLFADRVFDLFDTKHSGILGFEEFARALSVFHPNAPLDEKIDFSFRLYDLKQQGYIERQEVKQMVVATLAESGMNLSDEIVESIIDKTFEEADTKHDGRIDKEEWRNLVIRHPSLLKNMTLQYLKDITTTFPSFVFHSQVDDN

SEQ ID NO: 2333 - protein, 139 aa, Zea mays subsp. mays
  peptide (1)..(139): Ceres Seq. ID no. 12410792
ESPAPGRPGEKRTRASGAHTARRTHTRLPRQAAQDTDDEARRGEEAEPSARAQPRNHDPLPRRDSHCPSLGFYPQPRAAAAAAALAREITPHSHNPVPPSVPRRAEPSARPWDGAVTGEWRGEPVGGGEGISWCSAWTG

SEQ ID NO: 2334 - protein, 117 aa, Zea mays subsp. mays
  peptide (1)..(117): Ceres Seq. ID no. 12410793
EPRPREAGREENTRVRSAHRTAHTHTPPAASSAGHRRRSEERGGGGAERPSPTPQPRPTSPSRFALPFPRVLPPASRRRRRRRPCQRDHPPFPQSRPSLRPSTSRALRAAVGWGSDR

SEQ ID NO: 2335 - DNA, 1618 bp, Zea mays subsp. mays
  misc_feature (1)..(1618): Ceres Seq. ID no. 13493644
  misc_feature: MA Experiment ID: 108528 Result: Down-regulated in Transcription
  misc_feature: MA Experiment 108528 PARAMETER Experiment Name: Zm_Imbibed_Seeds_P Parameter: Age (day) Value: 5 vs. 2
  misc_feature: MA Experiment 108528 PARAMETER Experiment Name: Zm_Imbibed_Seeds_P Parameter: Organism Value: Zea mays
  misc_feature: MA Experiment 108528 PARAMETER Experiment Name: Zm_Imbibed_Seeds_P Parameter: Plant Line Value: 35A19
  misc_feature: MA Experiment 108528 PARAMETER Experiment Name: Zm_Imbibed_Seeds_P Parameter: Tissue Value: Aerial vs. Embryo
  misc_feature: MA Experiment ID: 108530 Result: Down-regulated in Transcription
  misc_feature: MA Experiment 108530 PARAMETER Experiment Name: Zm_Imbibed_Seeds_P Parameter: Age (day) Value: 6 vs. 2
  misc_feature: MA Experiment 108530 PARAMETER Experiment Name: Zm_Imbibed_Seeds_P Parameter: Organism Value: Zea mays
  misc_feature: MA Experiment 108530 PARAMETER Experiment Name: Zm_Imbibed_Seeds_P Parameter: Plant Line Value: 35A19
  misc_feature: MA Experiment 108530 PARAMETER Experiment Name: Zm_Imbibed_Seeds_P Parameter: Tissue Value: Aerial vs. Embryo
  misc_feature: MA Experiment ID: 20000479 Result: Up-regulated in Transcription
  misc_feature: MA Experiment 20000479 PARAMETER Experiment Name: Zm_Drought_P Parameter: Age (day) Value: 10
  misc_feature: MA Experiment 20000479 PARAMETER Experiment Name: Zm_Drought_P Parameter: Organism Value: Zea mays
  misc_feature: MA Experiment 20000479 PARAMETER Experiment Name: Zm_Drought_P Parameter: Plant Line Value: 35A19
  misc_feature: MA Experiment 20000479 PARAMETER Experiment Name: Zm_Drought_P Parameter: Timepoint (hr) Value: 48
  misc_feature: MA Experiment 20000479 PARAMETER Experiment Name: Zm_Drought_P Parameter: Tissue Value: Aerial
  misc_feature: MA Experiment 20000479 PARAMETER Experiment Name: Zm_Drought_P Parameter: Treatment Value: Drought vs. No Drought
  misc_feature: MA Experiment ID: 20000480 Result: Up-regulated in Transcription
  misc_feature: MA Experiment 20000480 PARAMETER Experiment Name: Zm_Drought_P Parameter: Age (day) Value: 11
  misc_feature: MA Experiment 20000480 PARAMETER Experiment Name: Zm_Drought_P Parameter: Organism Value: Zea mays
  misc_feature: MA Experiment 20000480 PARAMETER Experiment Name: Zm_Drought_P Parameter: Plant Line Value: 35A19
  misc_feature: MA Experiment 20000480 PARAMETER Experiment Name: Zm_Drought_P Parameter: Timepoint (hr) Value: 72
  misc_feature: MA Experiment 20000480 PARAMETER Experiment Name: Zm_Drought_P Parameter: Tissue Value: Aerial
  misc_feature: MA Experiment 20000480 PARAMETER Experiment Name: Zm_Drought_P Parameter: Treatment Value: Drought vs. No Drought
  misc_feature: MA Experiment ID: 20000487 Result: Up-regulated in Transcription
  misc_feature: MA Experiment 20000487 PARAMETER Experiment Name: Zm_50mM_NH4NO3_L_to_H_P Parameter: Organism Value: Zea mays
  misc_feature: MA Experiment 20000487 PARAMETER Experiment Name: Zm_50mM_NH4NO3_L_to_H_P Parameter: Timepoint (hr) Value: 4
  misc_feature: MA Experiment 20000487 PARAMETER Experiment Name: Zm_50mM_NH4NO3_L_to_H_P Parameter: Tissue Value: Leaves
  misc_feature: MA Experiment 20000487 PARAMETER Experiment Name: Zm_50mM_NH4NO3_L_to_H_P Parameter: Treatment Value: 50mM NH4NO3 vs. 100mM Mannitol
  misc_feature: MA Experiment ID: 20000488 Result: Up-regulated in Transcription
  misc_feature: MA Experiment 20000488 PARAMETER Experiment Name: Zm_50mM_NH4NO3_L_to_H_P Parameter: Organism Value: Zea mays
  misc_feature: MA Experiment 20000488 PARAMETER Experiment Name: Zm_50mM_NH4NO3_L_to_H_P Parameter: Timepoint (hr) Value: 8
  misc_feature: MA Experiment 20000488 PARAMETER Experiment Name: Zm_50mM_NH4NO3_L_to_H_P Parameter: Tissue Value: Leaves
  misc_feature: MA Experiment 20000488 PARAMETER Experiment Name: Zm_50mM_NH4NO3_L_to_H_P Parameter: Treatment Value: 50mM NH4NO3 vs. 100mM Mannitol
  misc_feature: MA Experiment ID: 20000535 Result: Up-regulated in Transcription
  misc_feature: MA Experiment 20000535 PARAMETER Experiment Name: Zm_Hybrid_Seed_Dev_P Parameter: DAP Value: 30 vs. 12
  misc_feature: MA Experiment 20000535 PARAMETER Experiment Name: Zm_Hybrid_Seed_Dev_P Parameter: Organism Value: Zea mays
  misc_feature: MA Experiment 20000535 PARAMETER Experiment Name: Zm_Hybrid_Seed_Dev_P Parameter: Plant Line Value: 35A19
  misc_feature: MA Experiment 20000535 PARAMETER Experiment Name: Zm_Hybrid_Seed_Dev_P Parameter: Tissue Value: Embryo vs. Unfert Floret
  misc_feature: MA Experiment ID: 20001613 Result: Up-regulated in Transcription
  misc_feature: MA Experiment 20001613 PARAMETER Experiment Name: Zm_50ppm_KNO3_L-to-H_P Parameter: Age (day) Value: 20
  misc_feature: MA Experiment 20001613 PARAMETER Experiment Name: Zm_50ppm_KNO3_L-to-H_P Parameter: Organism Value: Zea mays
  misc_feature: MA Experiment 20001613 PARAMETER Experiment Name: Zm_50ppm_KNO3_L-to-H_P Parameter: Plant Line Value: 35A19
  misc_feature: MA Experiment 20001613 PARAMETER Experiment Name: Zm_50ppm_KNO3_L-to-H_P Parameter: Timepoint (hr) Value: 24
  misc_feature: MA Experiment 20001613 PARAMETER Experiment Name: Zm_50ppm_KNO3_L-to-H_P Parameter: Tissue Value: Roots
  misc_feature: MA Experiment 20001613 PARAMETER Experiment Name: Zm_50ppm_KNO3_L-to-H_P Parameter: Treatment Value: 50ppm KNO3 vs. 50ppm KCl
gaaaagaatataataaaataaaaacccagcagcatttctccgccgcccatacgacgacgacggccactcggcgcagtgatttgggcgccccgcaaagcggtggctccaccggccagcgcatcaaaggccctgtggaatatggcgccgcgccgcttgccggggccgggccctcctctttatatatggcgtggcgagcaaacccaaaaccctcgcaggcagaaggcaaacgcggctgcgagcgcggcgccccctcccactatccagccgccgccagcccgcacacccctccctcgcgcgctcagggtttcggaatggaggccgatgcggcggccaagaggacgcgggagagcggggaggacgccaccgcggcggggatctccgccgtcatcccgggatggttctccgagatcagccccatgtggcccggtgaggcgcactctttgaaggtggagaaggtgctgttccaagggaagtcagactaccaaaacgttatggtctttcagtcctctacgtacgggaaggtgctcgtccttgatggagttattcaggttacggagagggatgagtgtgcgtaccaagagatgatcactcacctgcccctttgctccatcaaagatcccaagaaggtgttggttattggagggggtgatggtggtgttctgcgtgaggtttcacggcattcctctgtggaacaaattgacatctgtgaaattgacaagatggtggtagatgtatccaaacaatttttccctcatttagctgttggatttgaagaccctcgtgtgtcattacacattggagatggggttgcctttttgaaaaatgctccagaaggtacttatgacgcagtaattgtggactcatctgatccgataggtcctgctcaagagctttttgagaagcctttcttccagttggtggccagagctttgcgtccaggtggagttgtatgcacccaagcagagagcatatggctacatatacacattattgaagatattgttgtcaattgtcgacaagttttcaaaggctcggttaactatgcttggacaacggtgcctacataccctagcggagttattgggttcatgctttgctccaccgaagggcctgctgttgatttccagcaccctgttttcaacatcgaggaggatgaacatcctatgaaatcaaaaggaccccttaagttctacaactcggagatccacacggcatcattctgtttgccttcttttgcaaagagggtaatcgagtcaaaagcgaactagacgtgaaggtatctccaagggctaagtaccttaggtgcgcaacacagaatttgttgtagtgtgaaaagcggatgcctccctcccttttctccccctttgatgaatagtataagcacaggagatgagatgcaacagttatcggagttatcagtctacatggtcctgaccagtcgtatgtctcggctgcctggtgcagctatgaaaacgttttgcaatagcttttttcggcagtcctcacatcatcacggttgtgtttccgcttccacatcagaatggaatatatatacgtatgaaataaaactgtgtaatggctgctgccatcggatcctttttaaaacaggttcagctct

SEQ ID NO: 2336 - protein, 421 aa, Zea mays subsp. mays
  peptide (1)..(421): Ceres Seq. ID no. 13493645
  misc_feature (131)..(376): Pfam Name: Spermine/spermidine synthase Pfam Description: Spermine/spermidine synthase
  misc_feature (88)..(420): Homolog of NCBI NO: 23495354 NR Description: spermidine synthase [Malus x domestica]
  misc_feature (125)..(419): Homolog of NCBI NO: 15150055 NR Description: spermidine synthase [Solanum tuberosum]
  misc_feature (125)..(419): Homolog of NCBI NO: 6094336 NR Description: Spermidine synthase (Putrescine
  misc_feature (124)..(421): Homolog of NCBI NO: 12229958 NR Description: Spermidine synthase 1 (Putrescine
  misc_feature (116)..(419): Homolog of NCBI NO: 6094328 NR Description: Spermidine synthase 1 (Putrescine
  misc_feature (105)..(419): Homolog of NCBI NO: 12230013 NR Description: Spermidine synthase (Putrescine
  misc_feature (106)..(421): Homolog of NCBI NO: 6094335 NR Description: Spermidine synthase (Putrescine
  misc_feature (115)..(419): Homolog of NCBI NO: 6094327 NR Description: Spermidine synthase 1 (Putrescine
  misc_feature (115)..(420): Homolog of NCBI NO: 6094330 NR Description: Spermidine synthase 2 (Putrescine
  misc_feature (104)..(421): Homolog of NCBI NO: 12229998 NR Description: Spermidine synthase 1 (Putrescine
KEYNKIKTQQHFSAAHTTTTATRRSDLGAPQSGGSTGQRIKGPVEYGAAPLAGAGPSSLYMAWRANPKPSQAEGKRGCERGAPSHYPAAASPHTPPSRAQGFGMEADAAAKRTRESGEDATAAGISAVIPGWFSEISPMWPGEAHSLKVEKVLFQGKSDYQNVMVFQSSTYGKVLVLDGVIQVTERDECAYQEMITHLPLCSIKDPKKVLVIGGGDGGVLREVSRHSSVEQIDICEIDKMVVDVSKQFFPHLAVGFEDPRVSLHIGDGVAFLKNAPEGTYDAVIVDSSDPIGPAQELFEKPFFQLVARALRPGGVVCTQAESIWLHIHIIEDIVVNCRQVFKGSVNYAWTTVPTYPSGVIGFMLCSTEGPAVDFQHPVFNIEEDEHPMKSKGPLKFYNSEIHTASFCLPSFAKRVIESKAN

SEQ ID NO: 2337 - protein, 361 aa, Zea mays subsp. mays
  peptide (1)..(361): Ceres Seq. ID no. 13493646
  misc_feature (71)..(316): Pfam Name: Spermine/spermidine synthase Pfam Description: Spermine/spermidine synthase
  misc_feature (28)..(360): Homolog of NCBI NO: 23495354 NR Description: spermidine synthase [Malus x domestica]
  misc_feature (65)..(359): Homolog of NCBI NO: 15150055 NR Description: spermidine synthase [Solanum tuberosum]
  misc_feature (65)..(359): Homolog of NCBI NO: 6094336 NR Description: Spermidine synthase (Putrescine
  misc_feature (64)..(361): Homolog of NCBI NO: 12229958 NR Description: Spermidine synthase 1 (Putrescine
  misc_feature (56)..(359): Homolog of NCBI NO: 6094328 NR Description: Spermidine synthase 1 (Putrescine
  misc_feature (45)..(359): Homolog of NCBI NO: 12230013 NR Description: Spermidine synthase (Putrescine
  misc_feature (46)..(361): Homolog of NCBI NO: 6094335 NR Description: Spermidine synthase (Putrescine
  misc_feature (55)..(359): Homolog of NCBI NO: 6094327 NR Description: Spermidine synthase 1 (Putrescine
  misc_feature (55)..(360): Homolog of NCBI NO: 6094330 NR Description: Spermidine synthase 2 (Putrescine
  misc_feature (44)..(361): Homolog of NCBI NO: 12229998 NR Description: Spermidine synthase 1 (Putrescine
MAWRANPKPSQAEGKRGCERGAPSHYPAAASPHTPPSRAQGFGMEADAAAKRTRESGEDATAAGISAVIPGWFSEISPMWPGEAHSLKVEKVLFQGKSDYQNVMVFQSSTYGKVLVLDGVIQVTERDECAYQEMITHLPLCSIKDPKKVLVIGGGDGGVLREVSRHSSVEQIDICEIDKMVVDVSKQFFPHLAVGFEDPRVSLHIGDGVAFLKNAPEGTYDAVIVDSSDPIGPAQELFEKPFFQLVARALRPGGVVCTQAESIWLHIHIIEDIVVNCRQVFKGSVNYAWTTVPTYPSGVIGFMLCSTEGPAVDFQHPVFNIEEDEHPMKSKGPLKFYNSEIHTASFCLPSFAKRVIESKAN

SEQ ID NO: 2338 - protein, 318 aa, Zea mays subsp. mays
  peptide (1)..(318): Ceres Seq. ID no. 13493647
  misc_feature (28)..(273): Pfam Name: Spermine/spermidine synthase Pfam Description: Spermine/spermidine synthase
  misc_feature (2)..(316): Homolog of NCBI NO: 12230013 NR Description: Spermidine synthase (Putrescine
  misc_feature (3)..(318): Homolog of NCBI NO: 6094335 NR Description: Spermidine synthase (Putrescine
  misc_feature (12)..(316): Homolog of NCBI NO: 6094327 NR Description: Spermidine synthase 1 (Putrescine
  misc_feature (22)..(316): Homolog of NCBI NO: 15150055 NR Description: spermidine synthase [Solanum tuberosum]
  misc_feature (21)..(318): Homolog of NCBI NO: 12229958 NR Description: Spermidine synthase 1 (Putrescine
  misc_feature (13)..(316): Homolog of NCBI NO: 6094328 NR Description: Spermidine synthase 1 (Putrescine
  misc_feature (22)..(316): Homolog of NCBI NO: 6094336 NR Description: Spermidine synthase (Putrescine
  misc_feature (1)..(317): Homolog of NCBI NO: 23495354 NR Description: spermidine synthase [Malus x domestica]
  misc_feature (12)..(317): Homolog of NCBI NO: 6094330 NR Description: Spermidine synthase 2 (Putrescine
  misc_feature (1)..(318): Homolog of NCBI NO: 12229998 NR Description: Spermidine synthase 1 (Putrescine
MEADAAAKRTRESGEDATAAGISAVIPGWFSEISPMWPGEAHSLKVEKVLFQGKSDYQNVMVFQSSTYGKVLVLDGVIQVTERDECAYQEMITHLPLCSIKDPKKVLVIGGGDGGVLREVSRHSSVEQIDICEIDKMVVDVSKQFFPHLAVGFEDPRVSLHIGDGVAFLKNAPEGTYDAVIVDSSDPIGPAQELFEKPFFQLVARALRPGGVVCTQAESIWLHIHIIEDIVVNCRQVFKGSVNYAWTTVPTYPSGVIGFMLCSTEGPAVDFQHPVFNIEEDEHPMKSKGPLKFYNSEIHTASFCLPSFAKRVIESKAN

SEQ ID NO: 2339 - DNA, 1462 bp, Zea mays subsp. mays
  misc_feature (1)..(1462): Ceres Seq. ID no. 12405153
  misc_feature: MA Experiment ID: 108527 Result: Up-regulated in Transcription
  misc_feature: MA Experiment 108527 PARAMETER Experiment Name: Zm_5mM_NO_P Parameter: Age (day) Value: 8
  misc_feature: MA Experiment 108527 PARAMETER Experiment Name: Zm_5mM_NO_P Parameter: Organism Value: Zea mays
  misc_feature: MA Experiment 108527 PARAMETER Experiment Name: Zm_5mM_NO_P Parameter: Plant Line Value: 35A19
  misc_feature: MA Experiment 108527 PARAMETER Experiment Name: Zm_5mM_NO_P Parameter: Timepoint (hr) Value: 6
  misc_feature: MA Experiment 108527 PARAMETER Experiment Name: Zm_5mM_NO_P Parameter: Tissue Value: Aerial
  misc_feature: MA Experiment 108527 PARAMETER Experiment Name: Zm_5mM_NO_P Parameter: Treatment Value: 5mM NO vs. No Treatment
  misc_feature: MA Experiment ID: 108528 Result: Down-regulated in Transcription
  misc_feature: MA Experiment 108528 PARAMETER Experiment Name: Zm_Imbibed_Seeds_P Parameter: Age (day) Value: 5 vs. 2
  misc_feature: MA Experiment 108528 PARAMETER Experiment Name: Zm_Imbibed_Seeds_P Parameter: Organism Value: Zea mays
  misc_feature: MA Experiment 108528 PARAMETER Experiment Name: Zm_Imbibed_Seeds_P Parameter: Plant Line Value: 35A19
  misc_feature: MA Experiment 108528 PARAMETER Experiment Name: Zm_Imbibed_Seeds_P Parameter: Tissue Value: Aerial vs. Embryo
  misc_feature: MA Experiment ID: 108544 Result: Down-regulated in Transcription
  misc_feature: MA Experiment ID: 108559 Result: Up-regulated in Transcription
  misc_feature: MA Experiment 108559 PARAMETER Experiment Name: Zm_5mM_NO_P Parameter: Age (day) Value: 8
  misc_feature: MA Experiment 108559 PARAMETER Experiment Name: Zm_5mM_NO_P Parameter: Organism Value: Zea mays
  misc_feature: MA Experiment 108559 PARAMETER Experiment Name: Zm_5mM_NO_P Parameter: Plant Line Value: 35A19
  misc_feature: MA Experiment 108559 PARAMETER Experiment Name: Zm_5mM_NO_P Parameter: Timepoint (hr) Value: 12
  misc_feature: MA Experiment 108559 PARAMETER Experiment Name: Zm_5mM_NO_P Parameter: Tissue Value: Aerial
  misc_feature: MA Experiment 108559 PARAMETER Experiment Name: Zm_5mM_NO_P Parameter: Treatment Value: 5mM NO vs. No Treatment
  misc_feature: MA Experiment ID: 20000535 Result: Down-regulated in Transcription
  misc_feature: MA Experiment 20000535 PARAMETER Experiment Name: Zm_Hybrid_Seed_Dev_P Parameter: DAP Value: 30 vs. 12
  misc_feature: MA Experiment 20000535 PARAMETER Experiment Name: Zm_Hybrid_Seed_Dev_P Parameter: Organism Value: Zea mays
  misc_feature: MA Experiment 20000535 PARAMETER Experiment Name: Zm_Hybrid_Seed_Dev_P Parameter: Plant Line Value: 35A19
  misc_feature: MA Experiment 20000535 PARAMETER Experiment Name: Zm_Hybrid_Seed_Dev_P Parameter: Tissue Value: Embryo vs. Unfert Floret
aaccgagacgggacgagaccagcagccggccaccagcccatccgaaccctgctgctcccctctccgggttcgcgtgaggctgtgtgctgctgggaggagggggaagcggcggcggggcgccatggaggccgagaagaaggcgccggcggtgtcagacgtgggcgcgtgggcgatgaacgtcgtcagctccgtcagcctcatcatggccaacaagcagctcatgtcctcctccggctacgccttcgccttcgccaccacgctgaccgggttccacttcacggtcacggcgctcgtcgggtggatctccaacgccaccggctactccgtctccaagcacgtaccgctctgggagctcgtctggttctctctcgtcgccaacacctccatcaccgggatgaacctcagcctcatgctcaactccgtcggcttctaccagatctccaaactgagcatgattccggtggtctgcctcatggaatgggtgctgaacagcaagcactacaccaccaaggtcatctcggcagtggttgtcgtggccgccggtgtcgggatttgcacggtcacggatgtcgaggtcaatgccaaggggttcatctgcgcttgcgtggcagtgttctgcacgtcgcttcaacagattacaattggttcctttcaaaagaagtacaacattgggtcatttgagctgctgagcaaaactgcaccaatccaggcaatttcactcattatactgggcccctttgtggactactatctaaatggacggtcattgttgaactaccctttttcgggaggggcaactttcttcatcttgctttcctgctcccttgccgtcttctgcaacatgagccaatacctctgcatcggccggttctcagcgacctcgtttcaggtcctgggccacatgaagaccgtgtgcgtgctgatcctcggctggatcctgtttgactcggccctcaccgtgaagaacatcctcgggatgctgctcgccgtgatgggcatggtggtctacagctgggccgtggaagcggagaagaaggcggcagccccggtcccccggatcaagagcgaaatgctcgacggcgaggacgtacctctcaaggccagggtgagcggcgtgcccgcagtcgacctcgaggacggcgagatgaagagctagctgctgcggctgccgcagctgccgctgattcgttcattcttcttgttcttttgtaactgtgcgcgcgcgatcgctcgatccaaagttgcttgtccgtcagccctcagctatcgacactacactgttatttttggccccttgttggggagagtccagttcctacgtgacgacgaccacccccagttcggcgtagatgaaacacaaactagcagaatgcagattttaggatttttttttcaggcggcggggtggagccattcattgtcatggtgacaggactcataatagaaatacaggtaacatgtc

SEQ ID NO: 2340 - protein, 384 aa, Zea mays subsp. mays
  peptide (1)..(384): Ceres Seq. ID no. 12405154
  misc_feature (42)..(336): Homolog of NCBI NO: 15234794 NR Description: hypothetical protein; protein id: At4g09810.1
  misc_feature (36)..(358): Homolog of NCBI NO: 18420440 NR Description: putative protein
  misc_feature (40)..(336): Homolog of NCBI NO: 30313364 NR Description: putative transmembrane protein [Oryza sativa]
  misc_feature (74)..(382): Homolog of NCBI NO: 26450366 NR Description: unknown protein [Arabidopsis thaliana]
  misc_feature (40)..(383): Homolog of NCBI NO: 15238957 NR Description: putative protein; protein id: At5g42420.1
  misc_feature (42)..(382): Homolog of NCBI NO: 18411172 NR Description: expressed protein
  misc_feature (42)..(382): Homolog of NCBI NO: 21536703 NR Description: unknown [Arabidopsis thaliana]
  misc_feature (42)..(382): Homolog of NCBI NO: 18394949 NR Description: expressed protein
  misc_feature (41)..(85): Homolog of NCBI NO: 33146838 NR Description: transporter-related-like [Oryza sativa (japonica
  misc_feature (79)..(384): Homolog of NCBI NO: 33146838 NR Description: transporter-related-like [Oryza sativa (japonica
TETGRDQQPATSPSEPCCSPLRVRVRLCAAGRRGKRRRGAMEAEKKAPAVSDVGAWAMNVVSSVSLIMANKQLMSSSGYAFAFATTLTGFHFTVTALVGWISNATGYSVSKHVPLWELVWFSLVANTSITGMNLSLMLNSVGFYQISKLSMIPVVCLMEWVLNSKHYTTKVISAVVVVAAGVGICTVTDVEVNAKGFICACVAVFCTSLQQITIGSFQKKYNIGSFELLSKTAPIQAISLIILGPFVDYYLNGRSLLNYPFSGGATFFILLSCSLAVFCNMSQYLCIGRFSATSFQVLGHMKTVCVLILGWILFDSALTVKNILGMLLAVMGMVVYSWAVEAEKKAAAPVPRIKSEMLDGEDVPLKARVSGVPAVDLEDGEMKS

SEQ ID NO: 2341 - protein, 344 aa, Zea mays subsp. mays
  peptide (1)..(344): Ceres Seq. ID no. 12405155
  misc_feature (2)..(296): Homolog of NCBI NO: 15234794 NR Description: hypothetical protein; protein id: At4g09810.1
  misc_feature (1)..(318): Homolog of NCBI NO: 18420440 NR Description: putative protein
  misc_feature (1)..(296): Homolog of NCBI NO: 30313364 NR Description: putative transmembrane protein [Oryza sativa]
  misc_feature (34)..(342): Homolog of NCBI NO: 26450366 NR Description: unknown protein [Arabidopsis thaliana]
  misc_feature (1)..(343): Homolog of NCBI NO: 15238957 NR Description: putative protein; protein id: At5g42420.1
  misc_feature (2)..(342): Homolog of NCBI NO: 18411172 NR Description: expressed protein
  misc_feature (2)..(342): Homolog of NCBI NO: 21536703 NR Description: unknown [Arabidopsis thaliana]
  misc_feature (2)..(342): Homolog of NCBI NO: 18394949 NR Description: expressed protein
  misc_feature (1)..(45): Homolog of NCBI NO: 33146838 NR Description: transporter-related-like [Oryza sativa (japonica
  misc_feature (39)..(344): Homolog of NCBI NO: 33146838 NR Description: transporter-related-like [Oryza sativa (japonica
MEAEKKAPAVSDVGAWAMNVVSSVSLIMANKQLMSSSGYAFAFATTLTGFHFTVTALVGWISNATGYSVSKHVPLWELVWFSLVANTSITGMNLSLMLNSVGFYQISKLSMIPVVCLMEWVLNSKHYTTKVISAVVVVAAGVGICTVTDVEVNAKGFICACVAVFCTSLQQITIGSFQKKYNIGSFELLSKTAPIQAISLIILGPFVDYYLNGRSLLNYPFSGGATFFILLSCSLAVFCNMSQYLCIGRFSATSFQVLGHMKTVCVLILGWILFDSALTVKNILGMLLAVMGMVVYSWAVEAEKKAAAPVPRIKSEMLDGEDVPLKARVSGVPAVDLEDGEMKS

SEQ ID NO: 2342 - protein, 327 aa, Zea mays subsp. mays
  peptide (1)..(327): Ceres Seq. ID no. 12405156
  misc_feature (1)..(279): Homolog of NCBI NO: 15234794 NR Description: hypothetical protein; protein id: At4g09810.1
  misc_feature (1)..(301): Homolog of NCBI NO: 18420440 NR Description: putative protein
  misc_feature (1)..(279): Homolog of NCBI NO: 30313364 NR Description: putative transmembrane protein [Oryza sativa]
  misc_feature (17)..(325): Homolog of NCBI NO: 26450366 NR Description: unknown protein [Arabidopsis thaliana]
  misc_feature (1)..(326): Homolog of NCBI NO: 15238957 NR Description: putative protein; protein id: At5g42420.1
  misc_feature (1)..(325): Homolog of NCBI NO: 18411172 NR Description: expressed protein
  misc_feature (1)..(325): Homolog of NCBI NO: 21536703 NR Description: unknown [Arabidopsis thaliana]
  misc_feature (1)..(325): Homolog of NCBI NO: 18394949 NR Description: expressed protein
  misc_feature (1)..(28): Homolog of NCBI NO: 33146838 NR Description: transporter-related-like [Oryza sativa (japonica
  misc_feature (22)..(327): Homolog of NCBI NO: 33146838 NR Description: transporter-related-like [Oryza sativa (japonica
MNVVSSVSLIMANKQLMSSSGYAFAFATTLTGFHFTVTALVGWISNATGYSVSKHVPLWELVWFSLVANTSITGMNLSLMLNSVGFYQISKLSMIPVVCLMEWVLNSKHYTTKVISAVVVVAAGVGICTVTDVEVNAKGFICACVAVFCTSLQQITIGSFQKKYNIGSFELLSKTAPIQAISLIILGPFVDYYLNGRSLLNYPFSGGATFFILLSCSLAVFCNMSQYLCIGRFSATSFQVLGHMKTVCVLILGWILFDSALTVKNILGMLLAVMGMVVYSWAVEAEKKAAAPVPRIKSEMLDGEDVPLKARVSGVPAVDLEDGEMKS

SEQ ID NO: 2343 - DNA, 1444 bp, Zea mays subsp. mays
  misc_feature (1)..(1444): Ceres Seq. ID no. 12342601
  misc_feature: MA Experiment ID: 108522 Result: Up-regulated in Transcription
  misc_feature: MA Experiment 108522 PARAMETER Experiment Name: Zm_42deg_Heat_P Parameter: Age (day) Value: 8
  misc_feature: MA Experiment 108522 PARAMETER Experiment Name: Zm_42deg_Heat_P Parameter: Organism Value: Zea mays
  misc_feature: MA Experiment 108522 PARAMETER Experiment Name: Zm_42deg_Heat_P Parameter: Plant Line Value: 35A19
  misc_feature: MA Experiment 108522 PARAMETER Experiment Name: Zm_42deg_Heat_P Parameter: Temperature (deg C) Value: 42 vs. 22
  misc_feature: MA Experiment 108522 PARAMETER Experiment Name: Zm_42deg_Heat_P Parameter: Timepoint (hr) Value: 1
  misc_feature: MA Experiment 108522 PARAMETER Experiment Name: Zm_42deg_Heat_P Parameter: Tissue Value: Aerial
  misc_feature: MA Experiment ID: 108523 Result: Up-regulated in Transcription
  misc_feature: MA Experiment 108523 PARAMETER Experiment Name: Zm_42deg_Heat_P Parameter: Age (day) Value: 8
  misc_feature: MA Experiment 108523 PARAMETER Experiment Name: Zm_42deg_Heat_P Parameter: Organism Value: Zea mays
  misc_feature: MA Experiment 108523 PARAMETER Experiment Name: Zm_42deg_Heat_P Parameter: Plant Line Value: 35A19
  misc_feature: MA Experiment 108523 PARAMETER Experiment Name: Zm_42deg_Heat_P Parameter: Temperature (deg C) Value: 42 vs. 22
  misc_feature: MA Experiment 108523 PARAMETER Experiment Name: Zm_42deg_Heat_P Parameter: Timepoint (hr) Value: 6
  misc_feature: MA Experiment 108523 PARAMETER Experiment Name: Zm_42deg_Heat_P Parameter: Tissue Value: Aerial
  misc_feature: MA Experiment ID: 108556 Result: Up-regulated in Transcription
  misc_feature: MA Experiment 108556 PARAMETER Experiment Name: Zm_Drought_P Parameter: Age (day) Value: 9
  misc_feature: MA Experiment 108556 PARAMETER Experiment Name: Zm_Drought_P Parameter: Organism Value: Zea mays
  misc_feature: MA Experiment 108556 PARAMETER Experiment Name: Zm_Drought_P Parameter: Plant Line Value: 35A19
  misc_feature: MA Experiment 108556 PARAMETER Experiment Name: Zm_Drought_P Parameter: Timepoint (hr) Value: 24
  misc_feature: MA Experiment 108556 PARAMETER Experiment Name: Zm_Drought_P Parameter: Tissue Value: Aerial
  misc_feature: MA Experiment 108556 PARAMETER Experiment Name: Zm_Drought_P Parameter: Treatment Value: Drought vs. No Drought
  misc_feature: MA Experiment ID: 20000478 Result: Up-regulated in Transcription
  misc_feature: MA Experiment 20000478 PARAMETER Experiment Name: Zm_5mM_SA_P Parameter: Age (day) Value: 11
  misc_feature: MA Experiment 20000478 PARAMETER Experiment Name: Zm_5mM_SA_P Parameter: Organism Value: Zea mays
  misc_feature: MA Experiment 20000478 PARAMETER Experiment Name: Zm_5mM_SA_P Parameter: Plant Line Value: 35A19
  misc_feature: MA Experiment 20000478 PARAMETER Experiment Name: Zm_5mM_SA_P Parameter: Timepoint (hr) Value: 72
  misc_feature: MA Experiment 20000478 PARAMETER Experiment Name: Zm_5mM_SA_P Parameter: Tissue Value: Aerial
  misc_feature: MA Experiment 20000478 PARAMETER Experiment Name: Zm_5mM_SA_P Parameter: Treatment Value: 5mM SA vs. No Treatment
  misc_feature: MA Experiment ID: 20000480 Result: Up-regulated in Transcription
  misc_feature: MA Experiment 20000480 PARAMETER Experiment Name: Zm_Drought_P Parameter: Age (day) Value: 11
  misc_feature: MA Experiment 20000480 PARAMETER Experiment Name: Zm_Drought_P Parameter: Organism Value: Zea mays
  misc_feature: MA Experiment 20000480 PARAMETER Experiment Name: Zm_Drought_P Parameter: Plant Line Value: 35A19
  misc_feature: MA Experiment 20000480 PARAMETER Experiment Name: Zm_Drought_P Parameter: Timepoint (hr) Value: 72
  misc_feature: MA Experiment 20000480 PARAMETER Experiment Name: Zm_Drought_P Parameter: Tissue Value: Aerial
  misc_feature: MA Experiment 20000480 PARAMETER Experiment Name: Zm_Drought_P Parameter: Treatment Value: Drought vs. No Drought
  misc_feature: MA Experiment ID: 20000488 Result: Down-regulated in Transcription
  misc_feature: MA Experiment 20000488 PARAMETER Experiment Name: Zm_50mM_NH4NO3_L_to_H_P Parameter: Organism Value: Zea mays
  misc_feature: MA Experiment 20000488 PARAMETER Experiment Name: Zm_50mM_NH4NO3_L_to_H_P Parameter: Timepoint (hr) Value: 8
  misc_feature: MA Experiment 20000488 PARAMETER Experiment Name: Zm_50mM_NH4NO3_L_to_H_P Parameter: Tissue Value: Leaves
  misc_feature: MA Experiment 20000488 PARAMETER Experiment Name: Zm_50mM_NH4NO3_L_to_H_P Parameter: Treatment Value: 50mM NH4NO3 vs. 100mM Mannitol
  misc_feature: MA Experiment ID: 20000534 Result: Down-regulated in Transcription
  misc_feature: MA Experiment 20000534 PARAMETER Experiment Name: Zm_Hybrid_Pollen_P Parameter: Age (day) Value: 8
  misc_feature: MA Experiment 20000534 PARAMETER Experiment Name: Zm_Hybrid_Pollen_P Parameter: Organism Value: Zea mays
  misc_feature: MA Experiment 20000534 PARAMETER Experiment Name: Zm_Hybrid_Pollen_P Parameter: Plant Line Value: 35A19
  misc_feature: MA Experiment 20000534 PARAMETER Experiment Name: Zm_Hybrid_Pollen_P Parameter: Tissue Value: Pollen vs. Aerial
ctactcttttctcctggcaacgatttccaaacgcacgcaaacgctgtcacagtttgtcacggcagcggcaacggcaagtcggcaacgttgccgcggcacgtctcctccctctcttttcctgttcgggtagtcgggtgtaccgccattcgtgatcgaaccagactcgagagggagaggaggagggagtccgaggggagagacccaattaactgcagggattggtcgggttcggctccgccttcggagagtcccaagagatgggtggcgcggcggcgggtaccaagtggatccaccacatccagcgcctcagcgcggccaaggtgtcggcggaggcggtggagcggggccagagccgcgtcatcgacgcctccctcaccctaattcgcgagcgcgcaaagctcaaggcagagttgctgcgtgctctgggtggcgtgaaagcttcagcgtcgctcttaggggtccctcttggtcacaactcatcctttttacaaggccctgcatttgctcctccacgcatacgggaggccatttggtgtggaagcacaaactctagcacagaggaaggcaaagaattgaatgatcctcgggtgctaactgatgttggagatgtccccattcacgagatccgtgactgtggtgtcgaagatgacagattaatgcatgtaattagtgagtctgtcaaaacagtgatggaggaggagcctcttcgaccgttggtgttatgaggcgatcattcaatatcttatccagtggttagagctgtgtctgaaaagcttggaggacctgttgacatacttcatcttgatgcacatccagatatctatgattgttttgaagggaacacttattcgcatgcctcgtcatttgccagaataatggaaggtggttatgccaggagactgctacaggttggattgagatcaatcaccaaagaagggcgtgaacaagggaagagatttggtgtggaacagtatgagatgcgaaccttctcaaaggaccgagagaagcttgagaatctgaaacttggggaaggcgtaaagggtgtgtatgtctcagttgatgtggactgccttgacccagcgtttgctcctggggtctctcacatcgaacctggaggcctctccttccgcaatgtcctcaacatccttcagaatttgcagggtgacgttgtcgccgctgatgtggtggagttcaacccacagcgtgacacggtggatgggatgacagccatggtcgccgcgaagctggtccgggagctcactgctaagatctccaagtgagacggtcaggatcgcaccactcttcttgaagcaaagcgaaagggtgggttttgatgtcccggtggttattggtcatggtttctatgtattgagcaccaaattgttcgacatgtgacaggtttatatgttaattaggttgcaataataccataatggtttatttc

SEQ ID NO: 2344 - protein, 155 aa, Zea mays subsp. mays
  peptide (1)..(155): Ceres Seq. ID no. 12342602
  misc_feature (60)..(155): Pfam Name: Arginase family Pfam Description: Arginase family
  misc_feature (7)..(155): Homolog of NCBI NO: 21592908 NR Description: putative arginase [Arabidopsis thaliana]
  misc_feature (7)..(155): Homolog of NCBI NO: 15236635 NR Description: putative arginase
  misc_feature (7)..(155): Homolog of NCBI NO: 12802155 NR Description: arginase [Pinus taeda]
  misc_feature (7)..(155): Homolog of NCBI NO: 13182957 NR Description: arginase [Brassica napus]
  misc_feature (7)..(155): Homolog of NCBI NO: 15236640 NR Description: arginase
  misc_feature (1)..(155): Homolog of NCBI NO: 32488415 NR Description: OSJNBb0085F13.5 [Oryza sativa (japonica
MGGAAAGTKWIHHIQRLSAAKVSAEAVERGQSRVIDASLTLIRERAKLKAELLRALGGVKASASLLGVPLGHNSSFLQGPAFAPPRIREAIWCGSTNSSTEEGKELNDPRVLTDVGDVPIHEIRDCGVEDDRLMHVISESVKTVMEEEPLRPLVL

SEQ ID NO: 2345 - protein, 134 aa, Zea mays subsp. mays
  peptide (1)..(134): Ceres Seq. ID no. 12342603
  misc_feature (1)..(133): Pfam Name: Arginase family Pfam Description: Arginase family
  misc_feature (1)..(134): Homolog of NCBI NO: 21592908 NR Description: putative arginase [Arabidopsis thaliana]
  misc_feature (1)..(134): Homolog of NCBI NO: 15236635 NR Description: putative arginase
  misc_feature (1)..(134): Homolog of NCBI NO: 12802155 NR Description: arginase [Pinus taeda]
  misc_feature (1)..(126): Homolog of NCBI NO: 13182957 NR Description: arginase [Brassica napus]
  misc_feature (1)..(134): Homolog of NCBI NO: 15236640 NR Description: arginase
  misc_feature (1)..(134): Homolog of NCBI NO: 32488415 NR Description: OSJNBb0085F13.5 [Oryza sativa (japonica
MEGGYARRLLQVGLRSITKEGREQGKRFGVEQYEMRTFSKDREKLENLKLGEGVKGVYVSVDVDCLDPAFAPGVSHIEPGGLSFRNVLNILQNLQGDVVAADVVEFNPQRDTVDGMTAMVAAKLVRELTAKISK

SEQ ID NO: 2346 - protein, 126 aa, Zea mays subsp. mays
  peptide (1)..(126): Ceres Seq. ID no. 12342604
LLFSPGNDFQTHANAVTVCHGSGNGKSATLPRHVSSLSFPVRVVGCTAIRDRTRLERERRRESEGRDPINCRDWSGSAPPSESPKRWVARRRVPSGSTTSSASARPRCRRRRWSGARAASSTPPSP

SEQ ID NO: 2347 - DNA, 811 bp, Zea mays subsp. mays
  misc_feature (1)..(811): Ceres Seq. ID no. 12414277
  misc_feature: MA Experiment ID: 108523 Result: Down-regulated in Transcription
  misc_feature: MA Experiment 108523 PARAMETER Experiment Name: Zm_42deg_Heat_P Parameter: Age (day) Value: 8
  misc_feature: MA Experiment 108523 PARAMETER Experiment Name: Zm_42deg_Heat_P Parameter: Organism Value: Zea mays
  misc_feature: MA Experiment 108523 PARAMETER Experiment Name: Zm_42deg_Heat_P Parameter: Plant Line Value: 35A19
  misc_feature: MA Experiment 108523 PARAMETER Experiment Name: Zm_42deg_Heat_P Parameter: Temperature (deg C) Value: 42 vs. 22
  misc_feature: MA Experiment 108523 PARAMETER Experiment Name: Zm_42deg_Heat_P Parameter: Timepoint (hr) Value: 6
  misc_feature: MA Experiment 108523 PARAMETER Experiment Name: Zm_42deg_Heat_P Parameter: Tissue Value: Aerial
  misc_feature: MA Experiment ID: 108527 Result: Down-regulated in Transcription
  misc_feature: MA Experiment 108527 PARAMETER Experiment Name: Zm_5mM_NO_P Parameter: Age (day) Value: 8
  misc_feature: MA Experiment 108527 PARAMETER Experiment Name: Zm_5mM_NO_P Parameter: Organism Value: Zea mays
  misc_feature: MA Experiment 108527 PARAMETER Experiment Name: Zm_5mM_NO_P Parameter: Plant Line Value: 35A19
  misc_feature: MA Experiment 108527 PARAMETER Experiment Name: Zm_5mM_NO_P Parameter: Timepoint (hr) Value: 6
  misc_feature: MA Experiment 108527 PARAMETER Experiment Name: Zm_5mM_NO_P Parameter: Tissue Value: Aerial
  misc_feature: MA Experiment 108527 PARAMETER Experiment Name: Zm_5mM_NO_P Parameter: Treatment Value: 5mM NO vs. No Treatment
  misc_feature: MA Experiment ID: 108528 Result: Up-regulated in Transcription
  misc_feature: MA Experiment 108528 PARAMETER Experiment Name: Zm_Imbibed_Seeds_P Parameter: Age (day) Value: 5 vs. 2
  misc_feature: MA Experiment 108528 PARAMETER Experiment Name: Zm_Imbibed_Seeds_P Parameter: Organism Value: Zea mays
  misc_feature: MA Experiment 108528 PARAMETER Experiment Name: Zm_Imbibed_Seeds_P Parameter: Plant Line Value: 35A19
  misc_feature: MA Experiment 108528 PARAMETER Experiment Name: Zm_Imbibed_Seeds_P Parameter: Tissue Value: Aerial vs. Embryo
  misc_feature: MA Experiment ID: 108529 Result: Down-regulated in Transcription
  misc_feature: MA Experiment 108529 PARAMETER Experiment Name: Zm_Imbibed_Seeds_P Parameter: Age (day) Value: 5 vs. 2
  misc_feature: MA Experiment 108529 PARAMETER Experiment Name: Zm_Imbibed_Seeds_P Parameter: Organism Value: Zea mays
  misc_feature: MA Experiment 108529 PARAMETER Experiment Name: Zm_Imbibed_Seeds_P Parameter: Plant Line Value: 35A19
  misc_feature: MA Experiment 108529 PARAMETER Experiment Name: Zm_Imbibed_Seeds_P Parameter: Tissue Value: Roots vs. Embryo
  misc_feature: MA Experiment ID: 108530 Result: Up-regulated in Transcription
  misc_feature: MA Experiment 108530 PARAMETER Experiment Name: Zm_Imbibed_Seeds_P Parameter: Age (day) Value: 6 vs. 2
  misc_feature: MA Experiment 108530 PARAMETER Experiment Name: Zm_Imbibed_Seeds_P Parameter: Organism Value: Zea mays
  misc_feature: MA Experiment 108530 PARAMETER Experiment Name: Zm_Imbibed_Seeds_P Parameter: Plant Line Value: 35A19
  misc_feature: MA Experiment 108530 PARAMETER Experiment Name: Zm_Imbibed_Seeds_P Parameter: Tissue Value: Aerial vs. Embryo
  misc_feature: MA Experiment ID: 108536 Result: Down-regulated in Transcription
  misc_feature: MA Experiment 108536 PARAMETER Experiment Name: Zm_Meristem_P Parameter: Age (day) Value: 8
  misc_feature: MA Experiment 108536 PARAMETER Experiment Name: Zm_Meristem_P Parameter: Organism Value: Zea mays
  misc_feature: MA Experiment 108536 PARAMETER Experiment Name: Zm_Meristem_P Parameter: Plant Line Value: 35A19
  misc_feature: MA Experiment 108536 PARAMETER Experiment Name: Zm_Meristem_P Parameter: Tissue Value: Shoot Meristem vs. Above Shoot Meristem
  misc_feature: MA Experiment ID: 108545 Result: Up-regulated in Transcription
  misc_feature: MA Experiment 108545 PARAMETER Experiment Name: Zm_Imbibed_Seeds_P Parameter: Age (day) Value: 3 vs. 2
  misc_feature: MA Experiment 108545 PARAMETER Experiment Name: Zm_Imbibed_Seeds_P Parameter: Organism Value: Zea mays
  misc_feature: MA Experiment 108545 PARAMETER Experiment Name: Zm_Imbibed_Seeds_P Parameter: Plant Line Value: 35A19
  misc_feature: MA Experiment 108545 PARAMETER Experiment Name: Zm_Imbibed_Seeds_P Parameter: Tissue Value: Aerial vs. Embryo
  misc_feature: MA Experiment ID: 108547 Result: Up-regulated in Transcription
  misc_feature: MA Experiment 108547 PARAMETER Experiment Name: Zm_Imbibed_Seeds_P Parameter: Age (day) Value: 4 vs. 2
  misc_feature: MA Experiment 108547 PARAMETER Experiment Name: Zm_Imbibed_Seeds_P Parameter: Organism Value: Zea mays
  misc_feature: MA Experiment 108547 PARAMETER Experiment Name: Zm_Imbibed_Seeds_P Parameter: Plant Line Value: 35A19
  misc_feature: MA Experiment 108547 PARAMETER Experiment Name: Zm_Imbibed_Seeds_P Parameter: Tissue Value: Aerial vs. Embryo
  misc_feature: MA Experiment ID: 108559 Result: Down-regulated in Transcription
  misc_feature: MA Experiment 108559 PARAMETER Experiment Name: Zm_5mM_NO_P Parameter: Age (day) Value: 8
  misc_feature: MA Experiment 108559 PARAMETER Experiment Name: Zm_5mM_NO_P Parameter: Organism Value: Zea mays
  misc_feature: MA Experiment 108559 PARAMETER Experiment Name: Zm_5mM_NO_P Parameter: Plant Line Value: 35A19
  misc_feature: MA Experiment 108559 PARAMETER Experiment Name: Zm_5mM_NO_P Parameter: Timepoint (hr) Value: 12
  misc_feature: MA Experiment 108559 PARAMETER Experiment Name: Zm_5mM_NO_P Parameter: Tissue Value: Aerial
  misc_feature: MA Experiment 108559 PARAMETER Experiment Name: Zm_5mM_NO_P Parameter: Treatment Value: 5mM NO vs. No Treatment
  misc_feature: MA Experiment ID: 108687 Result: Down-regulated in Transcription
  misc_feature: MA Experiment 108687 PARAMETER Experiment Name: Zm_Embryos-Flowers__P Parameter: Tissue Value: Embryo vs. Aerial+
  misc_feature: MA Experiment ID: 108688 Result: Down-regulated in Transcription
  misc_feature: MA Experiment 108688 PARAMETER Experiment Name: Zm_Embryos-Flowers__P Parameter: Tissue Value: Immature Flowers vs. Aerial+
  misc_feature: MA Experiment ID: 20000477 Result: Down-regulated in Transcription
  misc_feature: MA Experiment 20000477 PARAMETER Experiment Name: Zm_5mM_SA_P Parameter: Age (day) Value: 10
  misc_feature: MA Experiment 20000477 PARAMETER Experiment Name: Zm_5mM_SA_P Parameter: Organism Value: Zea mays
  misc_feature: MA Experiment 20000477 PARAMETER Experiment Name: Zm_5mM_SA_P Parameter: Plant Line Value: 35A19
  misc_feature: MA Experiment 20000477 PARAMETER Experiment Name: Zm_5mM_SA_P Parameter: Timepoint (hr) Value: 48
  misc_feature: MA Experiment 20000477 PARAMETER Experiment Name: Zm_5mM_SA_P Parameter: Tissue Value: Aerial
  misc_feature: MA Experiment 20000477 PARAMETER Experiment Name: Zm_5mM_SA_P Parameter: Treatment Value: 5mM SA vs. No Treatment
  misc_feature: MA Experiment ID: 20000478 Result: Down-regulated in Transcription
  misc_feature: MA Experiment 20000478 PARAMETER Experiment Name: Zm_5mM_SA_P Parameter: Age (day) Value: 11
  misc_feature: MA Experiment 20000478 PARAMETER Experiment Name: Zm_5mM_SA_P Parameter: Organism Value: Zea mays
  misc_feature: MA Experiment 20000478 PARAMETER Experiment Name: Zm_5mM_SA_P Parameter: Plant Line Value: 35A19
  misc_feature: MA Experiment 20000478 PARAMETER Experiment Name: Zm_5mM_SA_P Parameter: Timepoint (hr) Value: 72
  misc_feature: MA Experiment 20000478 PARAMETER Experiment Name: Zm_5mM_SA_P Parameter: Tissue Value: Aerial
  misc_feature: MA Experiment 20000478 PARAMETER Experiment Name: Zm_5mM_SA_P Parameter: Treatment Value: 5mM SA vs. No Treatment
  misc_feature: MA Experiment ID: 20000535 Result: Down-regulated in Transcription
  misc_feature: MA Experiment 20000535 PARAMETER Experiment Name: Zm_Hybrid_Seed_Dev_P Parameter: DAP Value: 30 vs. 12
  misc_feature: MA Experiment 20000535 PARAMETER Experiment Name: Zm_Hybrid_Seed_Dev_P Parameter: Organism Value: Zea mays
  misc_feature: MA Experiment 20000535 PARAMETER Experiment Name: Zm_Hybrid_Seed_Dev_P Parameter: Plant Line Value: 35A19
  misc_feature: MA Experiment 20000535 PARAMETER Experiment Name: Zm_Hybrid_Seed_Dev_P Parameter: Tissue Value: Embryo vs. Unfert Floret
acaggcaagcatctggccacatgtgcactcacacgactcagggcgagaggacagcagggcacaataaccgttccactttggtccataggagcgcatagcacagcacaaggagaggccgagaagcgctttagccgtagccgtagcgataagagtgagctagctggtgcacaccggcatggcggccacggcgtactccgtggcgctcctcggcggcgcgcgcctccccgccgctccgcgctccgccctcctccctcggcgcagcgtctgccagcttcgcttccaagatgcaccgaggctctccctgctccgtgcgaaggccgcttccgaggacacatcggcctccggcgacgagttgatcgaggacctcaaagcgaagtgggacgccgttgaggacaagcccaccgtcctcttgtacggcggcggcgccgtcgtcgccctatggctgacgtccgtggtcgtgggcgccatcaacgccgtgccgctgctccccaagatcctggagctcgttgggctcggctacaccggctggttcgtgtaccgctaccttctctttaaggaaagcaggaaagagttggccgccgacattgagaccttgaagaaaaaaatagctggaacagaataaacgctcatggaaagttttagagcgtcctttcttctttggaaagagatctattcgatcggagaaccaatatgcaactacttgagtactattattgcccatgtattgtgtgctgtatatcttctgtatacaaaggaaggttcgtttgttatgtacgtagtagcattgtagtttaaatgtatcgtattacct

SEQ ID NO: 2348 - protein, 148 aa, Zea mays subsp. mays
  peptide (1)..(148): Ceres Seq. ID no. 12414278
  misc_feature (44)..(145): Homolog of NCBI NO: 18403896 NR Description: expressed protein
  misc_feature (2)..(147): Homolog of NCBI NO: 21555057 NR Description: unknown [Arabidopsis thaliana]
  misc_feature (2)..(147): Homolog of NCBI NO: 18407178 NR Description: expressed protein
  misc_feature (26)..(146): Homolog of NCBI NO: 37536446 NR Description: hypothetical protein [Oryza sativa (japonica
  misc_feature (15)..(147): Homolog of NCBI NO: 34393236 NR Description: unknown protein [Oryza sativa (japonica
  misc_feature (50)..(148): Homolog of NCBI NO: 18420175 NR Description: expressed protein
  misc_feature (50)..(148): Homolog of NCBI NO: 7485852 NR Description: hypothetical protein F20D10.220 - Arabidopsis
  misc_feature (1)..(148): Homolog of NCBI NO: 38175474 NR Description: unknown protein [Oryza sativa (japonica
  misc_feature (40)..(148): Homolog of NCBI NO: 687677 NR Description: unknown
  misc_feature (40)..(148): Homolog of NCBI NO: 18411555 NR Description: expressed protein
MAATAYSVALLGGARLPAAPRSALLPRRSVCQLRFQDAPRLSLLRAKAASEDTSASGDELIEDLKAKWDAVEDKPTVLLYGGGAVVALWLTSVVVGAINAVPLLPKILELVGLGYTGWFVYRYLLFKESRKELAADIETLKKKIAGTE

SEQ ID NO: 2349 - protein, 129 aa, Zea mays subsp. mays
  peptide (1)..(129): Ceres Seq. ID no. 12414279
TGKHLATCALTRLRARGQQGTITVPLWSIGAHSTAQGEAEKRFSRSRSDKSELAGAHRHGGHGVLRGAPRRRAPPRRSALRPPPSAQRLPASLPRCTEALPAPCEGRFRGHIGLRRRVDRGPQSEVGRR

SEQ ID NO: 2350 - DNA, 1452 bp, Zea mays subsp. mays
  misc_feature (1)..(1452): Ceres Seq. ID no. 12349889
  misc_feature: MA Experiment ID: 108522 Result: Down-regulated in Transcription
  misc_feature: MA Experiment 108522 PARAMETER Experiment Name: Zm_42deg_Heat_P Parameter: Age (day) Value: 8
  misc_feature: MA Experiment 108522 PARAMETER Experiment Name: Zm_42deg_Heat_P Parameter: Organism Value: Zea mays
  misc_feature: MA Experiment 108522 PARAMETER Experiment Name: Zm_42deg_Heat_P Parameter: Plant Line Value: 35A19
  misc_feature: MA Experiment 108522 PARAMETER Experiment Name: Zm_42deg_Heat_P Parameter: Temperature (deg C) Value: 42 vs. 22
  misc_feature: MA Experiment 108522 PARAMETER Experiment Name: Zm_42deg_Heat_P Parameter: Timepoint (hr) Value: 1
  misc_feature: MA Experiment 108522 PARAMETER Experiment Name: Zm_42deg_Heat_P Parameter: Tissue Value: Aerial
  misc_feature: MA Experiment ID: 108527 Result: Down-regulated in Transcription
  misc_feature: MA Experiment 108527 PARAMETER Experiment Name: Zm_5mM_NO_P Parameter: Age (day) Value: 8
  misc_feature: MA Experiment 108527 PARAMETER Experiment Name: Zm_5mM_NO_P Parameter: Organism Value: Zea mays
  misc_feature: MA Experiment 108527 PARAMETER Experiment Name: Zm_5mM_NO_P Parameter: Plant Line Value: 35A19
  misc_feature: MA Experiment 108527 PARAMETER Experiment Name: Zm_5mM_NO_P Parameter: Timepoint (hr) Value: 6
  misc_feature: MA Experiment 108527 PARAMETER Experiment Name: Zm_5mM_NO_P Parameter: Tissue Value: Aerial
  misc_feature: MA Experiment 108527 PARAMETER Experiment Name: Zm_5mM_NO_P Parameter: Treatment Value: 5mM NO vs. No Treatment
  misc_feature: MA Experiment ID: 108528 Result: Up-regulated in Transcription
  misc_feature: MA Experiment 108528 PARAMETER Experiment Name: Zm_Imbibed_Seeds_P Parameter: Age (day) Value: 5 vs. 2
  misc_feature: MA Experiment 108528 PARAMETER Experiment Name: Zm_Imbibed_Seeds_P Parameter: Organism Value: Zea mays
  misc_feature: MA Experiment 108528 PARAMETER Experiment Name: Zm_Imbibed_Seeds_P Parameter: Plant Line Value: 35A19
  misc_feature: MA Experiment 108528 PARAMETER Experiment Name: Zm_Imbibed_Seeds_P Parameter: Tissue Value: Aerial vs. Embryo
  misc_feature: MA Experiment ID: 108547 Result: Up-regulated in Transcription
  misc_feature: MA Experiment 108547 PARAMETER Experiment Name: Zm_Imbibed_Seeds_P Parameter: Age (day) Value: 4 vs. 2
  misc_feature: MA Experiment 108547 PARAMETER Experiment Name: Zm_Imbibed_Seeds_P Parameter: Organism Value: Zea mays
  misc_feature: MA Experiment 108547 PARAMETER Experiment Name: Zm_Imbibed_Seeds_P Parameter: Plant Line Value: 35A19
  misc_feature: MA Experiment 108547 PARAMETER Experiment Name: Zm_Imbibed_Seeds_P Parameter: Tissue Value: Aerial vs. Embryo
atgagtggagactggagaaagagccctactaccctagctaagcgcgcacagcggcggccggcgagacacgtgcgagcggcggcgtgaggaaaggcgggcggggtgagagatacctaaccactaagaggctgcggcagcgccgcagcataaccggcaccaggtcaaaaacgacgactgggcaggcaccgtatgcatatcctgaatttcagcaccgcatacactttctacagggcccttgccacaccagacaagcacagacaaacacgcaagcggcaggccatgtcatcaccggcagcaaggagcatcacctgctactccaaaattccagagttcttgttgggcactaatgggcagccaatgcccgcagtggggctcggcacagcatcacacccatttgtggcggaggatgtcaggacatccgtgctcactgcgctggagcttggctaccgccacatcgacactgcgggactctacgcctctgagtgggttgtcggcgaggccatggctgaggcagtgtcgcgtggccttgtggcgtccagggacgagctgtttgtgacatccaaggtgtggtgcacacaatgtcatcctgagcttgtgcttccgtccctcaaggagagcttgaagaaccttcaaatggaatatgttgatttgtacctgattcattggcccatggctgtaaagcctagcaagcctcacttcccaatgaaaagggaggacattgtgccgatggaccttagtggtgtatggcaggcaatggaggaatgccatcgacttggccttgctaaaatgattggtgttagcaatttcacaacaaagaaattgcaggagctgcttgccattgcaaaaattcccccagttgtaaatcaggttgaattgaatcccacttggcagcagaaaaaactaattgagttctgcaatgacaagggtattcatgtgacggcttattctcccctaggaggccaaagaatctctaaactgaatccagtacgacaatctgatatattggaagagattggaaaggctagagggaagtcagtggcccagatttcactgaggtggatatacgagcaaggagcaagcatggtggcaaagagcttgaaaagggagaggcttaaggagaacattgaaatcttcgattgggaattgagtgacgaagatcggtttaagattgatcatatagcacagcgcaagttggtcacagtacagaatctcctgtgtcctgaaggtatctccagtgtggatatcttggatgttgatgttattgaaatatagctgtggtctccatctatttgcaatgggcaaaagaattggtgtacaacatgttggatacatcagaagcagtctttcgcgtttctatgtaatgttcatcttgctaaattcacatgtgcacctttctattgtcaccaatacttttgtaccatttttctggattaatctactattaaaaatgct

SEQ ID NO: 2351 - protein, 360 aa, Zea mays subsp. mays
  peptide (1)..(360): Ceres Seq. ID no. 12349890
  misc_feature (45)..(337): Homolog of NCBI NO: 6478216 NR Description: putative NADPH-dependent oxidoreductase [Papaver
  misc_feature (45)..(332): Homolog of NCBI NO: 40781598 NR Description: reductase 2 [Hydrangea macrophylla]
  misc_feature (43)..(356): Homolog of NCBI NO: 2792295 NR Description: unknown [Fragaria x ananassa]
  misc_feature (42)..(346): Homolog of NCBI NO: 40781599 NR Description: reductase 1 [Hydrangea macrophylla]
  misc_feature (45)..(359): Homolog of NCBI NO: 38344824 NR Description: OSJNBa0064H22.5 [Oryza sativa (japonica
  misc_feature (45)..(359): Homolog of NCBI NO: 38344823 NR Description: OSJNBa0064H22.4 [Oryza sativa (japonica
  misc_feature (31)..(360): Homolog of NCBI NO: 38344822 NR Description: OSJNBa0064H22.3 [Oryza sativa (japonica
MHILNFSTAYTFYRALATPDKHRQTRKRQAMSSPAARSITCYSKIPEFLLGTNGQPMPAVGLGTASHPFVAEDVRTSVLTALELGYRHIDTAGLYASEWVVGEAMAEAVSRGLVASRDELFVTSKVWCTQCHPELVLPSLKESLKNLQMEYVDLYLIHWPMAVKPSKPHFPMKREDIVPMDLSGVWQAMEECHRLGLAKMIGVSNFTTKKLQELLAIAKIPPVVNQVELNPTWQQKKLIEFCNDKGIHVTAYSPLGGQRISKLNPVRQSDILEEIGKARGKSVAQISLRWIYEQGASMVAKSLKRERLKENIEIFDWELSDEDRFKIDHIAQRKLVTVQNLLCPEGISSVDILDVDVIEI

SEQ ID NO: 2352 - protein, 330 aa, Zea mays subsp. mays
  peptide (1)..(330): Ceres Seq. ID no. 12349891
  misc_feature (15)..(307): Homolog of NCBI NO: 6478216 NR Description: putative NADPH-dependent oxidoreductase [Papaver
  misc_feature (15)..(302): Homolog of NCBI NO: 40781598 NR Description: reductase 2 [Hydrangea macrophylla]
  misc_feature (13)..(326): Homolog of NCBI NO: 2792295 NR Description: unknown [Fragaria x ananassa]
  misc_feature (12)..(316): Homolog of NCBI NO: 40781599 NR Description: reductase 1 [Hydrangea macrophylla]
  misc_feature (15)..(329): Homolog of NCBI NO: 38344824 NR Description: OSJNBa0064H22.5 [Oryza sativa (japonica
  misc_feature (15)..(329): Homolog of NCBI NO: 38344823 NR Description: OSJNBa0064H22.4 [Oryza sativa (japonica
  misc_feature (1)..(330): Homolog of NCBI NO: 38344822 NR Description: OSJNBa0064H22.3 [Oryza sativa (japonica
MSSPAARSITCYSKIPEFLLGTNGQPMPAVGLGTASHPFVAEDVRTSVLTALELGYRHIDTAGLYASEWVVGEAMAEAVSRGLVASRDELFVTSKVWCTQCHPELVLPSLKESLKNLQMEYVDLYLIHWPMAVKPSKPHFPMKREDIVPMDLSGVWQAMEECHRLGLAKMIGVSNFTTKKLQELLAIAKIPPVVNQVELNPTWQQKKLIEFCNDKGIHVTAYSPLGGQRISKLNPVRQSDILEEIGKARGKSVAQISLRWIYEQGASMVAKSLKRERLKENIEIFDWELSDEDRFKIDHIAQRKLVTVQNLLCPEGISSVDILDVDVIEI

SEQ ID NO: 2353 - protein, 304 aa, Zea mays subsp. mays
  peptide (1)..(304): Ceres Seq. ID no. 12349892
  misc_feature (1)..(281): Homolog of NCBI NO: 6478216 NR Description: putative NADPH-dependent oxidoreductase [Papaver
  misc_feature (1)..(276): Homolog of NCBI NO: 40781598 NR Description: reductase 2 [Hydrangea macrophylla]
  misc_feature (1)..(300): Homolog of NCBI NO: 2792295 NR Description: unknown [Fragaria x ananassa]
  misc_feature (1)..(290): Homolog of NCBI NO: 40781599 NR Description: reductase 1 [Hydrangea macrophylla]
  misc_feature (1)..(303): Homolog of NCBI NO: 38344824 NR Description: OSJNBa0064H22.5 [Oryza sativa (japonica
  misc_feature (1)..(303): Homolog of NCBI NO: 38344823 NR Description: OSJNBa0064H22.4 [Oryza sativa (japonica
  misc_feature (1)..(304): Homolog of NCBI NO: 38344822 NR Description: OSJNBa0064H22.3 [Oryza sativa (japonica
MPAVGLGTASHPFVAEDVRTSVLTALELGYRHIDTAGLYASEWVVGEAMAEAVSRGLVASRDELFVTSKVWCTQCHPELVLPSLKESLKNLQMEYVDLYLIHWPMAVKPSKPHFPMKREDIVPMDLSGVWQAMEECHRLGLAKMIGVSNFTTKKLQELLAIAKIPPVVNQVELNPTWQQKKLIEFCNDKGIHVTAYSPLGGQRISKLNPVRQSDILEEIGKARGKSVAQISLRWIYEQGASMVAKSLKRERLKENIEIFDWELSDEDRFKIDHIAQRKLVTVQNLLCPEGISSVDILDVDVIEI

SEQ ID NO: 2354 - DNA, 1359 bp, Zea mays subsp. mays
  misc_feature (1)..(1359): Ceres Seq. ID no. 12410786
  misc_feature: MA Experiment ID: 108523 Result: Down-regulated in Transcription
  misc_feature: MA Experiment 108523 PARAMETER Experiment Name: Zm_42deg_Heat_P Parameter: Age (day) Value: 8
  misc_feature: MA Experiment 108523 PARAMETER Experiment Name: Zm_42deg_Heat_P Parameter: Organism Value: Zea mays
  misc_feature: MA Experiment 108523 PARAMETER Experiment Name: Zm_42deg_Heat_P Parameter: Plant Line Value: 35A19
  misc_feature: MA Experiment 108523 PARAMETER Experiment Name: Zm_42deg_Heat_P Parameter: Temperature (deg C) Value: 42 vs. 22
  misc_feature: MA Experiment 108523 PARAMETER Experiment Name: Zm_42deg_Heat_P Parameter: Timepoint (hr) Value: 6
  misc_feature: MA Experiment 108523 PARAMETER Experiment Name: Zm_42deg_Heat_P Parameter: Tissue Value: Aerial
  misc_feature: MA Experiment ID: 108543 Result: Up-regulated in Transcription
aaaaaatgccgtgagcgcagcagatgtcgtgcggtgcagtgcagtgcaggtgcgggatctctgaatcgctgacgcccagcctcctctgtcatctccctcctcggacctcgccacctcacgcggaaggaggggaagaggaagcgcggagactggaaatcgggccccaaatccgcttcggtctctcgatcggcgaggcatgattcatacaaccggctaggatggcctcaaaagctataaaaagaaggcctatcagcgctgagactgatacaacaggggaaaaacaaatggatacagcactgtcagatcctgtaacagaacctcttctaggaaacactcctcaggaagaaaatccaagacatatgagcctattacacggtcaggtttctgggatgggacggcacaggagtgtcttcgttggacacatcttttagcagcttttgttgctcaatctgcaagaaacatagtaaatgttctttctgaatttggatatttgctagcaagactctttggttgctcttctgcttccaaaagttcacaaaatggacagacacttccagttaacctcagtccattacaggaagaaaggttaagattgttgagacaaaggatagatgtgccatatgactgctcctctgtcaagcatcaggatgccctgaaagaactttggaagttggcttaccctaacagacaacttcctcctctgaagtcagatctctggaaggagatgggctggcagaactccgatccatccacagattttagagcagctgggttcatgtccttggagaatctaatatattttgccagaaattacccagattcctttcacaggctactgcataaagcagatggtaagagagctgaatgggagtatccttttgcagtaggcggcgtaaacatatcctatatgttagttcaaatgctggatttacagtcaggaaaaatgagaacaaaagctggtgttcactttgttcaactactcgatgatgacggtgtggctttcgataaccttttctgtgtagcatttcaggtgcttgattctcaatggcttgcaaggcgagcgagttatatggaattcaatgaggttctgaagtctacacggggtcagttagagcaagagcttactatcggaggtatttctcgcattcaagacatgccatcattcagaatgctgagaaggtagcgctgtttgtacttcacaggaaaagagatacattttagattccaatatattgtttaaatttgttgtccgttctttcactggattttgaagacgtgacattgtgtatgttattgagtatattgtttgtaatgtcgcagcttaaagctacagatcataatatatgatatgatatcttg

SEQ ID NO: 2355 - protein, 152 aa, Zea mays subsp. mays
  peptide (1)..(152): Ceres Seq. ID no. 12410787
  misc_feature (1)..(132): Pfam Name: Protein of unknown function, DUF609 Pfam Description: Protein of unknown function, DUF609
  misc_feature (1)..(152): Homolog of NCBI NO: 15810014 NR Description: At2g44770/F16B22.26 [Arabidopsis thaliana]
  misc_feature (1)..(150): Homolog of NCBI NO: 15218859 NR Description: hypothetical protein; protein id: At1g03620.1
  misc_feature (1)..(152): Homolog of NCBI NO: 18406626 NR Description: expressed protein
  misc_feature (1)..(152): Homolog of NCBI NO: 38345956 NR Description: OSJNBb0038F03.14 [Oryza sativa (japonica
  misc_feature (1)..(150): Homolog of NCBI NO: 18408759 NR Description: hypothetical protein; protein id: At1g67400.1
  misc_feature (1)..(150): Homolog of NCBI NO: 18411543 NR Description: putative protein
  misc_feature (1)..(152): Homolog of NCBI NO: 14140119 NR Description: putative protein [Oryza sativa]
  misc_feature (1)..(150): Homolog of NCBI NO: 6091761 NR Description: hypothetical protein [Arabidopsis thaliana]
  misc_feature (1)..(150): Homolog of NCBI NO: 21555509 NR Description: unknown [Arabidopsis thaliana]
  misc_feature (1)..(150): Homolog of NCBI NO: 18396599 NR Description: expressed protein
MGWQNSDPSTDFRAAGFMSLENLIYFARNYPDSFHRLLHKADGKRAEWEYPFAVGGVNISYMLVQMLDLQSGKMRTKAGVHFVQLLDDDGVAFDNLFCVAFQVLDSQWLARRASYMEFNEVLKSTRGQLEQELTIGGISRIQDMPSFRMLRR

SEQ ID NO: 2356 - protein, 135 aa, Zea mays subsp. mays
  peptide (1)..(135): Ceres Seq. ID no. 12410788
  misc_feature (1)..(115): Pfam Name: Protein of unknown function, DUF609 Pfam Description: Protein of unknown function, DUF609
  misc_feature (1)..(133): Homolog of NCBI NO: 18408759 NR Description: hypothetical protein; protein id: At1g67400.1
  misc_feature (1)..(133): Homolog of NCBI NO: 18411543 NR Description: putative protein
  misc_feature (1)..(135): Homolog of NCBI NO: 14140119 NR Description: putative protein [Oryza sativa]
  misc_feature (1)..(135): Homolog of NCBI NO: 15810014 NR Description: At2g44770/F16B22.26 [Arabidopsis thaliana]
  misc_feature (1)..(135): Homolog of NCBI NO: 18406626 NR Description: expressed protein
  misc_feature (1)..(135): Homolog of NCBI NO: 38345956 NR Description: OSJNBb0038F03.14 [Oryza sativa (japonica
  misc_feature (1)..(133): Homolog of NCBI NO: 15218859 NR Description: hypothetical protein; protein id: At1g03620.1
  misc_feature (1)..(133): Homolog of NCBI NO: 6091761 NR Description: hypothetical protein [Arabidopsis thaliana]
  misc_feature (1)..(133): Homolog of NCBI NO: 21555509 NR Description: unknown [Arabidopsis thaliana]
  misc_feature (1)..(133): Homolog of NCBI NO: 18396599 NR Description: expressed protein
MSLENLIYFARNYPDSFHRLLHKADGKRAEWEYPFAVGGVNISYMLVQMLDLQSGKMRTKAGVHFVQLLDDDGVAFDNLFCVAFQVLDSQWLARRASYMEFNEVLKSTRGQLEQELTIGGISRIQDMPSFRMLRR

SEQ ID NO: 2357 - protein, 91 aa, Zea mays subsp. mays
  peptide (1)..(91): Ceres Seq. ID no. 12410789
  misc_feature (1)..(71): Pfam Name: Protein of unknown function, DUF609 Pfam Description: Protein of unknown function, DUF609
  misc_feature (1)..(91): Homolog of NCBI NO: 15810014 NR Description: At2g44770/F16B22.26 [Arabidopsis thaliana]
  misc_feature (1)..(89): Homolog of NCBI NO: 15218859 NR Description: hypothetical protein; protein id: At1g03620.1
  misc_feature (1)..(91): Homolog of NCBI NO: 18406626 NR Description: expressed protein
  misc_feature (1)..(91): Homolog of NCBI NO: 38345956 NR Description: OSJNBb0038F03.14 [Oryza sativa (japonica
  misc_feature (1)..(89): Homolog of NCBI NO: 18408759 NR Description: hypothetical protein; protein id: At1g67400.1
  misc_feature (1)..(89): Homolog of NCBI NO: 18411543 NR Description: putative protein
  misc_feature (1)..(91): Homolog of NCBI NO: 14140119 NR Description: putative protein [Oryza sativa]
  misc_feature (1)..(89): Homolog of NCBI NO: 6091761 NR Description: hypothetical protein [Arabidopsis thaliana]
  misc_feature (1)..(89): Homolog of NCBI NO: 21555509 NR Description: unknown [Arabidopsis thaliana]
  misc_feature (1)..(89): Homolog of NCBI NO: 18396599 NR Description: expressed protein
MLVQMLDLQSGKMRTKAGVHFVQLLDDDGVAFDNLFCVAFQVLDSQWLARRASYMEFNEVLKSTRGQLEQELTIGGISRIQDMPSFRMLRR

SEQ ID NO: 2358 - DNA, 1159 bp, Zea mays subsp. mays
  misc_feature (1)..(1159): Ceres Seq. ID no. 12410780
  misc_feature: MA Experiment ID: 108522 Result: Down-regulated in Transcription
  misc_feature: MA Experiment 108522 PARAMETER Experiment Name: Zm_42deg_Heat_P Parameter: Age (day) Value: 8
  misc_feature: MA Experiment 108522 PARAMETER Experiment Name: Zm_42deg_Heat_P Parameter: Organism Value: Zea mays
  misc_feature: MA Experiment 108522 PARAMETER Experiment Name: Zm_42deg_Heat_P Parameter: Plant Line Value: 35A19
  misc_feature: MA Experiment 108522 PARAMETER Experiment Name: Zm_42deg_Heat_P Parameter: Temperature (deg C) Value: 42 vs. 22
  misc_feature: MA Experiment 108522 PARAMETER Experiment Name: Zm_42deg_Heat_P Parameter: Timepoint (hr) Value: 1
  misc_feature: MA Experiment 108522 PARAMETER Experiment Name: Zm_42deg_Heat_P Parameter: Tissue Value: Aerial
  misc_feature: MA Experiment ID: 108535 Result: Up-regulated in Transcription
  misc_feature: MA Experiment 108535 PARAMETER Experiment Name: Zm_Meristem_P Parameter: Age (day) Value: 8
  misc_feature: MA Experiment 108535 PARAMETER Experiment Name: Zm_Meristem_P Parameter: Organism Value: Zea mays
  misc_feature: MA Experiment 108535 PARAMETER Experiment Name: Zm_Meristem_P Parameter: Plant Line Value: 35A19
  misc_feature: MA Experiment 108535 PARAMETER Experiment Name: Zm_Meristem_P Parameter: Tissue Value: Root Meristem vs. Above Root Meristem
  misc_feature: MA Experiment ID: 20000108 Result: Up-regulated in Transcription
  misc_feature: MA Experiment 20000108 PARAMETER Experiment Name: Zm_Root-Tips_P Parameter: Age (day) Value: 12
  misc_feature: MA Experiment 20000108 PARAMETER Experiment Name: Zm_Root-Tips_P Parameter: Organism Value: Zea mays
  misc_feature: MA Experiment 20000108 PARAMETER Experiment Name: Zm_Root-Tips_P Parameter: Tissue Value: Root tips vs. Root mid region    35
  misc_feature: MA Experiment 20000108 PARAMETER Experiment Name: Zm_Root-Tips_P Parameter: Tissue Value: Root tips vs. Root mid region   Sequence Listing-Misc Features (4)
  misc_feature: MA Experiment ID: 20000535 Result: Up-regulated in Transcription
  misc_feature: MA Experiment 20000535 PARAMETER Experiment Name: Zm_Hybrid_Seed_Dev_P Parameter: DAP Value: 30 vs. 12
  misc_feature: MA Experiment 20000535 PARAMETER Experiment Name: Zm_Hybrid_Seed_Dev_P Parameter: Organism Value: Zea mays
  misc_feature: MA Experiment 20000535 PARAMETER Experiment Name: Zm_Hybrid_Seed_Dev_P Parameter: Plant Line Value: 35A19
  misc_feature: MA Experiment 20000535 PARAMETER Experiment Name: Zm_Hybrid_Seed_Dev_P Parameter: Tissue Value: Embryo vs. Unfert Floret
acgggtccacgacagtgccggatagaatcggtccaccactccccgtaccccgaactacctgacctgagagagagaccgtgcctccctcgccgccgccgccgcagcatccctagtcggagaagatggccgagaagccggcaggtcccaccccgaggacgaggatccgaggcggtctcgcggcctcagctccctcctccaggaggctgtcttccgtatctttcaccgcggccccgagcaagatcaagaaggttcctgaccctccaaaggccgtgaggccatcaagagccacacctgccaagaagcggccacaagtggatcaagctcagaagcggagagaagaggtcgctgctctgcaggagcagcttaatggcctgcaaagtaagttgcatgaaaaagatgaagctctaagatccgcagagaacttgatcggacgagttactgcggcgaatgaagcagttgatgggttgaggagccagctctccgagaaggaattgctgattgaatctactggttcagagctgcacggtgcaaagatcatgctagcagagaagcaggcggcactggagaagttagagtgggaggcaaatgtgtcgagtacaaaggtggaagagctccaagctgatgtagcttctatggatactgaagtttctgctctgatgaagctgttcaggaaaataacagagagtgacagagcccctccacccagggatagaaatgacgatttgtctttggaatgcgagccagttcaccttgatgacacggtagacgacattgaccttgagaagatggagaaggagatgtcagcctacgtttcggctttgtctgccgcgaaggagaaccctaccgacgagttcatgagagcagtcgcagatgcaagattaagacttcaagccgttgtactctgaccaagactagagcgttgcgttgtactgtgtaaccaacaggagcaagcaagtcgatagtacgtttgctaatcgctgtgttttgccggtggcccccctcagggccttttctgtgttctttctcctaccttgcatctgatcgggcggccgctagtgacagtgagctagcttgatgtaacctgtaacgctatgaaccgtggtgtacgtgactgaacctccgtaatagtagatggtatcgtgtacggtgtacctttttt

SEQ ID NO: 2359 - protein, 260 aa, Zea mays subsp. mays
  peptide (1)..(260): Ceres Seq. ID no. 12410781
  misc_feature (72)..(238): Pfam Name: Tropomyosin Pfam Description: Tropomyosin
  misc_feature (67)..(258): Homolog of NCBI NO: 15241531 NR Description: myosin heavy chain-like protein
  misc_feature (67)..(258): Homolog of NCBI NO: 1732515 NR Description: myosin heavy chain-like protein [Arabidopsis
  misc_feature (68)..(260): Homolog of NCBI NO: 19716176 NR Description: TMV-MP30 binding protein 2C [Nicotiana tabacum]
MAEKPAGPTPRTRIRGGLAASAPSSRRLSSVSFTAAPSKIKKVPDPPKAVRPSRATPAKKRPQVDQAQKRREEVAALQEQLNGLQSKLHEKDEALRSAENLIGRVTAANEAVDGLRSQLSEKELLIESTGSELHGAKIMLAEKQAALEKLEWEANVSSTKVEELQADVASMDTEVSALMKLFRKITESDRAPPPRDRNDDLSLECEPVHLDDTVDDIDLEKMEKEMSAYVSALSAAKENPTDEFMRAVADARLRLQAVVL

SEQ ID NO: 2360 - DNA, 711 bp, Zea mays subsp. mays
  misc_feature (1)..(711): Ceres Seq. ID no. 12588472
  misc_feature: MA Experiment ID: 108535 Result: Up-regulated in Transcription
  misc_feature: MA Experiment 108535 PARAMETER Experiment Name: Zm_Meristem_P Parameter: Age (day) Value: 8
  misc_feature: MA Experiment 108535 PARAMETER Experiment Name: Zm_Meristem_P Parameter: Organism Value: Zea mays
  misc_feature: MA Experiment 108535 PARAMETER Experiment Name: Zm_Meristem_P Parameter: Plant Line Value: 35A19
  misc_feature: MA Experiment 108535 PARAMETER Experiment Name: Zm_Meristem_P Parameter: Tissue Value: Root Meristem vs. Above Root Meristem
  misc_feature: MA Experiment ID: 108544 Result: Down-regulated in Transcription
  misc_feature: MA Experiment ID: 20000492 Result: Up-regulated in Transcription
  misc_feature: MA Experiment 20000492 PARAMETER Experiment Name: Zm_Hybrid_Seed_Dev_P Parameter: DAP Value: 12
  misc_feature: MA Experiment 20000492 PARAMETER Experiment Name: Zm_Hybrid_Seed_Dev_P Parameter: Organism Value: Zea mays
  misc_feature: MA Experiment 20000492 PARAMETER Experiment Name: Zm_Hybrid_Seed_Dev_P Parameter: Plant Line Value: 35A19
  misc_feature: MA Experiment 20000492 PARAMETER Experiment Name: Zm_Hybrid_Seed_Dev_P Parameter: Tissue Value: Fert Kernel vs. Unfert Floret
  misc_feature: MA Experiment ID: 20000632 Result: Down-regulated in Transcription
  misc_feature: MA Experiment 20000632 PARAMETER Experiment Name: Zm_Herbicide-Treatments_P Parameter: Timepoint (hr) Value: 4
  misc_feature: MA Experiment 20000632 PARAMETER Experiment Name: Zm_Herbicide-Treatments_P Parameter: Tissue Value: Aerial
  misc_feature: MA Experiment 20000632 PARAMETER Experiment Name: Zm_Herbicide-Treatments_P Parameter: Treatment Value: Glean vs. No Treatment
acggccatagaaatcgaccgagcgaatccctcgcatcgcattcgcagcctttgctgcatcacaccaccgcgaaaccccagcagccgcatcgatggcgcctaaggcggagaagaagccggctgcgaagaagccagcggaggaggagcccgctgccgcgaaggccccggcggggaagaagcccaaggccgagaagcgcctcccggcggccaagtcgtccggcaaagaaggcggcgacaagaagggtaagaagaaggcgaagaagtcggtggagacctacaagatctacatcttcaaggtgctgaagcaggtccacccggacatcggcatctcttccaaggccatgtccatcatgaactccttcatcaacgacatcttcgagaagctcgccggcgaggctgccaagcttgcgcgctacaacaagaagcccaccatcacctctcgggagattcaaacctctgtccgccttgtccttcccggcgagctcgccaagcacgcggtctccgagggcaccaaggccgtcactaagttcacatcatcttagatttgaggtagtagctattgggtggcgttggtagctgtgtctcaatttgtctgctactaatagtggtaggagtatccatgtgtagttgggttgcggtaagaattgtgttaaactggcaatatgtttgaaattgctttttatggatgtggaatagttgtgttgcttgttct

SEQ ID NO: 2361 - protein, 149 aa, Zea mays subsp. mays
  peptide (1)..(149): Ceres Seq. ID no. 12588473
  misc_feature (21)..(149): Pfam Name: Core histone H2A/H2B/H3/H4 Pfam Description: Core histone H2A/H2B/H3/H4
  misc_feature (2)..(146): Homolog of NCBI NO: 15223150 NR Description: histone H2B, putative; protein id: At1g08170.1 thaliana] >gi|6579213|gb|AAF18256.1|AC011438_18 T23G18.3 thaliana] >gi|8778831|gb|AAF79830.1|AC026875_10 T6D22.26
  misc_feature (1)..(149): Homolog of NCBI NO: 122022 NR Description: Histone H2B >gi|283025|pir||S22323 histone H2B -
  misc_feature (1)..(149): Homolog of NCBI NO: 1708107 NR Description: Histone H2B >gi|7439752|pir||T02077 histone H2B -
  misc_feature (1)..(149): Homolog of NCBI NO: 399853 NR Description: Histone H2B.1 >gi|283041|pir||S28048 histone H2B
  misc_feature (1)..(149): Homolog of NCBI NO: 122041 NR Description: Histone H2B-IV >gi|99439|pir||JQ0797 histone
  misc_feature (4)..(149): Homolog of NCBI NO: 34876159 NR Description: similar to Histone H2B 291B [Rattus norvegicus]
  misc_feature (1)..(149): Homolog of NCBI NO: 34895838 NR Description: putative histone H2B [Oryza sativa (japonica group)] >gi|13872901|dbj|BAB44008.1| putative histone H2B [Oryza
  misc_feature (1)..(149): Homolog of NCBI NO: 3913804 NR Description: Histone H2B.3 >gi|577825|emb|CAA49584.1| H2B
  misc_feature (1)..(149): Homolog of NCBI NO: 399854 NR Description: Histone H2B.2 >gi|283042|pir||S28049 histone H2B
  misc_feature (1)..(145): Homolog of NCBI NO: 18596433 NR Description: similar to dJ839M11.2 (Core histone
MAPKAEKKPAAKKPAEEEPAAAKAPAGKKPKAEKRLPAAKSSGKEGGDKKGKKKAKKSVETYKIYIFKVLKQVHPDIGISSKAMSIMNSFINDIFEKLAGEAAKLARYNKKPTITSREIQTSVRLVLPGELAKHAVSEGTKAVTKFTSS

SEQ ID NO: 2362 - protein, 99 aa, Zea mays subsp. mays
  peptide (1)..(99): Ceres Seq. ID no. 12588474
  misc_feature (31)..(91): Pfam Name: TT viral orf 1 Pfam Description: TT viral orf 1
  misc_feature (8)..(99): Homolog of NCBI NO: 5032119 NR Description: Ser/Arg-related nuclear matrix protein (plenty of
  misc_feature (3)..(99): Homolog of NCBI NO: 9843651 NR Description: SRM102 [Arabidopsis thaliana]
  misc_feature (3)..(99): Homolog of NCBI NO: 30684163 NR Description: proline-rich protein -related [Arabidopsis >gi|21928131|gb|AAM78093.1| At2g29210/F16P2.41 [Arabidopsis >gi|23308459|gb|AAN18199.1| At2g29210/F16P2.41 [Arabidopsis
  misc_feature (3)..(99): Homolog of NCBI NO: 25408026 NR Description: probable proline-rich protein [imported] -
  misc_feature (8)..(99): Homolog of NCBI NO: 7949115 NR Description: Ser/Arg-related nuclear matrix protein;
  misc_feature (3)..(99): Homolog of NCBI NO: 28972153 NR Description: mKIAA0324 protein [Mus musculus]
  misc_feature (3)..(99): Homolog of NCBI NO: 30424862 NR Description: RIKEN cDNA 5033413A03 [Mus musculus]
  misc_feature (8)..(99): Homolog of NCBI NO: 23274133 NR Description: Similar to serine/arginine repetitive matrix 1
GHRNRPSESLASHSQPLLHHTTAKPQQPHRWRLRRRRSRLRRSQRRRSPLPRRPRRGRSPRPRSASRRPSRPAKKAATRRVRRRRRSRWRPTRSTSSRC

SEQ ID NO: 2363 - DNA, 1607 bp, Zea mays subsp. mays
  misc_feature (1)..(1607): Ceres Seq. ID no. 12387119
  misc_feature: MA Experiment ID: 108522 Result: Up-regulated in Transcription
  misc_feature: MA Experiment 108522 PARAMETER Experiment Name: Zm_42deg_Heat_P Parameter: Age (day) Value: 8
  misc_feature: MA Experiment 108522 PARAMETER Experiment Name: Zm_42deg_Heat_P Parameter: Organism Value: Zea mays
  misc_feature: MA Experiment 108522 PARAMETER Experiment Name: Zm_42deg_Heat_P Parameter: Plant Line Value: 35A19
  misc_feature: MA Experiment 108522 PARAMETER Experiment Name: Zm_42deg_Heat_P Parameter: Temperature (deg C) Value: 42 vs. 22
  misc_feature: MA Experiment 108522 PARAMETER Experiment Name: Zm_42deg_Heat_P Parameter: Timepoint (hr) Value: 1
  misc_feature: MA Experiment 108522 PARAMETER Experiment Name: Zm_42deg_Heat_P Parameter: Tissue Value: Aerial
  misc_feature: MA Experiment ID: 108527 Result: Up-regulated in Transcription
  misc_feature: MA Experiment 108527 PARAMETER Experiment Name: Zm_5mM_NO_P Parameter: Age (day) Value: 8
  misc_feature: MA Experiment 108527 PARAMETER Experiment Name: Zm_5mM_NO_P Parameter: Organism Value: Zea mays
  misc_feature: MA Experiment 108527 PARAMETER Experiment Name: Zm_5mM_NO_P Parameter: Plant Line Value: 35A19
  misc_feature: MA Experiment 108527 PARAMETER Experiment Name: Zm_5mM_NO_P Parameter: Timepoint (hr) Value: 6
  misc_feature: MA Experiment 108527 PARAMETER Experiment Name: Zm_5mM_NO_P Parameter: Tissue Value: Aerial
  misc_feature: MA Experiment 108527 PARAMETER Experiment Name: Zm_5mM_NO_P Parameter: Treatment Value: 5mM NO vs. No Treatment
  misc_feature: MA Experiment ID: 20000535 Result: Down-regulated in Transcription
  misc_feature: MA Experiment 20000535 PARAMETER Experiment Name: Zm_Hybrid_Seed_Dev_P Parameter: DAP Value: 30 vs. 12
  misc_feature: MA Experiment 20000535 PARAMETER Experiment Name: Zm_Hybrid_Seed_Dev_P Parameter: Organism Value: Zea mays
  misc_feature: MA Experiment 20000535 PARAMETER Experiment Name: Zm_Hybrid_Seed_Dev_P Parameter: Plant Line Value: 35A19
  misc_feature: MA Experiment 20000535 PARAMETER Experiment Name: Zm_Hybrid_Seed_Dev_P Parameter: Tissue Value: Embryo vs. Unfert Floret
atttctcctctcctctcccctcgctagttcgtcgcgtcctcctcagatcaacaaaccgtgtcctgctgctgcctctggaaaccaccgggggatcgccccgcccttttcttcccgcaccccagatcctccgtcccaaaacggcagcttccggaggtctcccgtctccctgctccttccggcgcgacgggtggcccggctcgcggatccggcggtcttcggtcgacggcgaggcggcgctcgtcttggatcgggagtggttgctgaggcgcggagatggtggccgaggcggaagtcatgcatcagtcccccgttccggtgctggaggtgcagtaccaccggcgcgcgacgaccaagggggttgacgacgtcgtcgggatgtccgcgcccgcccccgcggaggttggggttggggttggggttgaggtcgaggtcgaggtcgaggtcgccgtggaggtgcctcgcatggggttggagcagcctgatgtcgcaccaagtttatccacggacatgatacagcagtttgtgcccaacatccgttctggtagcttcgccgacattgggcctcggaggtatatggaggacgagcacatccgaatagatgatctttccgcccatctcggctcgatgttggtctgccctctgcctagcgccttctacggggtctttgacggccatggcggcccggacgccgcagcctacatgaagaggcatgcgatgaggttcttgtttgaggaaagcgagttcccacaggcgtcgcaggtggatgaggtgtacctcgagtccgtggagagctgtgtccgcagagccttcctgcaggcggaccttgccctggctgatgatctggacatcagccggtcctctggaaccacggcgctcactgcattagtgtttggaaggcaactggtggtcgcgaacacgggggactgccgcgcggtgttgtgccggaaaggagtggcgatggagatgtcccgcgaccaccgcgcgaaccacgtggaggagcgcgagagggtggccgcgtcgggcgggtacatcgaggacgggtacctgaacggggtgctgtcggtgacgcgggcgctgggcgactgggacatgaaggcgcccggcgcgtcggcgtcggcggcgctgatcgcggagcccgagttccggcgggcgacgctgggtgaggacgacgagttcctcgtcatggggtgcgacgggatctgggacgtgatgacgagccagcacgcggtgagcctggtgcggcgcggcctgcggcagcacgacgaccccgcgcgctgcgcccgggagctggtgatggaggccaagcggctggagacggccgacaacctgacggtcgtcgtggtgtgcttcgcgccggagatggggtcgccgtttacaccgcagcaacagcaggaggaggagctgcccgcgaggcccaggagctgcaagaagggcctgtcgacggaggcgctgtgcagcctgaggagctggctggatacggaccaccggtagagggaggaagagctggggggtgtgtaaatactggagtattatgctgacagcaacactggttgattatgagcgctgggccatctgttgaggattttacgtaggctggttcagcagcc

SEQ ID NO: 2364 - protein, 405 aa, Zea mays subsp. mays
  peptide (1)..(405): Ceres Seq. ID no. 12387120
  misc_feature (87)..(352): Pfam Name: Protein phosphatase 2C Pfam Description: Protein phosphatase 2C
  misc_feature (71)..(401): Homolog of NCBI NO: 20146108 NR Description: protein phosphatase 2C [Mesembryanthemum
  misc_feature (77)..(403): Homolog of NCBI NO: 37536524 NR Description: putative protein phosphatase-2C
  misc_feature (77)..(403): Homolog of NCBI NO: 10140768 NR Description: putative protein phosphatase-2C [Oryza sativa]
  misc_feature (76)..(401): Homolog of NCBI NO: 15226152 NR Description: protein phosphatase 2C (PP2C)
  misc_feature (50)..(373): Homolog of NCBI NO: 30684431 NR Description: protein phosphatase 2C (PP2C) -related
  misc_feature (45)..(373): Homolog of NCBI NO: 15221047 NR Description: protein phosphatase-2C, putative; protein id:
  misc_feature (1)..(401): Homolog of NCBI NO: 15228717 NR Description: protein phosphatase 2C (PP2C)
  misc_feature (1)..(401): Homolog of NCBI NO: 30695577 NR Description: protein phosphatase 2C (PP2C), putative
  misc_feature (55)..(401): Homolog of NCBI NO: 25352221 NR Description: phosphoprotein phosphatase (EC 3.1.3.16) 2C
  misc_feature (52)..(401): Homolog of NCBI NO: 34894410 NR Description: putative protein phosphatase
MVAEAEVMHQSPVPVLEVQYHRRATTKGVDDVVGMSAPAPAEVGVGVGVEVEVEVEVAVEVPRMGLEQPDVAPSLSTDMIQQFVPNIRSGSFADIGPRRYMEDEHIRIDDLSAHLGSMLVCPLPSAFYGVFDGHGGPDAAAYMKRHAMRFLFEESEFPQASQVDEVYLESVESCVRRAFLQADLALADDLDISRSSGTTALTALVFGRQLVVANTGDCRAVLCRKGVAMEMSRDHRANHVEERERVAASGGYIEDGYLNGVLSVTRALGDWDMKAPGASASAALIAEPEFRRATLGEDDEFLVMGCDGIWDVMTSQHAVSLVRRGLRQHDDPARCARELVMEAKRLETADNLTVVVVCFAPEMGSPFTPQQQQEEELPARPRSCKKGLSTEALCSLRSWLDTDHR

SEQ ID NO: 2365 - protein, 398 aa, Zea mays subsp. mays
  peptide (1)..(398): Ceres Seq. ID no. 12387121
  misc_feature (80)..(345): Pfam Name: Protein phosphatase 2C Pfam Description: Protein phosphatase 2C
  misc_feature (64)..(394): Homolog of NCBI NO: 20146108 NR Description: protein phosphatase 2C [Mesembryanthemum
  misc_feature (70)..(396): Homolog of NCBI NO: 37536524 NR Description: putative protein phosphatase-2C
  misc_feature (70)..(396): Homolog of NCBI NO: 10140768 NR Description: putative protein phosphatase-2C [Oryza sativa]
  misc_feature (69)..(394): Homolog of NCBI NO: 15226152 NR Description: protein phosphatase 2C (PP2C)
  misc_feature (43)..(366): Homolog of NCBI NO: 30684431 NR Description: protein phosphatase 2C (PP2C) -related
  misc_feature (38)..(366): Homolog of NCBI NO: 15221047 NR Description: protein phosphatase-2C, putative; protein id:
  misc_feature (1)..(394): Homolog of NCBI NO: 15228717 NR Description: protein phosphatase 2C (PP2C)
  misc_feature (1)..(394): Homolog of NCBI NO: 30695577 NR Description: protein phosphatase 2C (PP2C), putative
  misc_feature (48)..(394): Homolog of NCBI NO: 25352221 NR Description: phosphoprotein phosphatase (EC 3.1.3.16) 2C
  misc_feature (45)..(394): Homolog of NCBI NO: 34894410 NR Description: putative protein phosphatase
MHQSPVPVLEVQYHRRATTKGVDDVVGMSAPAPAEVGVGVGVEVEVEVEVAVEVPRMGLEQPDVAPSLSTDMIQQFVPNIRSGSFADIGPRRYMEDEHIRIDDLSAHLGSMLVCPLPSAFYGVFDGHGGPDAAAYMKRHAMRFLFEESEFPQASQVDEVYLESVESCVRRAFLQADLALADDLDISRSSGTTALTALVFGRQLVVANTGDCRAVLCRKGVAMEMSRDHRANHVEERERVAASGGYIEDGYLNGVLSVTRALGDWDMKAPGASASAALIAEPEFRRATLGEDDEFLVMGCDGIWDVMTSQHAVSLVRRGLRQHDDPARCARELVMEAKRLETADNLTVVVVCFAPEMGSPFTPQQQQEEELPARPRSCKKGLSTEALCSLRSWLDTDHR

SEQ ID NO: 2366 - protein, 371 aa, Zea mays subsp. mays
  peptide (1)..(371): Ceres Seq. ID no. 12387122
  misc_feature (53)..(318): Pfam Name: Protein phosphatase 2C Pfam Description: Protein phosphatase 2C
  misc_feature (37)..(367): Homolog of NCBI NO: 20146108 NR Description: protein phosphatase 2C [Mesembryanthemum
  misc_feature (43)..(369): Homolog of NCBI NO: 37536524 NR Description: putative protein phosphatase-2C
  misc_feature (43)..(369): Homolog of NCBI NO: 10140768 NR Description: putative protein phosphatase-2C [Oryza sativa]
  misc_feature (42)..(367): Homolog of NCBI NO: 15226152 NR Description: protein phosphatase 2C (PP2C)
  misc_feature (16)..(339): Homolog of NCBI NO: 30684431 NR Description: protein phosphatase 2C (PP2C) -related
  misc_feature (11)..(339): Homolog of NCBI NO: 15221047 NR Description: protein phosphatase-2C, putative; protein id:
  misc_feature (1)..(367): Homolog of NCBI NO: 15228717 NR Description: protein phosphatase 2C (PP2C)
  misc_feature (1)..(367): Homolog of NCBI NO: 30695577 NR Description: protein phosphatase 2C (PP2C), putative
  misc_feature (21)..(367): Homolog of NCBI NO: 25352221 NR Description: phosphoprotein phosphatase (EC 3.1.3.16) 2C
  misc_feature (18)..(367): Homolog of NCBI NO: 34894410 NR Description: putative protein phosphatase
MSAPAPAEVGVGVGVEVEVEVEVAVEVPRMGLEQPDVAPSLSTDMIQQFVPNIRSGSFADIGPRRYMEDEHIRIDDLSAHLGSMLVCPLPSAFYGVFDGHGGPDAAAYMKRHAMRFLFEESEFPQASQVDEVYLESVESCVRRAFLQADLALADDLDISRSSGTTALTALVFGRQLVVANTGDCRAVLCRKGVAMEMSRDHRANHVEERERVAASGGYIEDGYLNGVLSVTRALGDWDMKAPGASASAALIAEPEFRRATLGEDDEFLVMGCDGIWDVMTSQHAVSLVRRGLRQHDDPARCARELVMEAKRLETADNLTVVVVCFAPEMGSPFTPQQQQEEELPARPRSCKKGLSTEALCSLRSWLDTDHR

SEQ ID NO: 2367 - DNA, 1250 bp, Zea mays subsp. mays
  misc_feature (1)..(1250): Ceres Seq. ID no. 12406761
  misc_feature: MA Experiment ID: 20000479 Result: Up-regulated in Transcription
  misc_feature: MA Experiment 20000479 PARAMETER Experiment Name: Zm_Drought_P Parameter: Age (day) Value: 10
  misc_feature: MA Experiment 20000479 PARAMETER Experiment Name: Zm_Drought_P Parameter: Organism Value: Zea mays
  misc_feature: MA Experiment 20000479 PARAMETER Experiment Name: Zm_Drought_P Parameter: Plant Line Value: 35A19
  misc_feature: MA Experiment 20000479 PARAMETER Experiment Name: Zm_Drought_P Parameter: Timepoint (hr) Value: 48
  misc_feature: MA Experiment 20000479 PARAMETER Experiment Name: Zm_Drought_P Parameter: Tissue Value: Aerial
  misc_feature: MA Experiment 20000479 PARAMETER Experiment Name: Zm_Drought_P Parameter: Treatment Value: Drought vs. No Drought
  misc_feature: MA Experiment ID: 20000480 Result: Up-regulated in Transcription
  misc_feature: MA Experiment 20000480 PARAMETER Experiment Name: Zm_Drought_P Parameter: Age (day) Value: 11
  misc_feature: MA Experiment 20000480 PARAMETER Experiment Name: Zm_Drought_P Parameter: Organism Value: Zea mays
  misc_feature: MA Experiment 20000480 PARAMETER Experiment Name: Zm_Drought_P Parameter: Plant Line Value: 35A19
  misc_feature: MA Experiment 20000480 PARAMETER Experiment Name: Zm_Drought_P Parameter: Timepoint (hr) Value: 72
  misc_feature: MA Experiment 20000480 PARAMETER Experiment Name: Zm_Drought_P Parameter: Tissue Value: Aerial
  misc_feature: MA Experiment 20000480 PARAMETER Experiment Name: Zm_Drought_P Parameter: Treatment Value: Drought vs. No Drought
  misc_feature: MA Experiment ID: 20000535 Result: Up-regulated in Transcription
  misc_feature: MA Experiment 20000535 PARAMETER Experiment Name: Zm_Hybrid_Seed_Dev_P Parameter: DAP Value: 30 vs. 12
  misc_feature: MA Experiment 20000535 PARAMETER Experiment Name: Zm_Hybrid_Seed_Dev_P Parameter: Organism Value: Zea mays
  misc_feature: MA Experiment 20000535 PARAMETER Experiment Name: Zm_Hybrid_Seed_Dev_P Parameter: Plant Line Value: 35A19
  misc_feature: MA Experiment 20000535 PARAMETER Experiment Name: Zm_Hybrid_Seed_Dev_P Parameter: Tissue Value: Embryo vs. Unfert Floret
aagccaagcaaggagagcagcagcttagcctagcactgctgcagcttgcttgctttgctttgcttcttcttggccaggcctcagagcagagctttggcttggctagtcgtcgtccgcggatagtctccgctacaccgtgtgcgtgcaagcaaggcaaggcaaccagccagccgcggcgacgaccgatcgtcaacaagctcgatcgccttggccggcggccgggcgggccaccgcaagccgcgagcgatggaggagcagctgggcccggtggcggtgacgcacctgctgcagcacacgctgcggagcctctgcaccggcgacgccccgcagtggggtctacgccgtcttctggcgcatcctgccccggaactacccgccccccaaatgggatctccctggcgccgcgtacgacaggacccgagggaacaggaggaactggatcctggcatgggaggacgggttctgcaacttcgcggcggccagcagctctgccgccgcgtccgcgtgcggccaagagggggcagcggcagctgcggcggttgcatatgccggggactgtgaggcagctgtgcaggatgcggtgaagcaccagcaccagcaggcgcagggcctgcagcctgagctgttcttcaagatgtcccatgacatctacaactacggcgaaggtctgatagggaaagtggcggcagaccacagccacaagtgggtgttcaaggagccccaggagcacgagacgagcaacctcatctcctcctggagcaaccctgcagactctcatccgaggacgtgggaggcgcagttccagtgcggcatccaggtgcacacttttaggccttgacaaatcgcaatccggcccctttttgatcagaggcaggcagctagcgctagctagctgtgggctgtgtggcctacctcctctggctgcgattgcccaagacaagacatggccagctagctgactctgccatgccatggccaattggcctgcctgcctgcgtcggcttttctttttctttttttcccccctcgctcacattctgcgctttgctctgcacttgtgcagaccatcgccctgatcgctgtcagggagggcgtcgtgcagctcggctccatgaaaaaggtgccgctactctctcagtcagctactgctcaccggtcgttctctgcactccgattgagggtccgaggcagggcagcgcgtgtgtgcagtagcgagcgctgtagtatggtttttgtgttgtgtgtgtgtg

SEQ ID NO: 2368 - protein, 193 aa, Zea mays subsp. mays
  peptide (1)..(193): Ceres Seq. ID no. 12406762
AKQGEQQLSLALLQLACFALLLLGQASEQSFGLASRRPRIVSATPCACKQGKATSQPRRRPIVNKLDRLGRRPGGPPQAASDGGAAGPGGGDAPAAAHAAEPLHRRRPAVGSTPSSGASCPGTTRPPNGISLAPRTTGPEGTGGTGSWHGRTGSATSRRPAALPPRPRAAKRGQRQLRRLHMPGTVRQLCRMR

SEQ ID NO: 2369 - protein, 104 aa, Zea mays subsp. mays
  peptide (1)..(104): Ceres Seq. ID no. 12406763
  misc_feature (1)..(29): Homolog of NCBI NO: 18406603 NR Description: expressed protein
MEEQLGPVAVTHLLQHTLRSLCTGDAPQWGLRRLLAHPAPELPAPQMGSPWRRVRQDPREQEELDPGMGGRVLQLRGGQQLCRRVRVRPRGGSGSCGGCICRGL

SEQ ID NO: 2370 - DNA, 968 bp, Zea mays subsp. mays
  misc_feature (1)..(968): Ceres Seq. ID no. 12350331
  misc_feature: MA Experiment ID: 108504 Result: Up-regulated in Transcription
  misc_feature: MA Experiment 108504 PARAMETER Experiment Name: Zm_Drought_P Parameter: Age (day) Value: 8
  misc_feature: MA Experiment 108504 PARAMETER Experiment Name: Zm_Drought_P Parameter: Organism Value: Zea mays
  misc_feature: MA Experiment 108504 PARAMETER Experiment Name: Zm_Drought_P Parameter: Plant Line Value: 35A19
  misc_feature: MA Experiment 108504 PARAMETER Experiment Name: Zm_Drought_P Parameter: Timepoint (hr) Value: 12
  misc_feature: MA Experiment 108504 PARAMETER Experiment Name: Zm_Drought_P Parameter: Tissue Value: Aerial
  misc_feature: MA Experiment 108504 PARAMETER Experiment Name: Zm_Drought_P Parameter: Treatment Value: Drought vs. No Drought
  misc_feature: MA Experiment ID: 108528 Result: Up-regulated in Transcription
  misc_feature: MA Experiment 108528 PARAMETER Experiment Name: Zm_Imbibed_Seeds_P Parameter: Age (day) Value: 5 vs. 2
  misc_feature: MA Experiment 108528 PARAMETER Experiment Name: Zm_Imbibed_Seeds_P Parameter: Organism Value: Zea mays
  misc_feature: MA Experiment 108528 PARAMETER Experiment Name: Zm_Imbibed_Seeds_P Parameter: Plant Line Value: 35A19
  misc_feature: MA Experiment 108528 PARAMETER Experiment Name: Zm_Imbibed_Seeds_P Parameter: Tissue Value: Aerial vs. Embryo
  misc_feature: MA Experiment ID: 108530 Result: Up-regulated in Transcription
  misc_feature: MA Experiment 108530 PARAMETER Experiment Name: Zm_Imbibed_Seeds_P Parameter: Age (day) Value: 6 vs. 2
  misc_feature: MA Experiment 108530 PARAMETER Experiment Name: Zm_Imbibed_Seeds_P Parameter: Organism Value: Zea mays
  misc_feature: MA Experiment 108530 PARAMETER Experiment Name: Zm_Imbibed_Seeds_P Parameter: Plant Line Value: 35A19
  misc_feature: MA Experiment 108530 PARAMETER Experiment Name: Zm_Imbibed_Seeds_P Parameter: Tissue Value: Aerial vs. Embryo
  misc_feature: MA Experiment ID: 108533 Result: Down-regulated in Transcription
  misc_feature: MA Experiment 108533 PARAMETER Experiment Name: Zm_4deg_Cold_P Parameter: Age (hr) Value: 8
  misc_feature: MA Experiment 108533 PARAMETER Experiment Name: Zm_4deg_Cold_P Parameter: Organism Value: Zea mays
  misc_feature: MA Experiment 108533 PARAMETER Experiment Name: Zm_4deg_Cold_P Parameter: Plant Line Value: 35A19
  misc_feature: MA Experiment 108533 PARAMETER Experiment Name: Zm_4deg_Cold_P Parameter: Temperature (deg C) Value: 4 vs. 22
  misc_feature: MA Experiment 108533 PARAMETER Experiment Name: Zm_4deg_Cold_P Parameter: Timepoint (hr) Value: 1
  misc_feature: MA Experiment 108533 PARAMETER Experiment Name: Zm_4deg_Cold_P Parameter: Tissue Value: Aerial
  misc_feature: MA Experiment ID: 108542 Result: Up-regulated in Transcription
  misc_feature: MA Experiment 108542 PARAMETER Experiment Name: Zm_150mM_NaCl_P Parameter: Age (day) Value: 8
  misc_feature: MA Experiment 108542 PARAMETER Experiment Name: Zm_150mM_NaCl_P Parameter: Organism Value: Zea mays
  misc_feature: MA Experiment 108542 PARAMETER Experiment Name: Zm_150mM_NaCl_P Parameter: Plant Line Value: 35A19
  misc_feature: MA Experiment 108542 PARAMETER Experiment Name: Zm_150mM_NaCl_P Parameter: Timepoint (hr) Value: 6
  misc_feature: MA Experiment 108542 PARAMETER Experiment Name: Zm_150mM_NaCl_P Parameter: Tissue Value: Aerial
  misc_feature: MA Experiment 108542 PARAMETER Experiment Name: Zm_150mM_NaCl_P Parameter: Treatment Value: 150mM NaCl vs. No Treatment
  misc_feature: MA Experiment ID: 108545 Result: Up-regulated in Transcription
  misc_feature: MA Experiment 108545 PARAMETER Experiment Name: Zm_Imbibed_Seeds_P Parameter: Age (day) Value: 3 vs. 2
  misc_feature: MA Experiment 108545 PARAMETER Experiment Name: Zm_Imbibed_Seeds_P Parameter: Organism Value: Zea mays
  misc_feature: MA Experiment 108545 PARAMETER Experiment Name: Zm_Imbibed_Seeds_P Parameter: Plant Line Value: 35A19
  misc_feature: MA Experiment 108545 PARAMETER Experiment Name: Zm_Imbibed_Seeds_P Parameter: Tissue Value: Aerial vs. Embryo
  misc_feature: MA Experiment ID: 108547 Result: Up-regulated in Transcription
  misc_feature: MA Experiment 108547 PARAMETER Experiment Name: Zm_Imbibed_Seeds_P Parameter: Age (day) Value: 4 vs. 2
  misc_feature: MA Experiment 108547 PARAMETER Experiment Name: Zm_Imbibed_Seeds_P Parameter: Organism Value: Zea mays
  misc_feature: MA Experiment 108547 PARAMETER Experiment Name: Zm_Imbibed_Seeds_P Parameter: Plant Line Value: 35A19
  misc_feature: MA Experiment 108547 PARAMETER Experiment Name: Zm_Imbibed_Seeds_P Parameter: Tissue Value: Aerial vs. Embryo
  misc_feature: MA Experiment ID: 108556 Result: Up-regulated in Transcription
  misc_feature: MA Experiment 108556 PARAMETER Experiment Name: Zm_Drought_P Parameter: Age (day) Value: 9
  misc_feature: MA Experiment 108556 PARAMETER Experiment Name: Zm_Drought_P Parameter: Organism Value: Zea mays
  misc_feature: MA Experiment 108556 PARAMETER Experiment Name: Zm_Drought_P Parameter: Plant Line Value: 35A19
  misc_feature: MA Experiment 108556 PARAMETER Experiment Name: Zm_Drought_P Parameter: Timepoint (hr) Value: 24
  misc_feature: MA Experiment 108556 PARAMETER Experiment Name: Zm_Drought_P Parameter: Tissue Value: Aerial
  misc_feature: MA Experiment 108556 PARAMETER Experiment Name: Zm_Drought_P Parameter: Treatment Value: Drought vs. No Drought
  misc_feature: MA Experiment ID: 108559 Result: Up-regulated in Transcription
  misc_feature: MA Experiment 108559 PARAMETER Experiment Name: Zm_5mM_NO_P Parameter: Age (day) Value: 8
  misc_feature: MA Experiment 108559 PARAMETER Experiment Name: Zm_5mM_NO_P Parameter: Organism Value: Zea mays
  misc_feature: MA Experiment 108559 PARAMETER Experiment Name: Zm_5mM_NO_P Parameter: Plant Line Value: 35A19
  misc_feature: MA Experiment 108559 PARAMETER Experiment Name: Zm_5mM_NO_P Parameter: Timepoint (hr) Value: 12
  misc_feature: MA Experiment 108559 PARAMETER Experiment Name: Zm_5mM_NO_P Parameter: Tissue Value: Aerial
  misc_feature: MA Experiment 108559 PARAMETER Experiment Name: Zm_5mM_NO_P Parameter: Treatment Value: 5mM NO vs. No Treatment
  misc_feature: MA Experiment ID: 108597 Result: Up-regulated in Transcription
  misc_feature: MA Experiment 108597 PARAMETER Experiment Name: Zm_100uM_ABA_P Parameter: Age (day) Value: 9
  misc_feature: MA Experiment 108597 PARAMETER Experiment Name: Zm_100uM_ABA_P Parameter: Organism Value: Zea mays
  misc_feature: MA Experiment 108597 PARAMETER Experiment Name: Zm_100uM_ABA_P Parameter: Plant Line Value: 35A19
  misc_feature: MA Experiment 108597 PARAMETER Experiment Name: Zm_100uM_ABA_P Parameter: Timepoint (hr) Value: 24
  misc_feature: MA Experiment 108597 PARAMETER Experiment Name: Zm_100uM_ABA_P Parameter: Tissue Value: Aerial
  misc_feature: MA Experiment 108597 PARAMETER Experiment Name: Zm_100uM_ABA_P Parameter: Treatment Value: 100uM ABA vs. No Treatment
  misc_feature: MA Experiment ID: 20000477 Result: Up-regulated in Transcription
  misc_feature: MA Experiment 20000477 PARAMETER Experiment Name: Zm_5mM_SA_P Parameter: Age (day) Value: 10
  misc_feature: MA Experiment 20000477 PARAMETER Experiment Name: Zm_5mM_SA_P Parameter: Organism Value: Zea mays
  misc_feature: MA Experiment 20000477 PARAMETER Experiment Name: Zm_5mM_SA_P Parameter: Plant Line Value: 35A19
  misc_feature: MA Experiment 20000477 PARAMETER Experiment Name: Zm_5mM_SA_P Parameter: Timepoint (hr) Value: 48
  misc_feature: MA Experiment 20000477 PARAMETER Experiment Name: Zm_5mM_SA_P Parameter: Tissue Value: Aerial
  misc_feature: MA Experiment 20000477 PARAMETER Experiment Name: Zm_5mM_SA_P Parameter: Treatment Value: 5mM SA vs. No Treatment
  misc_feature: MA Experiment ID: 20000478 Result: Up-regulated in Transcription
  misc_feature: MA Experiment 20000478 PARAMETER Experiment Name: Zm_5mM_SA_P Parameter: Age (day) Value: 11
  misc_feature: MA Experiment 20000478 PARAMETER Experiment Name: Zm_5mM_SA_P Parameter: Organism Value: Zea mays
  misc_feature: MA Experiment 20000478 PARAMETER Experiment Name: Zm_5mM_SA_P Parameter: Plant Line Value: 35A19
  misc_feature: MA Experiment 20000478 PARAMETER Experiment Name: Zm_5mM_SA_P Parameter: Timepoint (hr) Value: 72
  misc_feature: MA Experiment 20000478 PARAMETER Experiment Name: Zm_5mM_SA_P Parameter: Tissue Value: Aerial
  misc_feature: MA Experiment 20000478 PARAMETER Experiment Name: Zm_5mM_SA_P Parameter: Treatment Value: 5mM SA vs. No Treatment
  misc_feature: MA Experiment ID: 20000480 Result: Up-regulated in Transcription
  misc_feature: MA Experiment 20000480 PARAMETER Experiment Name: Zm_Drought_P Parameter: Age (day) Value: 11
  misc_feature: MA Experiment 20000480 PARAMETER Experiment Name: Zm_Drought_P Parameter: Organism Value: Zea mays
  misc_feature: MA Experiment 20000480 PARAMETER Experiment Name: Zm_Drought_P Parameter: Plant Line Value: 35A19
  misc_feature: MA Experiment 20000480 PARAMETER Experiment Name: Zm_Drought_P Parameter: Timepoint (hr) Value: 72
  misc_feature: MA Experiment 20000480 PARAMETER Experiment Name: Zm_Drought_P Parameter: Tissue Value: Aerial
  misc_feature: MA Experiment 20000480 PARAMETER Experiment Name: Zm_Drought_P Parameter: Treatment Value: Drought vs. No Drought
  misc_feature: MA Experiment ID: 20000492 Result: Down-regulated in Transcription
  misc_feature: MA Experiment 20000492 PARAMETER Experiment Name: Zm_Hybrid_Seed_Dev_P Parameter: DAP Value: 12
  misc_feature: MA Experiment 20000492 PARAMETER Experiment Name: Zm_Hybrid_Seed_Dev_P Parameter: Organism Value: Zea mays
  misc_feature: MA Experiment 20000492 PARAMETER Experiment Name: Zm_Hybrid_Seed_Dev_P Parameter: Plant Line Value: 35A19
  misc_feature: MA Experiment 20000492 PARAMETER Experiment Name: Zm_Hybrid_Seed_Dev_P Parameter: Tissue Value: Fert Kernel vs. Unfert Floret
  misc_feature: MA Experiment ID: 20001613 Result: Up-regulated in Transcription
  misc_feature: MA Experiment 20001613 PARAMETER Experiment Name: Zm_50ppm_KNO3_L-to-H_P Parameter: Age (day) Value: 20
  misc_feature: MA Experiment 20001613 PARAMETER Experiment Name: Zm_50ppm_KNO3_L-to-H_P Parameter: Organism Value: Zea mays
  misc_feature: MA Experiment 20001613 PARAMETER Experiment Name: Zm_50ppm_KNO3_L-to-H_P Parameter: Plant Line Value: 35A19
  misc_feature: MA Experiment 20001613 PARAMETER Experiment Name: Zm_50ppm_KNO3_L-to-H_P Parameter: Timepoint (hr) Value: 24
  misc_feature: MA Experiment 20001613 PARAMETER Experiment Name: Zm_50ppm_KNO3_L-to-H_P Parameter: Tissue Value: Roots
  misc_feature: MA Experiment 20001613 PARAMETER Experiment Name: Zm_50ppm_KNO3_L-to-H_P Parameter: Treatment Value: 50ppm KNO3 vs. 50ppm KCl
aaaaatcaactgattcgctgaaaaacggagaattgaaagcgaatgctgtctcccaccacactgcggccgctggttccggcggcggcgccagcgcaccttaccgcctgcttcttgcccgcgtcggggcggcgtgcgccggcggcggcggtgcgcgcggtgcggaactacgactccatcccgaagcgggagcccttcacctccaaccgcagcaccctcgacgagttcctccggctggacaagccgctcgtccagcgtaccaaggaccagatcacagattattgcatgaccgtcgaaggtgatgaatgttgcagctgttgggatgcttactttgaactgaataaacttgagcaagagctgcctaaagaggaaatctcaaggatggtgaaggactcagagggtgacgtgaggtacctgatcgagagcatccatcatcgctcagatttgcggaagaagatggcagagaaatctcgtaattcagtaccatccggctcccaggggcaaactgcaaagccaaggccattccccgtgcctgatgggataccgaaaacacaggaagagctcaccgaagaagaggaagcgttgatgccagagtctccatacacaaggttgctgagaaggatgggtagataccctgaatggtacaccccacgccctgatcatgagactgactgaatcaagtcatctaccatccaggtgtcccttttggaagttttgcagcatgataatctgaagctgaagctcgttttatggtatgtggtaatattttagtgttgcacctatgctgctttgcagattagacttgtccttttctacttattaatgaaaaccggtgtgtgcggtttatgctgtaaatacctggagtgttcagaatatgttttgttcgaggttctgtgtactgaagtacggagtactaatgaatttccttgtacataacatcgaataaaatcactgggttttactttggtttc

SEQ ID NO: 2371 - protein, 209 aa, Zea mays subsp. mays
  peptide (1)..(209): Ceres Seq. ID no. 12350332
  misc_feature (22)..(209): Homolog of NCBI NO: 18397956 NR Description: expressed protein
  misc_feature (1)..(193): Homolog of NCBI NO: 31415945 NR Description: hypothetical protein [Oryza sativa (japonica
  misc_feature (1)..(209): Homolog of NCBI NO: 31415923 NR Description: unknown protein [Oryza sativa (japonica
MLSPTTLRPLVPAAAPAHLTACFLPASGRRAPAAAVRAVRNYDSIPKREPFTSNRSTLDEFLRLDKPLVQRTKDQITDYCMTVEGDECCSCWDAYFELNKLEQELPKEEISRMVKDSEGDVRYLIESIHHRSDLRKKMAEKSRNSVPSGSQGQTAKPRPFPVPDGIPKTQEELTEEEEALMPESPYTRLLRRMGRYPEWYTPRPDHETD

SEQ ID NO: 2372 - protein, 129 aa, Zea mays subsp. mays
  peptide (1)..(129): Ceres Seq. ID no. 12350333
  misc_feature (1)..(129): Homolog of NCBI NO: 18397956 NR Description: expressed protein
  misc_feature (1)..(113): Homolog of NCBI NO: 31415945 NR Description: hypothetical protein [Oryza sativa (japonica
  misc_feature (1)..(129): Homolog of NCBI NO: 31415923 NR Description: unknown protein [Oryza sativa (japonica
MTVEGDECCSCWDAYFELNKLEQELPKEEISRMVKDSEGDVRYLIESIHHRSDLRKKMAEKSRNSVPSGSQGQTAKPRPFPVPDGIPKTQEELTEEEEALMPESPYTRLLRRMGRYPEWYTPRPDHETD

SEQ ID NO: 2373 - DNA, 936 bp, Zea mays subsp. mays
  misc_feature (1)..(936): Ceres Seq. ID no. 13564260
  misc_feature: MA Experiment ID: 108504 Result: Up-regulated in Transcription
  misc_feature: MA Experiment 108504 PARAMETER Experiment Name: Zm_Drought_P Parameter: Age (day) Value: 8
  misc_feature: MA Experiment 108504 PARAMETER Experiment Name: Zm_Drought_P Parameter: Organism Value: Zea mays
  misc_feature: MA Experiment 108504 PARAMETER Experiment Name: Zm_Drought_P Parameter: Plant Line Value: 35A19
  misc_feature: MA Experiment 108504 PARAMETER Experiment Name: Zm_Drought_P Parameter: Timepoint (hr) Value: 12
  misc_feature: MA Experiment 108504 PARAMETER Experiment Name: Zm_Drought_P Parameter: Tissue Value: Aerial
  misc_feature: MA Experiment 108504 PARAMETER Experiment Name: Zm_Drought_P Parameter: Treatment Value: Drought vs. No Drought
  misc_feature: MA Experiment ID: 108513 Result: Up-regulated in Transcription
  misc_feature: MA Experiment 108513 PARAMETER Experiment Name: Zm_100uM_ABA_P Parameter: Age (day) Value: 8
  misc_feature: MA Experiment 108513 PARAMETER Experiment Name: Zm_100uM_ABA_P Parameter: Organism Value: Zea mays
  misc_feature: MA Experiment 108513 PARAMETER Experiment Name: Zm_100uM_ABA_P Parameter: Plant Line Value: 35A19
  misc_feature: MA Experiment 108513 PARAMETER Experiment Name: Zm_100uM_ABA_P Parameter: Timepoint (hr) Value: 6
  misc_feature: MA Experiment 108513 PARAMETER Experiment Name: Zm_100uM_ABA_P Parameter: Tissue Value: Aerial
  misc_feature: MA Experiment 108513 PARAMETER Experiment Name: Zm_100uM_ABA_P Parameter: Treatment Value: 100uM ABA vs. No Treatment
  misc_feature: MA Experiment ID: 108523 Result: Up-regulated in Transcription
  misc_feature: MA Experiment 108523 PARAMETER Experiment Name: Zm_42deg_Heat_P Parameter: Age (day) Value: 8
  misc_feature: MA Experiment 108523 PARAMETER Experiment Name: Zm_42deg_Heat_P Parameter: Organism Value: Zea mays
  misc_feature: MA Experiment 108523 PARAMETER Experiment Name: Zm_42deg_Heat_P Parameter: Plant Line Value: 35A19
  misc_feature: MA Experiment 108523 PARAMETER Experiment Name: Zm_42deg_Heat_P Parameter: Temperature (deg C) Value: 42 vs. 22
  misc_feature: MA Experiment 108523 PARAMETER Experiment Name: Zm_42deg_Heat_P Parameter: Timepoint (hr) Value: 6
  misc_feature: MA Experiment 108523 PARAMETER Experiment Name: Zm_42deg_Heat_P Parameter: Tissue Value: Aerial
  misc_feature: MA Experiment ID: 108526 Result: Up-regulated in Transcription
  misc_feature: MA Experiment 108526 PARAMETER Experiment Name: Zm_5mM_NO_P Parameter: Age (day) Value: 8
  misc_feature: MA Experiment 108526 PARAMETER Experiment Name: Zm_5mM_NO_P Parameter: Organism Value: Zea mays
  misc_feature: MA Experiment 108526 PARAMETER Experiment Name: Zm_5mM_NO_P Parameter: Plant Line Value: 35A19
  misc_feature: MA Experiment 108526 PARAMETER Experiment Name: Zm_5mM_NO_P Parameter: Timepoint (hr) Value: 1
  misc_feature: MA Experiment 108526 PARAMETER Experiment Name: Zm_5mM_NO_P Parameter: Tissue Value: Aerial
  misc_feature: MA Experiment 108526 PARAMETER Experiment Name: Zm_5mM_NO_P Parameter: Treatment Value: 5mM NO vs. No Treatment
  misc_feature: MA Experiment ID: 108527 Result: Up-regulated in Transcription
  misc_feature: MA Experiment 108527 PARAMETER Experiment Name: Zm_5mM_NO_P Parameter: Age (day) Value: 8
  misc_feature: MA Experiment 108527 PARAMETER Experiment Name: Zm_5mM_NO_P Parameter: Organism Value: Zea mays
  misc_feature: MA Experiment 108527 PARAMETER Experiment Name: Zm_5mM_NO_P Parameter: Plant Line Value: 35A19
  misc_feature: MA Experiment 108527 PARAMETER Experiment Name: Zm_5mM_NO_P Parameter: Timepoint (hr) Value: 6
  misc_feature: MA Experiment 108527 PARAMETER Experiment Name: Zm_5mM_NO_P Parameter: Tissue Value: Aerial
  misc_feature: MA Experiment 108527 PARAMETER Experiment Name: Zm_5mM_NO_P Parameter: Treatment Value: 5mM NO vs. No Treatment
  misc_feature: MA Experiment ID: 108530 Result: Down-regulated in Transcription
  misc_feature: MA Experiment 108530 PARAMETER Experiment Name: Zm_Imbibed_Seeds_P Parameter: Age (day) Value: 6 vs. 2
  misc_feature: MA Experiment 108530 PARAMETER Experiment Name: Zm_Imbibed_Seeds_P Parameter: Organism Value: Zea mays
  misc_feature: MA Experiment 108530 PARAMETER Experiment Name: Zm_Imbibed_Seeds_P Parameter: Plant Line Value: 35A19
  misc_feature: MA Experiment 108530 PARAMETER Experiment Name: Zm_Imbibed_Seeds_P Parameter: Tissue Value: Aerial vs. Embryo
  misc_feature: MA Experiment ID: 108536 Result: Up-regulated in Transcription
  misc_feature: MA Experiment 108536 PARAMETER Experiment Name: Zm_Meristem_P Parameter: Age (day) Value: 8
  misc_feature: MA Experiment 108536 PARAMETER Experiment Name: Zm_Meristem_P Parameter: Organism Value: Zea mays
  misc_feature: MA Experiment 108536 PARAMETER Experiment Name: Zm_Meristem_P Parameter: Plant Line Value: 35A19
  misc_feature: MA Experiment 108536 PARAMETER Experiment Name: Zm_Meristem_P Parameter: Tissue Value: Shoot Meristem vs. Above Shoot Meristem
  misc_feature: MA Experiment ID: 108540 Result: Up-regulated in Transcription
  misc_feature: MA Experiment 108540 PARAMETER Experiment Name: Zm_20percent_PEG_P Parameter: Age (day) Value: 8
  misc_feature: MA Experiment 108540 PARAMETER Experiment Name: Zm_20percent_PEG_P Parameter: Organism Value: Zea mays
  misc_feature: MA Experiment 108540 PARAMETER Experiment Name: Zm_20percent_PEG_P Parameter: Plant Line Value: 35A19
  misc_feature: MA Experiment 108540 PARAMETER Experiment Name: Zm_20percent_PEG_P Parameter: Timepoint (hr) Value: 6
  misc_feature: MA Experiment 108540 PARAMETER Experiment Name: Zm_20percent_PEG_P Parameter: Tissue Value: Aerial
  misc_feature: MA Experiment 108540 PARAMETER Experiment Name: Zm_20percent_PEG_P Parameter: Treatment Value: 20percent PEG vs. No Treatment
  misc_feature: MA Experiment ID: 108556 Result: Up-regulated in Transcription
  misc_feature: MA Experiment 108556 PARAMETER Experiment Name: Zm_Drought_P Parameter: Age (day) Value: 9
  misc_feature: MA Experiment 108556 PARAMETER Experiment Name: Zm_Drought_P Parameter: Organism Value: Zea mays
  misc_feature: MA Experiment 108556 PARAMETER Experiment Name: Zm_Drought_P Parameter: Plant Line Value: 35A19
  misc_feature: MA Experiment 108556 PARAMETER Experiment Name: Zm_Drought_P Parameter: Timepoint (hr) Value: 24
  misc_feature: MA Experiment 108556 PARAMETER Experiment Name: Zm_Drought_P Parameter: Tissue Value: Aerial
  misc_feature: MA Experiment 108556 PARAMETER Experiment Name: Zm_Drought_P Parameter: Treatment Value: Drought vs. No Drought
  misc_feature: MA Experiment ID: 108559 Result: Up-regulated in Transcription
  misc_feature: MA Experiment 108559 PARAMETER Experiment Name: Zm_5mM_NO_P Parameter: Age (day) Value: 8
  misc_feature: MA Experiment 108559 PARAMETER Experiment Name: Zm_5mM_NO_P Parameter: Organism Value: Zea mays
  misc_feature: MA Experiment 108559 PARAMETER Experiment Name: Zm_5mM_NO_P Parameter: Plant Line Value: 35A19
  misc_feature: MA Experiment 108559 PARAMETER Experiment Name: Zm_5mM_NO_P Parameter: Timepoint (hr) Value: 12
  misc_feature: MA Experiment 108559 PARAMETER Experiment Name: Zm_5mM_NO_P Parameter: Tissue Value: Aerial
  misc_feature: MA Experiment 108559 PARAMETER Experiment Name: Zm_5mM_NO_P Parameter: Treatment Value: 5mM NO vs. No Treatment
  misc_feature: MA Experiment ID: 108597 Result: Up-regulated in Transcription
  misc_feature: MA Experiment 108597 PARAMETER Experiment Name: Zm_100uM_ABA_P Parameter: Age (day) Value: 9
  misc_feature: MA Experiment 108597 PARAMETER Experiment Name: Zm_100uM_ABA_P Parameter: Organism Value: Zea mays
  misc_feature: MA Experiment 108597 PARAMETER Experiment Name: Zm_100uM_ABA_P Parameter: Plant Line Value: 35A19
  misc_feature: MA Experiment 108597 PARAMETER Experiment Name: Zm_100uM_ABA_P Parameter: Timepoint (hr) Value: 24
  misc_feature: MA Experiment 108597 PARAMETER Experiment Name: Zm_100uM_ABA_P Parameter: Tissue Value: Aerial
  misc_feature: MA Experiment 108597 PARAMETER Experiment Name: Zm_100uM_ABA_P Parameter: Treatment Value: 100uM ABA vs. No Treatment
  misc_feature: MA Experiment ID: 20000479 Result: Up-regulated in Transcription
  misc_feature: MA Experiment 20000479 PARAMETER Experiment Name: Zm_Drought_P Parameter: Age (day) Value: 10
  misc_feature: MA Experiment 20000479 PARAMETER Experiment Name: Zm_Drought_P Parameter: Organism Value: Zea mays
  misc_feature: MA Experiment 20000479 PARAMETER Experiment Name: Zm_Drought_P Parameter: Plant Line Value: 35A19
  misc_feature: MA Experiment 20000479 PARAMETER Experiment Name: Zm_Drought_P Parameter: Timepoint (hr) Value: 48
  misc_feature: MA Experiment 20000479 PARAMETER Experiment Name: Zm_Drought_P Parameter: Tissue Value: Aerial
  misc_feature: MA Experiment 20000479 PARAMETER Experiment Name: Zm_Drought_P Parameter: Treatment Value: Drought vs. No Drought
  misc_feature: MA Experiment ID: 20000480 Result: Up-regulated in Transcription
  misc_feature: MA Experiment 20000480 PARAMETER Experiment Name: Zm_Drought_P Parameter: Age (day) Value: 11
  misc_feature: MA Experiment 20000480 PARAMETER Experiment Name: Zm_Drought_P Parameter: Organism Value: Zea mays
  misc_feature: MA Experiment 20000480 PARAMETER Experiment Name: Zm_Drought_P Parameter: Plant Line Value: 35A19
  misc_feature: MA Experiment 20000480 PARAMETER Experiment Name: Zm_Drought_P Parameter: Timepoint (hr) Value: 72
  misc_feature: MA Experiment 20000480 PARAMETER Experiment Name: Zm_Drought_P Parameter: Tissue Value: Aerial
  misc_feature: MA Experiment 20000480 PARAMETER Experiment Name: Zm_Drought_P Parameter: Treatment Value: Drought vs. No Drought
  misc_feature: MA Experiment ID: 20000534 Result: Down-regulated in Transcription
  misc_feature: MA Experiment 20000534 PARAMETER Experiment Name: Zm_Hybrid_Pollen_P Parameter: Age (day) Value: 8
  misc_feature: MA Experiment 20000534 PARAMETER Experiment Name: Zm_Hybrid_Pollen_P Parameter: Organism Value: Zea mays
  misc_feature: MA Experiment 20000534 PARAMETER Experiment Name: Zm_Hybrid_Pollen_P Parameter: Plant Line Value: 35A19
  misc_feature: MA Experiment 20000534 PARAMETER Experiment Name: Zm_Hybrid_Pollen_P Parameter: Tissue Value: Pollen vs. Aerial
  misc_feature: MA Experiment ID: 20000535 Result: Up-regulated in Transcription
  misc_feature: MA Experiment 20000535 PARAMETER Experiment Name: Zm_Hybrid_Seed_Dev_P Parameter: DAP Value: 30 vs. 12
  misc_feature: MA Experiment 20000535 PARAMETER Experiment Name: Zm_Hybrid_Seed_Dev_P Parameter: Organism Value: Zea mays
  misc_feature: MA Experiment 20000535 PARAMETER Experiment Name: Zm_Hybrid_Seed_Dev_P Parameter: Plant Line Value: 35A19
  misc_feature: MA Experiment 20000535 PARAMETER Experiment Name: Zm_Hybrid_Seed_Dev_P Parameter: Tissue Value: Embryo vs. Unfert Floret
  misc_feature: MA Experiment ID: 20000627 Result: Down-regulated in Transcription
  misc_feature: MA Experiment 20000627 PARAMETER Experiment Name: Zm_Herbicide-Treatments_P Parameter: Timepoint (hr) Value: 12
  misc_feature: MA Experiment 20000627 PARAMETER Experiment Name: Zm_Herbicide-Treatments_P Parameter: Tissue Value: Aerial
  misc_feature: MA Experiment 20000627 PARAMETER Experiment Name: Zm_Herbicide-Treatments_P Parameter: Treatment Value: Finale vs. No Treatment
  misc_feature: MA Experiment ID: 20000629 Result: Down-regulated in Transcription
  misc_feature: MA Experiment 20000629 PARAMETER Experiment Name: Zm_Herbicide-Treatments_P Parameter: Timepoint (hr) Value: 12
  misc_feature: MA Experiment 20000629 PARAMETER Experiment Name: Zm_Herbicide-Treatments_P Parameter: Tissue Value: Aerial
  misc_feature: MA Experiment 20000629 PARAMETER Experiment Name: Zm_Herbicide-Treatments_P Parameter: Treatment Value: Trimec vs. No Treatment
  misc_feature: MA Experiment ID: 20000632 Result: Down-regulated in Transcription
  misc_feature: MA Experiment 20000632 PARAMETER Experiment Name: Zm_Herbicide-Treatments_P Parameter: Timepoint (hr) Value: 4
  misc_feature: MA Experiment 20000632 PARAMETER Experiment Name: Zm_Herbicide-Treatments_P Parameter: Tissue Value: Aerial
  misc_feature: MA Experiment 20000632 PARAMETER Experiment Name: Zm_Herbicide-Treatments_P Parameter: Treatment Value: Glean vs. No Treatment
  misc_feature: MA Experiment ID: 20000633 Result: Down-regulated in Transcription
  misc_feature: MA Experiment 20000633 PARAMETER Experiment Name: Zm_Herbicide-Treatments_P Parameter: Timepoint (hr) Value: 4
  misc_feature: MA Experiment 20000633 PARAMETER Experiment Name: Zm_Herbicide-Treatments_P Parameter: Tissue Value: Aerial
  misc_feature: MA Experiment 20000633 PARAMETER Experiment Name: Zm_Herbicide-Treatments_P Parameter: Treatment Value: Trimec vs. No Treatment
  misc_feature: MA Experiment ID: 20001608 Result: Up-regulated in Transcription
  misc_feature: MA Experiment 20001608 PARAMETER Experiment Name: Zm_50ppm_KNO3_L-to-H_P Parameter: Age (day) Value: 21
  misc_feature: MA Experiment 20001608 PARAMETER Experiment Name: Zm_50ppm_KNO3_L-to-H_P Parameter: Organism Value: Zea mays
  misc_feature: MA Experiment 20001608 PARAMETER Experiment Name: Zm_50ppm_KNO3_L-to-H_P Parameter: Plant Line Value: 35A19
  misc_feature: MA Experiment 20001608 PARAMETER Experiment Name: Zm_50ppm_KNO3_L-to-H_P Parameter: Timepoint (hr) Value: 48
  misc_feature: MA Experiment 20001608 PARAMETER Experiment Name: Zm_50ppm_KNO3_L-to-H_P Parameter: Tissue Value: Shoots
  misc_feature: MA Experiment 20001608 PARAMETER Experiment Name: Zm_50ppm_KNO3_L-to-H_P Parameter: Treatment Value: 50ppm KNO3 vs. 50ppm KCl
gccccgtcccaaatccccctgtcccgctaggattcccccgaaaccctcccccaaaaccccagagcggagaagagcgcaagatgttcggcttcgggcaccacggccaccacggccagaacccgccggcgcacggcggcgtgcaccagcccaccttcaagatcttctgcaaggccgacgaggggtactgcctcaccgtccgcgacggcaacgtggtgctggcccccgccaacccgcgcgacgagcaccagcactggtacaaggacatgcgcttcagcacccaggtcaaggacgaggagggcaaccctgcgttcgccctcgtcaacaaggccactggggctcgccatcaagcactccctcggccagtcccacccggtgaagctggtgccgttcaacccggagtaccaggacgagtcggtgctgtggacggagagcggcgacgtgggcaagggcttccgctgcatccgcatggtgaacaacatccgcctcaacttcgacgccttccacggcggacaagggccacggcggcgtgcgcgacggcaccaacatcgtgctctggaagtggtgcgagggcgacaaccagcgctggaagatcgtcccctggtaaatgtgctgttctgtggctgcactggtcatcaccatgatctggagctttgaaggcatagccacctgtggtcagcaactgctgccgtgttgctagaataaagttggtggcgatcgatcgatcgatctttggtgatgggtgtccctccctgtgtgtttgtgtttagttccagtcgtttgtgaggaagtcagttatgtttgagtgagaggggtacttcgctcttcggttaactctgtacttgtcatgaggagagttttcatacccggagtgtagaaccctgtactgtactcggatccttcctttttcatccaagtgggttttattttatcaaccgc

SEQ ID NO: 2374 - protein, 212 aa, Zea mays subsp. mays
  peptide (1)..(212): Ceres Seq. ID no. 13564261
  misc_feature (51)..(87): Pfam Name: QXW lectin repeat Pfam Description: QXW lectin repeat
  misc_feature (27)..(111): Homolog of NCBI NO: 7489571 NR Description: r40c1 protein - rice >gi|1296955|emb|CAA64683.1|
  misc_feature (27)..(111): Homolog of NCBI NO: 34902150 NR Description: Putative r40c1 protein - rice [Oryza sativa
  misc_feature (27)..(111): Homolog of NCBI NO: 7489572 NR Description: r40g2 protein - rice (fragment)
  misc_feature (27)..(111): Homolog of NCBI NO: 34394517 NR Description: r40g2 protein [Oryza sativa (japonica
  misc_feature (48)..(111): Homolog of NCBI NO: 7489573 NR Description: r40g3 protein - rice >gi|1658315|emb|CAA70175.1|
  misc_feature (44)..(111): Homolog of NCBI NO: 34394517 NR Description: r40g2 protein [Oryza sativa (japonica
  misc_feature (44)..(111): Homolog of NCBI NO: 34394518 NR Description: putative r40c2 protein [Oryza sativa (japonica
  misc_feature (44)..(111): Homolog of NCBI NO: 7489572 NR Description: r40g2 protein - rice (fragment)
  misc_feature (41)..(111): Homolog of NCBI NO: 34894060 NR Description: putative r40c1 protein [Oryza sativa (japonica group)] >gi|10697200|dbj|BAB16331.1| putative r40c1 protein
  misc_feature (88)..(111): Homolog of NCBI NO: 34394518 NR Description: putative r40c2 protein [Oryza sativa (japonica
PVPNPPVPLGFPRNPPPKPQSGEERKMFGFGHHGHHGQNPPAHGGVHQPTFKIFCKADEGYCLTVRDGNVVLAPANPRDEHQHWYKDMRFSTQVKDEEGNPAFALVNKATGARHQALPRPVPPGEAGAVQPGVPGRVGAVDGERRRGQGLPLHPHGEQHPPQLRRLPRRTRATAACATAPTSCSGSGARATTSAGRSSPGKCAVLWLHWSSP

SEQ ID NO: 2375 - protein, 186 aa, Zea mays subsp. mays
  peptide (1)..(186): Ceres Seq. ID no. 13564262
  misc_feature (25)..(61): Pfam Name: QXW lectin repeat Pfam Description: QXW lectin repeat
  misc_feature (1)..(85): Homolog of NCBI NO: 7489571 NR Description: r40c1 protein - rice >gi|1296955|emb|CAA64683.1|
  misc_feature (1)..(85): Homolog of NCBI NO: 34902150 NR Description: Putative r40c1 protein - rice [Oryza sativa
  misc_feature (1)..(85): Homolog of NCBI NO: 7489572 NR Description: r40g2 protein - rice (fragment)
  misc_feature (1)..(85): Homolog of NCBI NO: 34394517 NR Description: r40g2 protein [Oryza sativa (japonica
  misc_feature (22)..(85): Homolog of NCBI NO: 7489573 NR Description: r40g3 protein - rice >gi|1658315|emb|CAA70175.1|
  misc_feature (18)..(85): Homolog of NCBI NO: 34394517 NR Description: r40g2 protein [Oryza sativa (japonica
  misc_feature (18)..(85): Homolog of NCBI NO: 34394518 NR Description: putative r40c2 protein [Oryza sativa (japonica
  misc_feature (18)..(85): Homolog of NCBI NO: 7489572 NR Description: r40g2 protein - rice (fragment)
  misc_feature (15)..(85): Homolog of NCBI NO: 34894060 NR Description: putative r40c1 protein [Oryza sativa (japonica group)] >gi|10697200|dbj|BAB16331.1| putative r40c1 protein
  misc_feature (62)..(85): Homolog of NCBI NO: 34394518 NR Description: putative r40c2 protein [Oryza sativa (japonica
MFGFGHHGHHGQNPPAHGGVHQPTFKIFCKADEGYCLTVRDGNVVLAPANPRDEHQHWYKDMRFSTQVKDEEGNPAFALVNKATGARHQALPRPVPPGEAGAVQPGVPGRVGAVDGERRRGQGLPLHPHGEQHPPQLRRLPRRTRATAACATAPTSCSGSGARATTSAGRSSPGKCAVLWLHWSSP

SEQ ID NO: 2376 - protein, 125 aa, Zea mays subsp. mays
  peptide (1)..(125): Ceres Seq. ID no. 13564263
  misc_feature (1)..(24): Homolog of NCBI NO: 7489571 NR Description: r40c1 protein - rice >gi|1296955|emb|CAA64683.1|
  misc_feature (1)..(24): Homolog of NCBI NO: 34902150 NR Description: Putative r40c1 protein - rice [Oryza sativa
  misc_feature (1)..(24): Homolog of NCBI NO: 7489572 NR Description: r40g2 protein - rice (fragment)
  misc_feature (1)..(24): Homolog of NCBI NO: 34394517 NR Description: r40g2 protein [Oryza sativa (japonica
  misc_feature (1)..(24): Homolog of NCBI NO: 7489573 NR Description: r40g3 protein - rice >gi|1658315|emb|CAA70175.1|
  misc_feature (1)..(24): Homolog of NCBI NO: 34394517 NR Description: r40g2 protein [Oryza sativa (japonica
  misc_feature (1)..(24): Homolog of NCBI NO: 34394518 NR Description: putative r40c2 protein [Oryza sativa (japonica
  misc_feature (1)..(24): Homolog of NCBI NO: 7489572 NR Description: r40g2 protein - rice (fragment)
  misc_feature (1)..(24): Homolog of NCBI NO: 34894060 NR Description: putative r40c1 protein [Oryza sativa (japonica group)] >gi|10697200|dbj|BAB16331.1| putative r40c1 protein
  misc_feature (1)..(24): Homolog of NCBI NO: 34394518 NR Description: putative r40c2 protein [Oryza sativa (japonica
MRFSTQVKDEEGNPAFALVNKATGARHQALPRPVPPGEAGAVQPGVPGRVGAVDGERRRGQGLPLHPHGEQHPPQLRRLPRRTRATAACATAPTSCSGSGARATTSAGRSSPGKCAVLWLHWSSP

SEQ ID NO: 2377 - DNA, 934 bp, Zea mays subsp. mays
  misc_feature (1)..(934): Ceres Seq. ID no. 12344895
  misc_feature: MA Experiment ID: 108522 Result: Up-regulated in Transcription
  misc_feature: MA Experiment 108522 PARAMETER Experiment Name: Zm_42deg_Heat_P Parameter: Age (day) Value: 8
  misc_feature: MA Experiment 108522 PARAMETER Experiment Name: Zm_42deg_Heat_P Parameter: Organism Value: Zea mays
  misc_feature: MA Experiment 108522 PARAMETER Experiment Name: Zm_42deg_Heat_P Parameter: Plant Line Value: 35A19
  misc_feature: MA Experiment 108522 PARAMETER Experiment Name: Zm_42deg_Heat_P Parameter: Temperature (deg C) Value: 42 vs. 22
  misc_feature: MA Experiment 108522 PARAMETER Experiment Name: Zm_42deg_Heat_P Parameter: Timepoint (hr) Value: 1
  misc_feature: MA Experiment 108522 PARAMETER Experiment Name: Zm_42deg_Heat_P Parameter: Tissue Value: Aerial
  misc_feature: MA Experiment ID: 108523 Result: Up-regulated in Transcription
  misc_feature: MA Experiment 108523 PARAMETER Experiment Name: Zm_42deg_Heat_P Parameter: Age (day) Value: 8
  misc_feature: MA Experiment 108523 PARAMETER Experiment Name: Zm_42deg_Heat_P Parameter: Organism Value: Zea mays
  misc_feature: MA Experiment 108523 PARAMETER Experiment Name: Zm_42deg_Heat_P Parameter: Plant Line Value: 35A19
  misc_feature: MA Experiment 108523 PARAMETER Experiment Name: Zm_42deg_Heat_P Parameter: Temperature (deg C) Value: 42 vs. 22
  misc_feature: MA Experiment 108523 PARAMETER Experiment Name: Zm_42deg_Heat_P Parameter: Timepoint (hr) Value: 6
  misc_feature: MA Experiment 108523 PARAMETER Experiment Name: Zm_42deg_Heat_P Parameter: Tissue Value: Aerial
  misc_feature: MA Experiment ID: 108597 Result: Up-regulated in Transcription
  misc_feature: MA Experiment 108597 PARAMETER Experiment Name: Zm_100uM_ABA_P Parameter: Age (day) Value: 9
  misc_feature: MA Experiment 108597 PARAMETER Experiment Name: Zm_100uM_ABA_P Parameter: Organism Value: Zea mays
  misc_feature: MA Experiment 108597 PARAMETER Experiment Name: Zm_100uM_ABA_P Parameter: Plant Line Value: 35A19
  misc_feature: MA Experiment 108597 PARAMETER Experiment Name: Zm_100uM_ABA_P Parameter: Timepoint (hr) Value: 24
  misc_feature: MA Experiment 108597 PARAMETER Experiment Name: Zm_100uM_ABA_P Parameter: Tissue Value: Aerial
  misc_feature: MA Experiment 108597 PARAMETER Experiment Name: Zm_100uM_ABA_P Parameter: Treatment Value: 100uM ABA vs. No Treatment
atcaatccctaatctcggcggatggctccttccttccccgcgctcgctcccacggcgaccgagctccaaaacaacgccgccgccagatccgcccgccaccggccgtcctcagctcatgccggctgcaccaagccagatccaaccccgcaccctcctccagcaccaccagctcgccctcctgtgtcccagctcccatcgccaccgcccccaccaccaccgccggcccgcccttccgacccagctgtaagccgtgcgccggcggccccccgccctaccaagagggtgaggtttgcattcactacaagcaccatgccgccccgcattcaccacccctcccccgtatcccgcagccataatgccacccccgccccgatagctggtttgaagcccccctggaagctacgaccgcattgaagatgaggatcttgaaggatggacgacgattcggtgcaggcgtggacgcgtcacccgcgtaggcctaggccgcgccccagcggcgcctcgcctgctctcagctcaagcccctagccgtcttatgcctcgtgtgaagatgctagagaagacaaaaggcaagcgctgatgatcctgcaagtggtaatgaatagagagcctataaagcgcctttctggcgcacaatctgaagctgcaaagcaaacgcaatgctgccgtcgggagattggaactacaatatctttgcatctctagctagtggatgttcctttggactgatgactttgccgtagaggttagccgtcactcgtcactggacagtgcgtttgctgctatatcaagaggttcttcttttttttaagcttggtttcaatgtatacaaagtttcgtttaaggaccctttgctaccgagtgtagtccaaaggctacttaactcataaacacatgagacacaaagatataggaggtattgatactttcattc

SEQ ID NO: 2378 - protein, 130 aa, Zea mays subsp. mays
  peptide (1)..(130): Ceres Seq. ID no. 12344896
  misc_feature (2)..(124): Pfam Name: Extensin-like region Pfam Description: Extensin-like region
  misc_feature (38)..(130): Homolog of NCBI NO: 6523547 NR Description: hydroxyproline-rich glycoprotein DZ-HRGP
  misc_feature (1)..(117): Homolog of NCBI NO: 134920 NR Description: SULFATED SURFACE GLYCOPROTEIN 185 (SSG 185)
  misc_feature (25)..(117): Homolog of NCBI NO: 539030 NR Description: cysteine-rich extensin-like protein 2 precursor -
  misc_feature (2)..(130): Homolog of NCBI NO: 34894166 NR Description: P0439B06.4 [Oryza sativa (japonica
  misc_feature (6)..(124): Homolog of NCBI NO: 15226024 NR Description: arabinogalactan-protein (AGP9)
  misc_feature (6)..(124): Homolog of NCBI NO: 13265426 NR Description: At2g14890 [Arabidopsis thaliana]
  misc_feature (38)..(130): Homolog of NCBI NO: 15230108 NR Description: protein kinase, putative; protein id: At3g24400.1
  misc_feature (32)..(89): Homolog of NCBI NO: 141279 NR Description: HYPOTHETICAL PROLINE-RICH PROTEIN
  misc_feature (38)..(124): Homolog of NCBI NO: 6523547 NR Description: hydroxyproline-rich glycoprotein DZ-HRGP
  misc_feature (35)..(123): Homolog of NCBI NO: 21219450 NR Description: putative secreted proline-rich protein
MAPSFPALAPTATELQNNAAARSARHRPSSAHAGCTKPDPTPHPPPAPPARPPVSQLPSPPPPPPPPARPSDPAVSRAPAAPRPTKRVRFAFTTSTMPPRIHHPSPVSRSHNATPAPIAGLKPPWKLRPH

SEQ ID NO: 2379 - protein, 117 aa, Zea mays subsp. mays
  peptide (1)..(117): Ceres Seq. ID no. 12344897
QSLISADGSFLPRARSHGDRAPKQRRRQIRPPPAVLSSCRLHQARSNPAPSSSTTSSPSCVPAPIATAPTTTAGPPFRPSCKPCAGGPPPYQEGEVCIHYKHHAAPHSPPLPRIPQP

SEQ ID NO: 2380 - protein, 81 aa, Zea mays subsp. mays
  peptide (1)..(81): Ceres Seq. ID no. 12344898
SIPNLGGWLLPSPRSLPRRPSSKTTPPPDPPATGRPQLMPAAPSQIQPRTLLQHHQLALLCPSSHRHRPHHHRRPALPTQL

SEQ ID NO: 2381 - DNA, 1385 bp, Zea mays subsp. mays
  misc_feature (1)..(1385): Ceres Seq. ID no. 12348953
  misc_feature: MA Experiment ID: 108528 Result: Up-regulated in Transcription
  misc_feature: MA Experiment 108528 PARAMETER Experiment Name: Zm_Imbibed_Seeds_P Parameter: Age (day) Value: 5 vs. 2
  misc_feature: MA Experiment 108528 PARAMETER Experiment Name: Zm_Imbibed_Seeds_P Parameter: Organism Value: Zea mays
  misc_feature: MA Experiment 108528 PARAMETER Experiment Name: Zm_Imbibed_Seeds_P Parameter: Plant Line Value: 35A19
  misc_feature: MA Experiment 108528 PARAMETER Experiment Name: Zm_Imbibed_Seeds_P Parameter: Tissue Value: Aerial vs. Embryo
  misc_feature: MA Experiment ID: 108530 Result: Up-regulated in Transcription
  misc_feature: MA Experiment 108530 PARAMETER Experiment Name: Zm_Imbibed_Seeds_P Parameter: Age (day) Value: 6 vs. 2
  misc_feature: MA Experiment 108530 PARAMETER Experiment Name: Zm_Imbibed_Seeds_P Parameter: Organism Value: Zea mays
  misc_feature: MA Experiment 108530 PARAMETER Experiment Name: Zm_Imbibed_Seeds_P Parameter: Plant Line Value: 35A19
  misc_feature: MA Experiment 108530 PARAMETER Experiment Name: Zm_Imbibed_Seeds_P Parameter: Tissue Value: Aerial vs. Embryo
  misc_feature: MA Experiment ID: 108547 Result: Up-regulated in Transcription
  misc_feature: MA Experiment 108547 PARAMETER Experiment Name: Zm_Imbibed_Seeds_P Parameter: Age (day) Value: 4 vs. 2
  misc_feature: MA Experiment 108547 PARAMETER Experiment Name: Zm_Imbibed_Seeds_P Parameter: Organism Value: Zea mays
  misc_feature: MA Experiment 108547 PARAMETER Experiment Name: Zm_Imbibed_Seeds_P Parameter: Plant Line Value: 35A19
  misc_feature: MA Experiment 108547 PARAMETER Experiment Name: Zm_Imbibed_Seeds_P Parameter: Tissue Value: Aerial vs. Embryo
  misc_feature: MA Experiment ID: 108556 Result: Down-regulated in Transcription
  misc_feature: MA Experiment 108556 PARAMETER Experiment Name: Zm_Drought_P Parameter: Age (day) Value: 9
  misc_feature: MA Experiment 108556 PARAMETER Experiment Name: Zm_Drought_P Parameter: Organism Value: Zea mays
  misc_feature: MA Experiment 108556 PARAMETER Experiment Name: Zm_Drought_P Parameter: Plant Line Value: 35A19
  misc_feature: MA Experiment 108556 PARAMETER Experiment Name: Zm_Drought_P Parameter: Timepoint (hr) Value: 24
  misc_feature: MA Experiment 108556 PARAMETER Experiment Name: Zm_Drought_P Parameter: Tissue Value: Aerial
  misc_feature: MA Experiment 108556 PARAMETER Experiment Name: Zm_Drought_P Parameter: Treatment Value: Drought vs. No Drought
  misc_feature: MA Experiment ID: 108597 Result: Down-regulated in Transcription
  misc_feature: MA Experiment 108597 PARAMETER Experiment Name: Zm_100uM_ABA_P Parameter: Age (day) Value: 9
  misc_feature: MA Experiment 108597 PARAMETER Experiment Name: Zm_100uM_ABA_P Parameter: Organism Value: Zea mays
  misc_feature: MA Experiment 108597 PARAMETER Experiment Name: Zm_100uM_ABA_P Parameter: Plant Line Value: 35A19
  misc_feature: MA Experiment 108597 PARAMETER Experiment Name: Zm_100uM_ABA_P Parameter: Timepoint (hr) Value: 24
  misc_feature: MA Experiment 108597 PARAMETER Experiment Name: Zm_100uM_ABA_P Parameter: Tissue Value: Aerial
  misc_feature: MA Experiment 108597 PARAMETER Experiment Name: Zm_100uM_ABA_P Parameter: Treatment Value: 100uM ABA vs. No Treatment
  misc_feature: MA Experiment ID: 20000477 Result: Down-regulated in Transcription
  misc_feature: MA Experiment 20000477 PARAMETER Experiment Name: Zm_5mM_SA_P Parameter: Age (day) Value: 10
  misc_feature: MA Experiment 20000477 PARAMETER Experiment Name: Zm_5mM_SA_P Parameter: Organism Value: Zea mays
  misc_feature: MA Experiment 20000477 PARAMETER Experiment Name: Zm_5mM_SA_P Parameter: Plant Line Value: 35A19
  misc_feature: MA Experiment 20000477 PARAMETER Experiment Name: Zm_5mM_SA_P Parameter: Timepoint (hr) Value: 48
  misc_feature: MA Experiment 20000477 PARAMETER Experiment Name: Zm_5mM_SA_P Parameter: Tissue Value: Aerial
  misc_feature: MA Experiment 20000477 PARAMETER Experiment Name: Zm_5mM_SA_P Parameter: Treatment Value: 5mM SA vs. No Treatment
  misc_feature: MA Experiment ID: 20000478 Result: Down-regulated in Transcription
  misc_feature: MA Experiment 20000478 PARAMETER Experiment Name: Zm_5mM_SA_P Parameter: Age (day) Value: 11
  misc_feature: MA Experiment 20000478 PARAMETER Experiment Name: Zm_5mM_SA_P Parameter: Organism Value: Zea mays
  misc_feature: MA Experiment 20000478 PARAMETER Experiment Name: Zm_5mM_SA_P Parameter: Plant Line Value: 35A19
  misc_feature: MA Experiment 20000478 PARAMETER Experiment Name: Zm_5mM_SA_P Parameter: Timepoint (hr) Value: 72
  misc_feature: MA Experiment 20000478 PARAMETER Experiment Name: Zm_5mM_SA_P Parameter: Tissue Value: Aerial
  misc_feature: MA Experiment 20000478 PARAMETER Experiment Name: Zm_5mM_SA_P Parameter: Treatment Value: 5mM SA vs. No Treatment
  misc_feature: MA Experiment ID: 20000480 Result: Down-regulated in Transcription
  misc_feature: MA Experiment 20000480 PARAMETER Experiment Name: Zm_Drought_P Parameter: Age (day) Value: 11
  misc_feature: MA Experiment 20000480 PARAMETER Experiment Name: Zm_Drought_P Parameter: Organism Value: Zea mays
  misc_feature: MA Experiment 20000480 PARAMETER Experiment Name: Zm_Drought_P Parameter: Plant Line Value: 35A19
  misc_feature: MA Experiment 20000480 PARAMETER Experiment Name: Zm_Drought_P Parameter: Timepoint (hr) Value: 72
  misc_feature: MA Experiment 20000480 PARAMETER Experiment Name: Zm_Drought_P Parameter: Tissue Value: Aerial
  misc_feature: MA Experiment 20000480 PARAMETER Experiment Name: Zm_Drought_P Parameter: Treatment Value: Drought vs. No Drought
acctgcacgctggccccccgccccgccgcgggatcaaatacgccgcctccgcccgtccactccctcgccgcccccgtctcctctcctctcctctcccccgcatccacggccgcaggccgcagccagccactcgacgatctagtcgtctctctctccccgctctgccgcctcgctgccgcggcttcccgtcggctggaggatgaaggtcacggtcgtgtcccggagcggccgggaggtcgtcaagggcggcatcgacctcaaggactcggccaaggtcgcggacctgcaggaggccatccatgccaggactaagaagtattatccttctaggcagcggctcaccctcccccttcaacctggaaaaggcgggaagccagttgtcctcagtccgaaggccagcctgctagaatactgcgagaagggttctgggtcactgacagtggtcttcaaagatttagggccacaggtctactacagcacactgttcttcttcgagtacctgggtcctctcatcatctaccccatgttctactatctgcctgtctacaaatacttcgggtacgagggggagcgggccatgcaccctgtccagacctacgccatgtactactggtgcttccactacttcaagcggatcatggagacattcttcgtgcaccgcttcagccacgcgacgtcgccgctctcgaacgtcttcaggaactgtgcctactactggaccttcggcgcctacattgcttactactgcaaccacccgctgtacaccccagtgagtgatctgcagatgaagattgggtttggttttggggtcgtctgccaggtcgcgaacttctactgccacatcctgctgcggaacctcaggagcccaagcggcagcggcgggtaccagatcccccgcggtttcttgttcaacatcgtgacctgcgccaattacaccaccgagatctatcagtgggtcggcttcaacatcgccacgcagaccgtggcaggttacgtcttccttgtcgtggcggcaggcatcatgaccaactgggcgctcggcaagcacagccgtctgaagaagctgtttgacggcaaggatgggaggcccaagtaccctcgccggtgggtgattctccctccgttcctgtgaagaggtggtggtggtcggcctattgtgattcgatgtctacagacagttgtactgtactaatcgtgcctgtttagcggttgaacttggattccgttgtccgaaatttctaatccgaaagatggatttcattgtcttcttcttcttagcattatgtcactatctcacgtcgtcctgtctcaatacagtctaaggttcatgtgatgttatccccatttgtccacgcacaagtgaatgcagtcactatttcgatccg

SEQ ID NO: 2382 - protein, 310 aa, Zea mays subsp. mays
  peptide (1)..(310): Ceres Seq. ID no. 12348954
  misc_feature (158)..(310): Pfam Name: 3-oxo-5-alpha-steroid 4-dehydrogenase Pfam Description: 3-oxo-5-alpha-steroid 4-dehydrogenase
  misc_feature (158)..(310): Pfam Name: 3-oxo-5-alpha-steroid 4-dehydrogenase Pfam Description: 3-oxo-5-alpha-steroid 4-dehydrogenase
  misc_feature (20)..(291): Homolog of NCBI NO: 31418870 NR Description: Unknown (protein for MGC:64025) [Danio rerio]
  misc_feature (24)..(310): Homolog of NCBI NO: 33585860 NR Description: Glycoprotein, synaptic 2 [Xenopus laevis]
  misc_feature (24)..(291): Homolog of NCBI NO: 30585427 NR Description: Homo sapiens glycoprotein, synaptic 2 [synthetic
  misc_feature (24)..(291): Homolog of NCBI NO: 24475816 NR Description: glycoprotein, synaptic 2; synaptic glycoprotein
  misc_feature (24)..(291): Homolog of NCBI NO: 13111809 NR Description: Unknown (protein for IMAGE:2901253) [Homo sapiens]
  misc_feature (20)..(291): Homolog of NCBI NO: 31418870 NR Description: Unknown (protein for MGC:64025) [Danio rerio]
  misc_feature (24)..(291): Homolog of NCBI NO: 30585427 NR Description: Homo sapiens glycoprotein, synaptic 2 [synthetic
  misc_feature (24)..(291): Homolog of NCBI NO: 13111809 NR Description: Unknown (protein for IMAGE:2901253) [Homo sapiens]
  misc_feature (1)..(310): Homolog of NCBI NO: 34895848 NR Description: putative glycoprotein [Oryza sativa (japonica
  misc_feature (1)..(310): Homolog of NCBI NO: 15233250 NR Description: synaptic glycoprotein SC2-like protein
  misc_feature (1)..(310): Homolog of NCBI NO: 25004880 NR Description: steroid 5-alpha reductase [Cicer arietinum]
  misc_feature (38)..(310): Homolog of NCBI NO: 39590267 NR Description: Hypothetical protein CBG11196 [Caenorhabditis
  misc_feature (38)..(310): Homolog of NCBI NO: 17531783 NR Description: Synaptic glycoprotein SC2 (35.1 kD)
  misc_feature (24)..(291): Homolog of NCBI NO: 24475816 NR Description: glycoprotein, synaptic 2; synaptic glycoprotein
  misc_feature (24)..(310): Homolog of NCBI NO: 33585860 NR Description: Glycoprotein, synaptic 2 [Xenopus laevis]
  misc_feature (38)..(310): Homolog of NCBI NO: 17531783 NR Description: Synaptic glycoprotein SC2 (35.1 kD)
  misc_feature (38)..(310): Homolog of NCBI NO: 39590267 NR Description: Hypothetical protein CBG11196 [Caenorhabditis
  misc_feature (1)..(310): Homolog of NCBI NO: 25004880 NR Description: steroid 5-alpha reductase [Cicer arietinum]
  misc_feature (1)..(310): Homolog of NCBI NO: 15233250 NR Description: synaptic glycoprotein SC2-like protein
  misc_feature (1)..(310): Homolog of NCBI NO: 34895848 NR Description: putative glycoprotein [Oryza sativa (japonica
MKVTVVSRSGREVVKGGIDLKDSAKVADLQEAIHARTKKYYPSRQRLTLPLQPGKGGKPVVLSPKASLLEYCEKGSGSLTVVFKDLGPQVYYSTLFFFEYLGPLIIYPMFYYLPVYKYFGYEGERAMHPVQTYAMYYWCFHYFKRIMETFFVHRFSHATSPLSNVFRNCAYYWTFGAYIAYYCNHPLYTPVSDLQMKIGFGFGVVCQVANFYCHILLRNLRSPSGSGGYQIPRGFLFNIVTCANYTTEIYQWVGFNIATQTVAGYVFLVVAAGIMTNWALGKHSRLKKLFDGKDGRPKYPRRWVILPPFL

SEQ ID NO: 2383 - protein, 202 aa, Zea mays subsp. mays
  peptide (1)..(202): Ceres Seq. ID no. 12348955
  misc_feature (50)..(202): Pfam Name: 3-oxo-5-alpha-steroid 4-dehydrogenase Pfam Description: 3-oxo-5-alpha-steroid 4-dehydrogenase
  misc_feature (50)..(202): Pfam Name: 3-oxo-5-alpha-steroid 4-dehydrogenase Pfam Description: 3-oxo-5-alpha-steroid 4-dehydrogenase
  misc_feature (1)..(183): Homolog of NCBI NO: 31418870 NR Description: Unknown (protein for MGC:64025) [Danio rerio]
  misc_feature (1)..(202): Homolog of NCBI NO: 33585860 NR Description: Glycoprotein, synaptic 2 [Xenopus laevis]
  misc_feature (1)..(183): Homolog of NCBI NO: 30585427 NR Description: Homo sapiens glycoprotein, synaptic 2 [synthetic
  misc_feature (1)..(183): Homolog of NCBI NO: 24475816 NR Description: glycoprotein, synaptic 2; synaptic glycoprotein
  misc_feature (1)..(183): Homolog of NCBI NO: 13111809 NR Description: Unknown (protein for IMAGE:2901253) [Homo sapiens]
  misc_feature (1)..(183): Homolog of NCBI NO: 31418870 NR Description: Unknown (protein for MGC:64025) [Danio rerio]
  misc_feature (1)..(183): Homolog of NCBI NO: 30585427 NR Description: Homo sapiens glycoprotein, synaptic 2 [synthetic
  misc_feature (1)..(183): Homolog of NCBI NO: 13111809 NR Description: Unknown (protein for IMAGE:2901253) [Homo sapiens]
  misc_feature (1)..(202): Homolog of NCBI NO: 34895848 NR Description: putative glycoprotein [Oryza sativa (japonica
  misc_feature (1)..(202): Homolog of NCBI NO: 15233250 NR Description: synaptic glycoprotein SC2-like protein
  misc_feature (1)..(202): Homolog of NCBI NO: 25004880 NR Description: steroid 5-alpha reductase [Cicer arietinum]
  misc_feature (1)..(202): Homolog of NCBI NO: 39590267 NR Description: Hypothetical protein CBG11196 [Caenorhabditis
  misc_feature (1)..(202): Homolog of NCBI NO: 17531783 NR Description: Synaptic glycoprotein SC2 (35.1 kD)
  misc_feature (1)..(183): Homolog of NCBI NO: 24475816 NR Description: glycoprotein, synaptic 2; synaptic glycoprotein
  misc_feature (1)..(202): Homolog of NCBI NO: 33585860 NR Description: Glycoprotein, synaptic 2 [Xenopus laevis]
  misc_feature (1)..(202): Homolog of NCBI NO: 17531783 NR Description: Synaptic glycoprotein SC2 (35.1 kD)
  misc_feature (1)..(202): Homolog of NCBI NO: 39590267 NR Description: Hypothetical protein CBG11196 [Caenorhabditis
  misc_feature (1)..(202): Homolog of NCBI NO: 25004880 NR Description: steroid 5-alpha reductase [Cicer arietinum]
  misc_feature (1)..(202): Homolog of NCBI NO: 15233250 NR Description: synaptic glycoprotein SC2-like protein
  misc_feature (1)..(202): Homolog of NCBI NO: 34895848 NR Description: putative glycoprotein [Oryza sativa (japonica
MFYYLPVYKYFGYEGERAMHPVQTYAMYYWCFHYFKRIMETFFVHRFSHATSPLSNVFRNCAYYWTFGAYIAYYCNHPLYTPVSDLQMKIGFGFGVVCQVANFYCHILLRNLRSPSGSGGYQIPRGFLFNIVTCANYTTEIYQWVGFNIATQTVAGYVFLVVAAGIMTNWALGKHSRLKKLFDGKDGRPKYPRRWVILPPFL

SEQ ID NO: 2384 - protein, 184 aa, Zea mays subsp. mays
  peptide (1)..(184): Ceres Seq. ID no. 12348956
  misc_feature (32)..(184): Pfam Name: 3-oxo-5-alpha-steroid 4-dehydrogenase Pfam Description: 3-oxo-5-alpha-steroid 4-dehydrogenase
  misc_feature (32)..(184): Pfam Name: 3-oxo-5-alpha-steroid 4-dehydrogenase Pfam Description: 3-oxo-5-alpha-steroid 4-dehydrogenase
  misc_feature (1)..(165): Homolog of NCBI NO: 31418870 NR Description: Unknown (protein for MGC:64025) [Danio rerio]
  misc_feature (1)..(184): Homolog of NCBI NO: 33585860 NR Description: Glycoprotein, synaptic 2 [Xenopus laevis]
  misc_feature (1)..(165): Homolog of NCBI NO: 30585427 NR Description: Homo sapiens glycoprotein, synaptic 2 [synthetic
  misc_feature (1)..(165): Homolog of NCBI NO: 24475816 NR Description: glycoprotein, synaptic 2; synaptic glycoprotein
  misc_feature (1)..(165): Homolog of NCBI NO: 13111809 NR Description: Unknown (protein for IMAGE:2901253) [Homo sapiens]
  misc_feature (1)..(165): Homolog of NCBI NO: 31418870 NR Description: Unknown (protein for MGC:64025) [Danio rerio]
  misc_feature (1)..(165): Homolog of NCBI NO: 30585427 NR Description: Homo sapiens glycoprotein, synaptic 2 [synthetic
  misc_feature (1)..(165): Homolog of NCBI NO: 13111809 NR Description: Unknown (protein for IMAGE:2901253) [Homo sapiens]
  misc_feature (1)..(184): Homolog of NCBI NO: 34895848 NR Description: putative glycoprotein [Oryza sativa (japonica
  misc_feature (1)..(184): Homolog of NCBI NO: 15233250 NR Description: synaptic glycoprotein SC2-like protein
  misc_feature (1)..(184): Homolog of NCBI NO: 25004880 NR Description: steroid 5-alpha reductase [Cicer arietinum]
  misc_feature (1)..(184): Homolog of NCBI NO: 39590267 NR Description: Hypothetical protein CBG11196 [Caenorhabditis
  misc_feature (1)..(184): Homolog of NCBI NO: 17531783 NR Description: Synaptic glycoprotein SC2 (35.1 kD)
  misc_feature (1)..(165): Homolog of NCBI NO: 24475816 NR Description: glycoprotein, synaptic 2; synaptic glycoprotein
  misc_feature (1)..(184): Homolog of NCBI NO: 33585860 NR Description: Glycoprotein, synaptic 2 [Xenopus laevis]
  misc_feature (1)..(184): Homolog of NCBI NO: 17531783 NR Description: Synaptic glycoprotein SC2 (35.1 kD)
  misc_feature (1)..(184): Homolog of NCBI NO: 39590267 NR Description: Hypothetical protein CBG11196 [Caenorhabditis
  misc_feature (1)..(184): Homolog of NCBI NO: 25004880 NR Description: steroid 5-alpha reductase [Cicer arietinum]
  misc_feature (1)..(184): Homolog of NCBI NO: 15233250 NR Description: synaptic glycoprotein SC2-like protein
  misc_feature (1)..(184): Homolog of NCBI NO: 34895848 NR Description: putative glycoprotein [Oryza sativa (japonica
MHPVQTYAMYYWCFHYFKRIMETFFVHRFSHATSPLSNVFRNCAYYWTFGAYIAYYCNHPLYTPVSDLQMKIGFGFGVVCQVANFYCHILLRNLRSPSGSGGYQIPRGFLFNIVTCANYTTEIYQWVGFNIATQTVAGYVFLVVAAGIMTNWALGKHSRLKKLFDGKDGRPKYPRRWVILPPFL

SEQ ID NO: 2385 - DNA, 1825 bp, Zea mays subsp. mays
  misc_feature (1)..(1825): Ceres Seq. ID no. 12373878
  misc_feature: MA Experiment ID: 20000534 Result: Down-regulated in Transcription
  misc_feature: MA Experiment 20000534 PARAMETER Experiment Name: Zm_Hybrid_Pollen_P Parameter: Age (day) Value: 8
  misc_feature: MA Experiment 20000534 PARAMETER Experiment Name: Zm_Hybrid_Pollen_P Parameter: Organism Value: Zea mays
  misc_feature: MA Experiment 20000534 PARAMETER Experiment Name: Zm_Hybrid_Pollen_P Parameter: Plant Line Value: 35A19
  misc_feature: MA Experiment 20000534 PARAMETER Experiment Name: Zm_Hybrid_Pollen_P Parameter: Tissue Value: Pollen vs. Aerial
atcaactctatccagtttcctgtctcgtttcatattgttttcccagaaatggaccggatgtgatttgtattcgtttttatccctaaatctgagtttagggggatttttagggaaataatggaggtgctgtaagtacccttccgtctgtctctccctcactcccttcgcgacgactacgcccggtgctcttcttcggccccaggtagctttcgctgccgtcctacggcaggtgcccaagtcttcttcgggcccttcaacgacgacgagcactaccagtttgttgaagatggaaaataaagagttgttcaagatgggaagtgcagatacagatactgctgcactgcacaaggagtgggatgatgttctctgtccgatatgcatggaccatccgcacaatgctgtccttctgttgtgcagctcccatgacaaaggatgccgatcctatatatgtgatacaagctataggcattcaaattgcctagataggttcaagaaaatgaaagtgaatgatgaggacagtccttcacagtcaagctcgtccatgcctaggggtacaggaaaccaaaatgttgtccagagatctcgttttggtcccactagagagagccccaggctacacatagacatatctgtacccgatgaaacttccgatcatcaagatgccagccacagacctgctgccatagttggagaacaggaagaaaacatctacaatgaaggcccagatttgacattggaaactcacgaggttgggatcaatggttcttcagtgtcaagcgacgtgtcaagcttaaatcaattgttgtgcccactgtgcagaggggtggttagtggctggaagatcatcaaagaagctagacagtatttggatgggaaatccagagcttgctcacgagaagcctgcatgttttctggtaactacagggagatccgtagacatgccagaagggtgcaccccacaacaaggcctgctgatgttgatccatcaagacgtcgtgcgtggcaccacctggagcatcagcgggattatgctgacatagtaagcgcaataaggtccgctatgcctggggcagttgtgcttggtgattatgctattgaaggcggagaaatattttcacatgaccgggaaaccagtgaaccaagtgggtctcttctgacaacattctttctatttcatatgctcagcagtagtccgattagatcaggtgatgagccaagaggcacatcaaggggcctgagaaggcagaggagacgctatctgtggggagagaatttgttaggtctccaatatgatgatgatgatgacgacgacgataacgaaggggaggaggatgaagtggatgctgtggatgaagttcagagaccaaggagtcgccggaggttcataagatcaagatcagaggagcgggcctaatacattgtggagatgtggatgatgtgcttccttgcttggttaaaatgctgtgcgcatccctgcaatcaaagaccaaaaggcaaatggacctcaagttcaagtttagatgatttggatgcgtctgacaccatccatgtgccctctttaatctgacgatcataagaaacactcattcttagggcaaagctggactgctctcagaccagaactgacatggaagctagcgtttggagatgctcgctccatcacaacagctggtgccgtcactcattcaccatgcctttttacctttgcactgcgtgtcatctgcatctgtagtatattctttccgtattacgtctcattgagtccatgctgctactgttctggttgatatccttgttcaaaggctataaaatttattatattttc

SEQ ID NO: 2386 - protein, 375 aa, Zea mays subsp. mays
  peptide (1)..(375): Ceres Seq. ID no. 12373879
  misc_feature (14)..(68): Homolog of NCBI NO: 7486671 NR Description: hypothetical protein F8F16.230 - Arabidopsis
  misc_feature (173)..(356): Homolog of NCBI NO: 18417801 NR Description: expressed protein
  misc_feature (173)..(356): Homolog of NCBI NO: 7486671 NR Description: hypothetical protein F8F16.230 - Arabidopsis
  misc_feature (11)..(99): Homolog of NCBI NO: 34912600 NR Description: P0046B10.17 [Oryza sativa (japonica
  misc_feature (171)..(286): Homolog of NCBI NO: 34912600 NR Description: P0046B10.17 [Oryza sativa (japonica
  misc_feature (9)..(89): Homolog of NCBI NO: 15221290 NR Description: unknown protein
  misc_feature (167)..(374): Homolog of NCBI NO: 15221290 NR Description: unknown protein
  misc_feature (21)..(373): Homolog of NCBI NO: 18404727 NR Description: expressed protein
  misc_feature (109)..(371): Homolog of NCBI NO: 15230170 NR Description: unknown protein
  misc_feature (1)..(375): Homolog of NCBI NO: 38346521 NR Description: OSJNBa0027H09.16 [Oryza sativa (japonica
MENKELFKMGSADTDTAALHKEWDDVLCPICMDHPHNAVLLLCSSHDKGCRSYICDTSYRHSNCLDRFKKMKVNDEDSPSQSSSSMPRGTGNQNVVQRSRFGPTRESPRLHIDISVPDETSDHQDASHRPAAIVGEQEENIYNEGPDLTLETHEVGINGSSVSSDVSSLNQLLCPLCRGVVSGWKIIKEARQYLDGKSRACSREACMFSGNYREIRRHARRVHPTTRPADVDPSRRRAWHHLEHQRDYADIVSAIRSAMPGAVVLGDYAIEGGEIFSHDRETSEPSGSLLTTFFLFHMLSSSPIRSGDEPRGTSRGLRRQRRRYLWGENLLGLQYDDDDDDDDNEGEEDEVDAVDEVQRPRSRRRFIRSRSEERA

SEQ ID NO: 2387 - protein, 367 aa, Zea mays subsp. mays
  peptide (1)..(367): Ceres Seq. ID no. 12373880
  misc_feature (6)..(60): Homolog of NCBI NO: 7486671 NR Description: hypothetical protein F8F16.230 - Arabidopsis
  misc_feature (165)..(348): Homolog of NCBI NO: 18417801 NR Description: expressed protein
  misc_feature (165)..(348): Homolog of NCBI NO: 7486671 NR Description: hypothetical protein F8F16.230 - Arabidopsis
  misc_feature (3)..(91): Homolog of NCBI NO: 34912600 NR Description: P0046B10.17 [Oryza sativa (japonica
  misc_feature (163)..(278): Homolog of NCBI NO: 34912600 NR Description: P0046B10.17 [Oryza sativa (japonica
  misc_feature (1)..(81): Homolog of NCBI NO: 15221290 NR Description: unknown protein
  misc_feature (159)..(366): Homolog of NCBI NO: 15221290 NR Description: unknown protein
  misc_feature (13)..(365): Homolog of NCBI NO: 18404727 NR Description: expressed protein
  misc_feature (101)..(363): Homolog of NCBI NO: 15230170 NR Description: unknown protein
  misc_feature (1)..(367): Homolog of NCBI NO: 38346521 NR Description: OSJNBa0027H09.16 [Oryza sativa (japonica
MGSADTDTAALHKEWDDVLCPICMDHPHNAVLLLCSSHDKGCRSYICDTSYRHSNCLDRFKKMKVNDEDSPSQSSSSMPRGTGNQNVVQRSRFGPTRESPRLHIDISVPDETSDHQDASHRPAAIVGEQEENIYNEGPDLTLETHEVGINGSSVSSDVSSLNQLLCPLCRGVVSGWKIIKEARQYLDGKSRACSREACMFSGNYREIRRHARRVHPTTRPADVDPSRRRAWHHLEHQRDYADIVSAIRSAMPGAVVLGDYAIEGGEIFSHDRETSEPSGSLLTTFFLFHMLSSSPIRSGDEPRGTSRGLRRQRRRYLWGENLLGLQYDDDDDDDDNEGEEDEVDAVDEVQRPRSRRRFIRSRSEERA

SEQ ID NO: 2388 - protein, 344 aa, Zea mays subsp. mays
  peptide (1)..(344): Ceres Seq. ID no. 12373881
  misc_feature (1)..(342): Homolog of NCBI NO: 18404727 NR Description: expressed protein
  misc_feature (78)..(340): Homolog of NCBI NO: 15230170 NR Description: unknown protein
  misc_feature (1)..(344): Homolog of NCBI NO: 38346521 NR Description: OSJNBa0027H09.16 [Oryza sativa (japonica
  misc_feature (1)..(37): Homolog of NCBI NO: 7486671 NR Description: hypothetical protein F8F16.230 - Arabidopsis
  misc_feature (142)..(325): Homolog of NCBI NO: 18417801 NR Description: expressed protein
  misc_feature (142)..(325): Homolog of NCBI NO: 7486671 NR Description: hypothetical protein F8F16.230 - Arabidopsis
  misc_feature (1)..(68): Homolog of NCBI NO: 34912600 NR Description: P0046B10.17 [Oryza sativa (japonica
  misc_feature (140)..(255): Homolog of NCBI NO: 34912600 NR Description: P0046B10.17 [Oryza sativa (japonica
  misc_feature (1)..(58): Homolog of NCBI NO: 15221290 NR Description: unknown protein
  misc_feature (136)..(343): Homolog of NCBI NO: 15221290 NR Description: unknown protein
MDHPHNAVLLLCSSHDKGCRSYICDTSYRHSNCLDRFKKMKVNDEDSPSQSSSSMPRGTGNQNVVQRSRFGPTRESPRLHIDISVPDETSDHQDASHRPAAIVGEQEENIYNEGPDLTLETHEVGINGSSVSSDVSSLNQLLCPLCRGVVSGWKIIKEARQYLDGKSRACSREACMFSGNYREIRRHARRVHPTTRPADVDPSRRRAWHHLEHQRDYADIVSAIRSAMPGAVVLGDYAIEGGEIFSHDRETSEPSGSLLTTFFLFHMLSSSPIRSGDEPRGTSRGLRRQRRRYLWGENLLGLQYDDDDDDDDNEGEEDEVDAVDEVQRPRSRRRFIRSRSEERA

SEQ ID NO: 2389 - DNA, 1429 bp, Zea mays subsp. mays
  misc_feature (1)..(1429): Ceres Seq. ID no. 12407830
  misc_feature: MA Experiment ID: 108529 Result: Down-regulated in Transcription
  misc_feature: MA Experiment 108529 PARAMETER Experiment Name: Zm_Imbibed_Seeds_P Parameter: Age (day) Value: 5 vs. 2
  misc_feature: MA Experiment 108529 PARAMETER Experiment Name: Zm_Imbibed_Seeds_P Parameter: Organism Value: Zea mays
  misc_feature: MA Experiment 108529 PARAMETER Experiment Name: Zm_Imbibed_Seeds_P Parameter: Plant Line Value: 35A19
  misc_feature: MA Experiment 108529 PARAMETER Experiment Name: Zm_Imbibed_Seeds_P Parameter: Tissue Value: Roots vs. Embryo
  misc_feature: MA Experiment ID: 108546 Result: Down-regulated in Transcription
  misc_feature: MA Experiment 108546 PARAMETER Experiment Name: Zm_Imbibed_Seeds_P Parameter: Age (day) Value: 3 vs. 2
  misc_feature: MA Experiment 108546 PARAMETER Experiment Name: Zm_Imbibed_Seeds_P Parameter: Organism Value: Zea mays
  misc_feature: MA Experiment 108546 PARAMETER Experiment Name: Zm_Imbibed_Seeds_P Parameter: Plant Line Value: 35A19
  misc_feature: MA Experiment 108546 PARAMETER Experiment Name: Zm_Imbibed_Seeds_P Parameter: Tissue Value: Roots vs. Embryo
tttttataagggagcaagagggctcggcggcagcggcgacggcgaccgcgacggcagtggcagtggcagtggcaggctgtcagccgtccctatcttgtgtgtcaagcgcgaactccctatctcgtgtgtcaagcgcgttcgcgtccgttctaggcacaggcagccgaggcgagccccttccgctcagtggccgccgccggaccgtggacgcagctagcccatcagcccatggcagggacggacgtcgcaggctccgcacgcggctccgatgccgcgctcgggaagacgggcgaaccacccgccgcggcgcggctctggcgcagccaagaaggtggctctcgctctgctagcctccttctcggcgctgctgtacagccagattcagccgccgccgtctaagatccccggcatgccgggcgggcctccggtcacggcgcccagaacaaggctcaaggacggccggcacttggcgtacctggaatctggcgtcccaaaggagaaggccaagtacaagatcatattcgttcacggcttcgactgctgtagatacgacgtgctgaatgtctcccaggggctgttggaagagctgggaatctacctgttgtccttcgaccggcccgggtacgccgagagcgacgcccacccggcccggacagagaagagcatcgcccttgacatcgcggagctggcggacaatctccagctcggccccaagttccatctcatcggcttctccatgggcggcgagatcatgtggagctgcctcaagtacatcccgcacaggctcgccggcgtggcgattcttgccccggtgggcaactactggtggtccggcttcccgccggacgtgttcaaggaggcgtggcgcgtgcagtttccgcaagaccagcgcgcggtctgggtcgctcaccacctgccgtggctgacgcactggtggaacacccagaagctgttccgcggatccagcgtcaaggacggcgaccctgccatgctatccaaggaggacaggcttgtagctgacaagttcgagaagcgaacctatgagaagcaggtcagacagcagggagagcacgactcgctccaccgcgacatgatggtcggtttcgggaagtgggactggagcccgctggagatggagaacccgttcgccggcggcctagacgaggtgaaggtgcacctgtggcacggcgtcgaggacctctacgtgccggttcaactgtcgcggtacatcagcgagaggctcccatgggtcatctaccatgagctcccgacggccggccacctcttcccggtcgccgacggcatgcccgacgctatcgtcaggtcgcttctgctcggagatgagtgatcagtatttaggatgcgcggatccaggacttgtgcactttttgcagcttcatcagtaataaaaatacactcggaggtcgag

SEQ ID NO: 2390 - protein, 359 aa, Zea mays subsp. mays
  peptide (1)..(359): Ceres Seq. ID no. 12407831
  misc_feature (109)..(353): Pfam Name: alpha/beta hydrolase fold Pfam Description: alpha/beta hydrolase fold
  misc_feature (172)..(359): Homolog of NCBI NO: 25407040 NR Description: protein T23G18.18 [imported] - Arabidopsis
  misc_feature (4)..(358): Homolog of NCBI NO: 15221193 NR Description: unknown protein; protein id: At1g74290.1
  misc_feature (32)..(355): Homolog of NCBI NO: 18410582 NR Description: expressed protein
  misc_feature (24)..(355): Homolog of NCBI NO: 21592662 NR Description: unknown [Arabidopsis thaliana]
  misc_feature (1)..(359): Homolog of NCBI NO: 15228377 NR Description: putative protein
  misc_feature (4)..(359): Homolog of NCBI NO: 21537089 NR Description: unknown [Arabidopsis thaliana]
  misc_feature (22)..(359): Homolog of NCBI NO: 18410575 NR Description: expressed protein
  misc_feature (16)..(358): Homolog of NCBI NO: 28416665 NR Description: At2g36290 [Arabidopsis thaliana]
  misc_feature (16)..(358): Homolog of NCBI NO: 18404095 NR Description: expressed protein
  misc_feature (20)..(359): Homolog of NCBI NO: 38346334 NR Description: OSJNBa0073L04.5 [Oryza sativa (japonica
MPRSGRRANHPPRRGSGAAKKVALALLASFSALLYSQIQPPPSKIPGMPGGPPVTAPRTRLKDGRHLAYLESGVPKEKAKYKIIFVHGFDCCRYDVLNVSQGLLEELGIYLLSFDRPGYAESDAHPARTEKSIALDIAELADNLQLGPKFHLIGFSMGGEIMWSCLKYIPHRLAGVAILAPVGNYWWSGFPPDVFKEAWRVQFPQDQRAVWVAHHLPWLTHWWNTQKLFRGSSVKDGDPAMLSKEDRLVADKFEKRTYEKQVRQQGEHDSLHRDMMVGFGKWDWSPLEMENPFAGGLDEVKVHLWHGVEDLYVPVQLSRYISERLPWVIYHELPTAGHLFPVADGMPDAIVRSLLLGDE

SEQ ID NO: 2391 - protein, 312 aa, Zea mays subsp. mays
  peptide (1)..(312): Ceres Seq. ID no. 12407832
  misc_feature (62)..(306): Pfam Name: alpha/beta hydrolase fold Pfam Description: alpha/beta hydrolase fold
  misc_feature (125)..(312): Homolog of NCBI NO: 25407040 NR Description: protein T23G18.18 [imported] - Arabidopsis
  misc_feature (1)..(311): Homolog of NCBI NO: 15221193 NR Description: unknown protein; protein id: At1g74290.1
  misc_feature (1)..(308): Homolog of NCBI NO: 18410582 NR Description: expressed protein
  misc_feature (1)..(308): Homolog of NCBI NO: 21592662 NR Description: unknown [Arabidopsis thaliana]
  misc_feature (1)..(312): Homolog of NCBI NO: 15228377 NR Description: putative protein
  misc_feature (1)..(312): Homolog of NCBI NO: 21537089 NR Description: unknown [Arabidopsis thaliana]
  misc_feature (1)..(312): Homolog of NCBI NO: 18410575 NR Description: expressed protein
  misc_feature (1)..(311): Homolog of NCBI NO: 28416665 NR Description: At2g36290 [Arabidopsis thaliana]
  misc_feature (1)..(311): Homolog of NCBI NO: 18404095 NR Description: expressed protein
  misc_feature (1)..(312): Homolog of NCBI NO: 38346334 NR Description: OSJNBa0073L04.5 [Oryza sativa (japonica
MPGGPPVTAPRTRLKDGRHLAYLESGVPKEKAKYKIIFVHGFDCCRYDVLNVSQGLLEELGIYLLSFDRPGYAESDAHPARTEKSIALDIAELADNLQLGPKFHLIGFSMGGEIMWSCLKYIPHRLAGVAILAPVGNYWWSGFPPDVFKEAWRVQFPQDQRAVWVAHHLPWLTHWWNTQKLFRGSSVKDGDPAMLSKEDRLVADKFEKRTYEKQVRQQGEHDSLHRDMMVGFGKWDWSPLEMENPFAGGLDEVKVHLWHGVEDLYVPVQLSRYISERLPWVIYHELPTAGHLFPVADGMPDAIVRSLLLGDE

SEQ ID NO: 2392 - protein, 203 aa, Zea mays subsp. mays
  peptide (1)..(203): Ceres Seq. ID no. 12407833
  misc_feature (1)..(197): Pfam Name: alpha/beta hydrolase fold Pfam Description: alpha/beta hydrolase fold
  misc_feature (16)..(203): Homolog of NCBI NO: 25407040 NR Description: protein T23G18.18 [imported] - Arabidopsis
  misc_feature (1)..(202): Homolog of NCBI NO: 15221193 NR Description: unknown protein; protein id: At1g74290.1
  misc_feature (1)..(199): Homolog of NCBI NO: 18410582 NR Description: expressed protein
  misc_feature (1)..(199): Homolog of NCBI NO: 21592662 NR Description: unknown [Arabidopsis thaliana]
  misc_feature (1)..(203): Homolog of NCBI NO: 15228377 NR Description: putative protein
  misc_feature (1)..(203): Homolog of NCBI NO: 21537089 NR Description: unknown [Arabidopsis thaliana]
  misc_feature (1)..(203): Homolog of NCBI NO: 18410575 NR Description: expressed protein
  misc_feature (1)..(202): Homolog of NCBI NO: 28416665 NR Description: At2g36290 [Arabidopsis thaliana]
  misc_feature (1)..(202): Homolog of NCBI NO: 18404095 NR Description: expressed protein
  misc_feature (1)..(203): Homolog of NCBI NO: 38346334 NR Description: OSJNBa0073L04.5 [Oryza sativa (japonica
MGGEIMWSCLKYIPHRLAGVAILAPVGNYWWSGFPPDVFKEAWRVQFPQDQRAVWVAHHLPWLTHWWNTQKLFRGSSVKDGDPAMLSKEDRLVADKFEKRTYEKQVRQQGEHDSLHRDMMVGFGKWDWSPLEMENPFAGGLDEVKVHLWHGVEDLYVPVQLSRYISERLPWVIYHELPTAGHLFPVADGMPDAIVRSLLLGDE

SEQ ID NO: 2393 - DNA, 1980 bp, Zea mays subsp. mays
  misc_feature (1)..(1980): Ceres Seq. ID no. 12355925
  misc_feature: MA Experiment ID: 108522 Result: Up-regulated in Transcription
  misc_feature: MA Experiment 108522 PARAMETER Experiment Name: Zm_42deg_Heat_P Parameter: Age (day) Value: 8
  misc_feature: MA Experiment 108522 PARAMETER Experiment Name: Zm_42deg_Heat_P Parameter: Organism Value: Zea mays
  misc_feature: MA Experiment 108522 PARAMETER Experiment Name: Zm_42deg_Heat_P Parameter: Plant Line Value: 35A19
  misc_feature: MA Experiment 108522 PARAMETER Experiment Name: Zm_42deg_Heat_P Parameter: Temperature (deg C) Value: 42 vs. 22
  misc_feature: MA Experiment 108522 PARAMETER Experiment Name: Zm_42deg_Heat_P Parameter: Timepoint (hr) Value: 1
  misc_feature: MA Experiment 108522 PARAMETER Experiment Name: Zm_42deg_Heat_P Parameter: Tissue Value: Aerial
  misc_feature: MA Experiment ID: 108529 Result: Up-regulated in Transcription
  misc_feature: MA Experiment 108529 PARAMETER Experiment Name: Zm_Imbibed_Seeds_P Parameter: Age (day) Value: 5 vs. 2
  misc_feature: MA Experiment 108529 PARAMETER Experiment Name: Zm_Imbibed_Seeds_P Parameter: Organism Value: Zea mays
  misc_feature: MA Experiment 108529 PARAMETER Experiment Name: Zm_Imbibed_Seeds_P Parameter: Plant Line Value: 35A19
  misc_feature: MA Experiment 108529 PARAMETER Experiment Name: Zm_Imbibed_Seeds_P Parameter: Tissue Value: Roots vs. Embryo
  misc_feature: MA Experiment ID: 108546 Result: Up-regulated in Transcription
  misc_feature: MA Experiment 108546 PARAMETER Experiment Name: Zm_Imbibed_Seeds_P Parameter: Age (day) Value: 3 vs. 2
  misc_feature: MA Experiment 108546 PARAMETER Experiment Name: Zm_Imbibed_Seeds_P Parameter: Organism Value: Zea mays
  misc_feature: MA Experiment 108546 PARAMETER Experiment Name: Zm_Imbibed_Seeds_P Parameter: Plant Line Value: 35A19
  misc_feature: MA Experiment 108546 PARAMETER Experiment Name: Zm_Imbibed_Seeds_P Parameter: Tissue Value: Roots vs. Embryo
  misc_feature: MA Experiment ID: 20000108 Result: Down-regulated in Transcription
  misc_feature: MA Experiment 20000108 PARAMETER Experiment Name: Zm_Root-Tips_P Parameter: Age (day) Value: 12
  misc_feature: MA Experiment 20000108 PARAMETER Experiment Name: Zm_Root-Tips_P Parameter: Organism Value: Zea mays
  misc_feature: MA Experiment 20000108 PARAMETER Experiment Name: Zm_Root-Tips_P Parameter: Tissue Value: Root tips vs. Root mid region    35
  misc_feature: MA Experiment 20000108 PARAMETER Experiment Name: Zm_Root-Tips_P Parameter: Tissue Value: Root tips vs. Root mid region   Sequence Listing-Misc Features (4)
aagaacagcgccatttcttaatcgcagagcctaaacccggtcctcctaattatatcgccacagtgctgtcacaaccaggcgcgatcacaaagcttaaaacgcactggcatggccactactgtactggatgccggtgaactgcacttgcacccctatgccgtcgccgccgcggcggcggcattggtgtcgatgtacatggtgtggttctgggcgctgacacgggggctgtccgggccgcggatgtggcccctcgtcggcagcctgcccagcgtcgtcctgaaccgggcgcgggttcacgactggatcgtcgacaacctgcgctccacgggggaagcggccacgtaccagacgtgcatcttgccgatgccgttcctcgcgcggcgccaggggctggtgaccgtgacgtgcaacccgcggaacctggagcacatcctgcgcgtgcgtttcgacaactaccccaagggccccatgtggcaggcggcgttccacgacctcctgggccagggcatcttcaactccgacggcgagacgtggctgctccagcgcaagacggcggcgctcgagttcaccacgcggaccttgcgccaggcgatggcgcgctgggccaaccgcatcatcaagtaccgcctgtggagcatcctcgcggaccgctgcgaggccgccgcgagcgtcgacctccaggacctgctcctgcgcctcaccttcgacaacatctgcggcctcacgttcggcaaggaccccgagacactgtcgccggggctgcaggagaaccccttcgccaacgccttcgactccgccaccgaggcgacgctgcagaggttcctgttccccagcttcctgtggcgcgtcaagaaggcgctcggcgtcggcagcgagcggagcctccgcgagagcctcgcgaccgtggaccagtacatgacggaggccatcgcggcgcgcaaggcgacgccgtcggacgacctgctctccaggttcatgaagaagcgcgacggcagcggcagggcgttcccagaggacgtgctccagtgggtcgcgctcaacttcgtgctcgccgggcgcgacacgtcgtccgtcgcgctcagctggttcttctggatgctcatgctgcggcgcgacgtcgagcgcaaggtggtcctggagatcgtctccgtggtcagggagacgcggggcgacgaccgcaggaggtggaccgaggagccgctggacttcgacgagctggaccgcctcgtgtacctcaaggcagcgttggcggagacgctgcggctgtacccgtcggtgccgcaggactccaagtacgtggtggaggacgacgtgctgcccgatggcaccgtggtgccggccggctcagcggtcacctactccatctactcggttggacggatggagagcatctgggggaaggactgcgctgagttccggcccgagcggtggctctcggctgacggcacccgtttcgagccgcccaaggacgcgtaccgcttcgtggcgttcaacggcgggccccggacgtgcctgggcaaggacctggcgtacctgcagatgaagtccatcgcgtccgctgtgctgctgcgccactcggtcgagctcgtccctgggcacaaggtggagcagaagatgtcgctcactctgttcatgaagagcggcctccgcgtgcacgtcaagccgcgggacctcgccggctacgtcgcggcaccggaggacgcaccgcagctgggagcctttgtgatcccgaccacaactgcagcagctgcataagccttgcatatgcccgcgcacattggctcgggcttcttcctgctgaacttttttctgctatgtgatgtgcctctgcatgccaaagtcgtatcgttttctctgcacccccttcattagactgttaggtttgtggctacctggcgttttatggttgtaactgtgtatttttgtgtggatggatgtggtggtggatttaggataaaggatgaatgatacaaaattatt

SEQ ID NO: 2394 - protein, 548 aa, Zea mays subsp. mays
  peptide (1)..(548): Ceres Seq. ID no. 12355926
  misc_feature (17)..(522): Homolog of NCBI NO: 15222515 NR Description: cytochrome P450, putative
  misc_feature (17)..(527): Homolog of NCBI NO: 15225914 NR Description: cytochrome P450, putative
  misc_feature (19)..(526): Homolog of NCBI NO: 26449891 NR Description: unknown protein [Arabidopsis thaliana]
  misc_feature (19)..(526): Homolog of NCBI NO: 15223436 NR Description: cytochrome P450, putative; protein id:
  misc_feature (24)..(522): Homolog of NCBI NO: 18650607 NR Description: AT4g00360/A_IG005I10_21 [Arabidopsis thaliana]
  misc_feature (24)..(522): Homolog of NCBI NO: 15236789 NR Description: cytochrome p450, putative
  misc_feature (20)..(529): Homolog of NCBI NO: 10442763 NR Description: cytochrome P450 [Triticum aestivum]
  misc_feature (22)..(520): Homolog of NCBI NO: 7430725 NR Description: cytochrome P450 CYP86A1 - Arabidopsis thaliana
  misc_feature (22)..(520): Homolog of NCBI NO: 15237768 NR Description: cytochrome p450 family
  misc_feature (22)..(520): Homolog of NCBI NO: 19698839 NR Description: cytochrome P450 [Arabidopsis thaliana]
MATTVLDAGELHLHPYAVAAAAAALVSMYMVWFWALTRGLSGPRMWPLVGSLPSVVLNRARVHDWIVDNLRSTGEAATYQTCILPMPFLARRQGLVTVTCNPRNLEHILRVRFDNYPKGPMWQAAFHDLLGQGIFNSDGETWLLQRKTAALEFTTRTLRQAMARWANRIIKYRLWSILADRCEAAASVDLQDLLLRLTFDNICGLTFGKDPETLSPGLQENPFANAFDSATEATLQRFLFPSFLWRVKKALGVGSERSLRESLATVDQYMTEAIAARKATPSDDLLSRFMKKRDGSGRAFPEDVLQWVALNFVLAGRDTSSVALSWFFWMLMLRRDVERKVVLEIVSVVRETRGDDRRRWTEEPLDFDELDRLVYLKAALAETLRLYPSVPQDSKYVVEDDVLPDGTVVPAGSAVTYSIYSVGRMESIWGKDCAEFRPERWLSADGTRFEPPKDAYRFVAFNGGPRTCLGKDLAYLQMKSIASAVLLRHSVELVPGHKVEQKMSLTLFMKSGLRVHVKPRDLAGYVAAPEDAPQLGAFVIPTTTAAAA

SEQ ID NO: 2395 - protein, 521 aa, Zea mays subsp. mays
  peptide (1)..(521): Ceres Seq. ID no. 12355927
  misc_feature (1)..(495): Homolog of NCBI NO: 15222515 NR Description: cytochrome P450, putative
  misc_feature (1)..(500): Homolog of NCBI NO: 15225914 NR Description: cytochrome P450, putative
  misc_feature (1)..(499): Homolog of NCBI NO: 26449891 NR Description: unknown protein [Arabidopsis thaliana]
  misc_feature (1)..(499): Homolog of NCBI NO: 15223436 NR Description: cytochrome P450, putative; protein id:
  misc_feature (1)..(495): Homolog of NCBI NO: 18650607 NR Description: AT4g00360/A_IG005I10_21 [Arabidopsis thaliana]
  misc_feature (1)..(495): Homolog of NCBI NO: 15236789 NR Description: cytochrome p450, putative
  misc_feature (1)..(502): Homolog of NCBI NO: 10442763 NR Description: cytochrome P450 [Triticum aestivum]
  misc_feature (1)..(493): Homolog of NCBI NO: 7430725 NR Description: cytochrome P450 CYP86A1 - Arabidopsis thaliana
  misc_feature (1)..(493): Homolog of NCBI NO: 15237768 NR Description: cytochrome p450 family
  misc_feature (1)..(493): Homolog of NCBI NO: 19698839 NR Description: cytochrome P450 [Arabidopsis thaliana]
MYMVWFWALTRGLSGPRMWPLVGSLPSVVLNRARVHDWIVDNLRSTGEAATYQTCILPMPFLARRQGLVTVTCNPRNLEHILRVRFDNYPKGPMWQAAFHDLLGQGIFNSDGETWLLQRKTAALEFTTRTLRQAMARWANRIIKYRLWSILADRCEAAASVDLQDLLLRLTFDNICGLTFGKDPETLSPGLQENPFANAFDSATEATLQRFLFPSFLWRVKKALGVGSERSLRESLATVDQYMTEAIAARKATPSDDLLSRFMKKRDGSGRAFPEDVLQWVALNFVLAGRDTSSVALSWFFWMLMLRRDVERKVVLEIVSVVRETRGDDRRRWTEEPLDFDELDRLVYLKAALAETLRLYPSVPQDSKYVVEDDVLPDGTVVPAGSAVTYSIYSVGRMESIWGKDCAEFRPERWLSADGTRFEPPKDAYRFVAFNGGPRTCLGKDLAYLQMKSIASAVLLRHSVELVPGHKVEQKMSLTLFMKSGLRVHVKPRDLAGYVAAPEDAPQLGAFVIPTTTAAAA

SEQ ID NO: 2396 - protein, 519 aa, Zea mays subsp. mays
  peptide (1)..(519): Ceres Seq. ID no. 12355928
  misc_feature (1)..(493): Homolog of NCBI NO: 15222515 NR Description: cytochrome P450, putative
  misc_feature (1)..(498): Homolog of NCBI NO: 15225914 NR Description: cytochrome P450, putative
  misc_feature (1)..(497): Homolog of NCBI NO: 26449891 NR Description: unknown protein [Arabidopsis thaliana]
  misc_feature (1)..(497): Homolog of NCBI NO: 15223436 NR Description: cytochrome P450, putative; protein id:
  misc_feature (1)..(493): Homolog of NCBI NO: 18650607 NR Description: AT4g00360/A_IG005I10_21 [Arabidopsis thaliana]
  misc_feature (1)..(493): Homolog of NCBI NO: 15236789 NR Description: cytochrome p450, putative
  misc_feature (1)..(500): Homolog of NCBI NO: 10442763 NR Description: cytochrome P450 [Triticum aestivum]
  misc_feature (1)..(491): Homolog of NCBI NO: 7430725 NR Description: cytochrome P450 CYP86A1 - Arabidopsis thaliana
  misc_feature (1)..(491): Homolog of NCBI NO: 15237768 NR Description: cytochrome p450 family
  misc_feature (1)..(491): Homolog of NCBI NO: 19698839 NR Description: cytochrome P450 [Arabidopsis thaliana]
MVWFWALTRGLSGPRMWPLVGSLPSVVLNRARVHDWIVDNLRSTGEAATYQTCILPMPFLARRQGLVTVTCNPRNLEHILRVRFDNYPKGPMWQAAFHDLLGQGIFNSDGETWLLQRKTAALEFTTRTLRQAMARWANRIIKYRLWSILADRCEAAASVDLQDLLLRLTFDNICGLTFGKDPETLSPGLQENPFANAFDSATEATLQRFLFPSFLWRVKKALGVGSERSLRESLATVDQYMTEAIAARKATPSDDLLSRFMKKRDGSGRAFPEDVLQWVALNFVLAGRDTSSVALSWFFWMLMLRRDVERKVVLEIVSVVRETRGDDRRRWTEEPLDFDELDRLVYLKAALAETLRLYPSVPQDSKYVVEDDVLPDGTVVPAGSAVTYSIYSVGRMESIWGKDCAEFRPERWLSADGTRFEPPKDAYRFVAFNGGPRTCLGKDLAYLQMKSIASAVLLRHSVELVPGHKVEQKMSLTLFMKSGLRVHVKPRDLAGYVAAPEDAPQLGAFVIPTTTAAAA

SEQ ID NO: 2397 - DNA, 1090 bp, Zea mays subsp. mays
  misc_feature (1)..(1090): Ceres Seq. ID no. 12387248
  misc_feature: MA Experiment ID: 108535 Result: Up-regulated in Transcription
  misc_feature: MA Experiment 108535 PARAMETER Experiment Name: Zm_Meristem_P Parameter: Age (day) Value: 8
  misc_feature: MA Experiment 108535 PARAMETER Experiment Name: Zm_Meristem_P Parameter: Organism Value: Zea mays
  misc_feature: MA Experiment 108535 PARAMETER Experiment Name: Zm_Meristem_P Parameter: Plant Line Value: 35A19
  misc_feature: MA Experiment 108535 PARAMETER Experiment Name: Zm_Meristem_P Parameter: Tissue Value: Root Meristem vs. Above Root Meristem
  misc_feature: MA Experiment ID: 108556 Result: Down-regulated in Transcription
  misc_feature: MA Experiment 108556 PARAMETER Experiment Name: Zm_Drought_P Parameter: Age (day) Value: 9
  misc_feature: MA Experiment 108556 PARAMETER Experiment Name: Zm_Drought_P Parameter: Organism Value: Zea mays
  misc_feature: MA Experiment 108556 PARAMETER Experiment Name: Zm_Drought_P Parameter: Plant Line Value: 35A19
  misc_feature: MA Experiment 108556 PARAMETER Experiment Name: Zm_Drought_P Parameter: Timepoint (hr) Value: 24
  misc_feature: MA Experiment 108556 PARAMETER Experiment Name: Zm_Drought_P Parameter: Tissue Value: Aerial
  misc_feature: MA Experiment 108556 PARAMETER Experiment Name: Zm_Drought_P Parameter: Treatment Value: Drought vs. No Drought
  misc_feature: MA Experiment ID: 20000108 Result: Up-regulated in Transcription
  misc_feature: MA Experiment 20000108 PARAMETER Experiment Name: Zm_Root-Tips_P Parameter: Age (day) Value: 12
  misc_feature: MA Experiment 20000108 PARAMETER Experiment Name: Zm_Root-Tips_P Parameter: Organism Value: Zea mays
  misc_feature: MA Experiment 20000108 PARAMETER Experiment Name: Zm_Root-Tips_P Parameter: Tissue Value: Root tips vs. Root mid region    35
  misc_feature: MA Experiment 20000108 PARAMETER Experiment Name: Zm_Root-Tips_P Parameter: Tissue Value: Root tips vs. Root mid region   Sequence Listing-Misc Features (4)
aatcagatgtcatactggggtctaaaaagattgaggctcctgtattatttcgtggaattggacacacggctaatccatcaaacagtttggttctgaaagtcctatctgcctctccatcagcatactcagctaacccaaagactaagttatcgttgcctccatcgcttactgggtcagctatatcactggtttcggttatgcaggcaagaaataatgctcgggtgctgctatctggatcacttgatctttttagcaaccggttcctgaagtctggtgttcaaaaggctggtagcaaaacgagatacgagagagctggaaatgagcaatttgtgacagagacaagcaaatgggtcttccatgagagggggcaccttaaggctgttaatgttaagcaccacaaggttggggagaccaatgaaccaggcatgtaccgcattaacgatgacctggaatactctgttgagatctatgaatggtctggaacaagctggaagccatatgttgctgatgatgtgcaactccagtttttcatgatgagtccttatgttctgaaaactatgtcgaatgacaacaagggtttatactcaacatccttcaaagttcctgatgtctacggagttttccagttcaaagttgagtaccagaggctgggatatactggtttgtcttttacaaagcagattccagtgcgcccttacaggcataacgagtatgagaggttcataacatcagcgtacccatactacactgcctcattttcaacgatgtgtgctttcttcatattctcgcttgtgtacctgtaccacaaataaaggactcacgggagcgcacaagtttctggaggctgctgatgcgacctagatctgtggccaagtgttacccggtgcaattttatggaatcatatatttgtagtaggccaacttagctagaattagacgaccgtgaccgcaatcatgggaaatttactcgtgctagtaggatgttcgatctgccccacaattttttgttttcggatccttctgatcagcacttgtgaaaacgtttacagtctgtagcattgaaaggatgatgaagcatgtagtgattttg

SEQ ID NO: 2398 - protein, 269 aa, Zea mays subsp. mays
  peptide (1)..(269): Ceres Seq. ID no. 12387249
  misc_feature (1)..(269): Pfam Name: Dolichyl-diphosphooligosaccharide-protein Pfam Description: Dolichyl-diphosphooligosaccharide-protein
  misc_feature (4)..(269): Homolog of NCBI NO: 20070197 NR Description: dolichyl-diphosphooligosaccharide-protein
  misc_feature (4)..(269): Homolog of NCBI NO: 627424 NR Description: dolichyl-diphosphooligosaccharide-protein
  misc_feature (1)..(269): Homolog of NCBI NO: 8843726 NR Description: dolichyl-di-phosphooligosaccharide-protein
  misc_feature (1)..(269): Homolog of NCBI NO: 14334506 NR Description: putative
  misc_feature (4)..(269): Homolog of NCBI NO: 21104416 NR Description: dolichyl-diphosphooligosaccharide-protein
  misc_feature (4)..(269): Homolog of NCBI NO: 1352649 NR Description: Dolichyl-diphosphooligosaccharide--protein
  misc_feature (4)..(269): Homolog of NCBI NO: 30584753 NR Description: Homo sapiens
  misc_feature (1)..(269): Homolog of NCBI NO: 21553942 NR Description: dolichyl-di-phosphooligosaccharide-protein
  misc_feature (1)..(269): Homolog of NCBI NO: 18425101 NR Description: dolichyl-di-phosphooligosaccharide-protein
  misc_feature (1)..(269): Homolog of NCBI NO: 38175467 NR Description: putative dolichyl-di-phosphooligosaccharide-
SDVILGSKKIEAPVLFRGIGHTANPSNSLVLKVLSASPSAYSANPKTKLSLPPSLTGSAISLVSVMQARNNARVLLSGSLDLFSNRFLKSGVQKAGSKTRYERAGNEQFVTETSKWVFHERGHLKAVNVKHHKVGETNEPGMYRINDDLEYSVEIYEWSGTSWKPYVADDVQLQFFMMSPYVLKTMSNDNKGLYSTSFKVPDVYGVFQFKVEYQRLGYTGLSFTKQIPVRPYRHNEYERFITSAYPYYTASFSTMCAFFIFSLVYLYHK

SEQ ID NO: 2399 - protein, 204 aa, Zea mays subsp. mays
  peptide (1)..(204): Ceres Seq. ID no. 12387250
  misc_feature (1)..(204): Pfam Name: Dolichyl-diphosphooligosaccharide-protein Pfam Description: Dolichyl-diphosphooligosaccharide-protein
  misc_feature (1)..(204): Homolog of NCBI NO: 1352649 NR Description: Dolichyl-diphosphooligosaccharide--protein
  misc_feature (1)..(204): Homolog of NCBI NO: 20070197 NR Description: dolichyl-diphosphooligosaccharide-protein
  misc_feature (1)..(204): Homolog of NCBI NO: 21104416 NR Description: dolichyl-diphosphooligosaccharide-protein
  misc_feature (1)..(204): Homolog of NCBI NO: 30584753 NR Description: Homo sapiens
  misc_feature (1)..(204): Homolog of NCBI NO: 627424 NR Description: dolichyl-diphosphooligosaccharide-protein
  misc_feature (1)..(204): Homolog of NCBI NO: 8843726 NR Description: dolichyl-di-phosphooligosaccharide-protein
  misc_feature (1)..(204): Homolog of NCBI NO: 14334506 NR Description: putative
  misc_feature (1)..(204): Homolog of NCBI NO: 21553942 NR Description: dolichyl-di-phosphooligosaccharide-protein
  misc_feature (1)..(204): Homolog of NCBI NO: 18425101 NR Description: dolichyl-di-phosphooligosaccharide-protein
  misc_feature (1)..(204): Homolog of NCBI NO: 38175467 NR Description: putative dolichyl-di-phosphooligosaccharide-
MQARNNARVLLSGSLDLFSNRFLKSGVQKAGSKTRYERAGNEQFVTETSKWVFHERGHLKAVNVKHHKVGETNEPGMYRINDDLEYSVEIYEWSGTSWKPYVADDVQLQFFMMSPYVLKTMSNDNKGLYSTSFKVPDVYGVFQFKVEYQRLGYTGLSFTKQIPVRPYRHNEYERFITSAYPYYTASFSTMCAFFIFSLVYLYHK

SEQ ID NO: 2400 - DNA, 1056 bp, Zea mays subsp. mays
  misc_feature (1)..(1056): Ceres Seq. ID no. 12340732
  misc_feature: MA Experiment ID: 108515 Result: Down-regulated in Transcription
  misc_feature: MA Experiment 108515 PARAMETER Experiment Name: Zm_2mM_SA_P Parameter: Age (day) Value: 8
  misc_feature: MA Experiment 108515 PARAMETER Experiment Name: Zm_2mM_SA_P Parameter: Organism Value: Zea mays
  misc_feature: MA Experiment 108515 PARAMETER Experiment Name: Zm_2mM_SA_P Parameter: Plant Line Value: 35A19
  misc_feature: MA Experiment 108515 PARAMETER Experiment Name: Zm_2mM_SA_P Parameter: Timepoint (hr) Value: 12
  misc_feature: MA Experiment 108515 PARAMETER Experiment Name: Zm_2mM_SA_P Parameter: Tissue Value: Aerial
  misc_feature: MA Experiment 108515 PARAMETER Experiment Name: Zm_2mM_SA_P Parameter: Treatment Value: 2mM SA vs. No Treatment
  misc_feature: MA Experiment ID: 108523 Result: Down-regulated in Transcription
  misc_feature: MA Experiment 108523 PARAMETER Experiment Name: Zm_42deg_Heat_P Parameter: Age (day) Value: 8
  misc_feature: MA Experiment 108523 PARAMETER Experiment Name: Zm_42deg_Heat_P Parameter: Organism Value: Zea mays
  misc_feature: MA Experiment 108523 PARAMETER Experiment Name: Zm_42deg_Heat_P Parameter: Plant Line Value: 35A19
  misc_feature: MA Experiment 108523 PARAMETER Experiment Name: Zm_42deg_Heat_P Parameter: Temperature (deg C) Value: 42 vs. 22
  misc_feature: MA Experiment 108523 PARAMETER Experiment Name: Zm_42deg_Heat_P Parameter: Timepoint (hr) Value: 6
  misc_feature: MA Experiment 108523 PARAMETER Experiment Name: Zm_42deg_Heat_P Parameter: Tissue Value: Aerial
  misc_feature: MA Experiment ID: 108544 Result: Down-regulated in Transcription
  misc_feature: MA Experiment ID: 108545 Result: Up-regulated in Transcription
  misc_feature: MA Experiment 108545 PARAMETER Experiment Name: Zm_Imbibed_Seeds_P Parameter: Age (day) Value: 3 vs. 2
  misc_feature: MA Experiment 108545 PARAMETER Experiment Name: Zm_Imbibed_Seeds_P Parameter: Organism Value: Zea mays
  misc_feature: MA Experiment 108545 PARAMETER Experiment Name: Zm_Imbibed_Seeds_P Parameter: Plant Line Value: 35A19
  misc_feature: MA Experiment 108545 PARAMETER Experiment Name: Zm_Imbibed_Seeds_P Parameter: Tissue Value: Aerial vs. Embryo
  misc_feature: MA Experiment ID: 108546 Result: Down-regulated in Transcription
  misc_feature: MA Experiment 108546 PARAMETER Experiment Name: Zm_Imbibed_Seeds_P Parameter: Age (day) Value: 3 vs. 2
  misc_feature: MA Experiment 108546 PARAMETER Experiment Name: Zm_Imbibed_Seeds_P Parameter: Organism Value: Zea mays
  misc_feature: MA Experiment 108546 PARAMETER Experiment Name: Zm_Imbibed_Seeds_P Parameter: Plant Line Value: 35A19
  misc_feature: MA Experiment 108546 PARAMETER Experiment Name: Zm_Imbibed_Seeds_P Parameter: Tissue Value: Roots vs. Embryo
  misc_feature: MA Experiment ID: 108556 Result: Down-regulated in Transcription
  misc_feature: MA Experiment 108556 PARAMETER Experiment Name: Zm_Drought_P Parameter: Age (day) Value: 9
  misc_feature: MA Experiment 108556 PARAMETER Experiment Name: Zm_Drought_P Parameter: Organism Value: Zea mays
  misc_feature: MA Experiment 108556 PARAMETER Experiment Name: Zm_Drought_P Parameter: Plant Line Value: 35A19
  misc_feature: MA Experiment 108556 PARAMETER Experiment Name: Zm_Drought_P Parameter: Timepoint (hr) Value: 24
  misc_feature: MA Experiment 108556 PARAMETER Experiment Name: Zm_Drought_P Parameter: Tissue Value: Aerial
  misc_feature: MA Experiment 108556 PARAMETER Experiment Name: Zm_Drought_P Parameter: Treatment Value: Drought vs. No Drought
  misc_feature: MA Experiment ID: 108597 Result: Down-regulated in Transcription
  misc_feature: MA Experiment 108597 PARAMETER Experiment Name: Zm_100uM_ABA_P Parameter: Age (day) Value: 9
  misc_feature: MA Experiment 108597 PARAMETER Experiment Name: Zm_100uM_ABA_P Parameter: Organism Value: Zea mays
  misc_feature: MA Experiment 108597 PARAMETER Experiment Name: Zm_100uM_ABA_P Parameter: Plant Line Value: 35A19
  misc_feature: MA Experiment 108597 PARAMETER Experiment Name: Zm_100uM_ABA_P Parameter: Timepoint (hr) Value: 24
  misc_feature: MA Experiment 108597 PARAMETER Experiment Name: Zm_100uM_ABA_P Parameter: Tissue Value: Aerial
  misc_feature: MA Experiment 108597 PARAMETER Experiment Name: Zm_100uM_ABA_P Parameter: Treatment Value: 100uM ABA vs. No Treatment
  misc_feature: MA Experiment ID: 20000477 Result: Down-regulated in Transcription
  misc_feature: MA Experiment 20000477 PARAMETER Experiment Name: Zm_5mM_SA_P Parameter: Age (day) Value: 10
  misc_feature: MA Experiment 20000477 PARAMETER Experiment Name: Zm_5mM_SA_P Parameter: Organism Value: Zea mays
  misc_feature: MA Experiment 20000477 PARAMETER Experiment Name: Zm_5mM_SA_P Parameter: Plant Line Value: 35A19
  misc_feature: MA Experiment 20000477 PARAMETER Experiment Name: Zm_5mM_SA_P Parameter: Timepoint (hr) Value: 48
  misc_feature: MA Experiment 20000477 PARAMETER Experiment Name: Zm_5mM_SA_P Parameter: Tissue Value: Aerial
  misc_feature: MA Experiment 20000477 PARAMETER Experiment Name: Zm_5mM_SA_P Parameter: Treatment Value: 5mM SA vs. No Treatment
  misc_feature: MA Experiment ID: 20000478 Result: Down-regulated in Transcription
  misc_feature: MA Experiment 20000478 PARAMETER Experiment Name: Zm_5mM_SA_P Parameter: Age (day) Value: 11
  misc_feature: MA Experiment 20000478 PARAMETER Experiment Name: Zm_5mM_SA_P Parameter: Organism Value: Zea mays
  misc_feature: MA Experiment 20000478 PARAMETER Experiment Name: Zm_5mM_SA_P Parameter: Plant Line Value: 35A19
  misc_feature: MA Experiment 20000478 PARAMETER Experiment Name: Zm_5mM_SA_P Parameter: Timepoint (hr) Value: 72
  misc_feature: MA Experiment 20000478 PARAMETER Experiment Name: Zm_5mM_SA_P Parameter: Tissue Value: Aerial
  misc_feature: MA Experiment 20000478 PARAMETER Experiment Name: Zm_5mM_SA_P Parameter: Treatment Value: 5mM SA vs. No Treatment
  misc_feature: MA Experiment ID: 20000480 Result: Down-regulated in Transcription
  misc_feature: MA Experiment 20000480 PARAMETER Experiment Name: Zm_Drought_P Parameter: Age (day) Value: 11
  misc_feature: MA Experiment 20000480 PARAMETER Experiment Name: Zm_Drought_P Parameter: Organism Value: Zea mays
  misc_feature: MA Experiment 20000480 PARAMETER Experiment Name: Zm_Drought_P Parameter: Plant Line Value: 35A19
  misc_feature: MA Experiment 20000480 PARAMETER Experiment Name: Zm_Drought_P Parameter: Timepoint (hr) Value: 72
  misc_feature: MA Experiment 20000480 PARAMETER Experiment Name: Zm_Drought_P Parameter: Tissue Value: Aerial
  misc_feature: MA Experiment 20000480 PARAMETER Experiment Name: Zm_Drought_P Parameter: Treatment Value: Drought vs. No Drought
  misc_feature: MA Experiment ID: 20000535 Result: Up-regulated in Transcription
  misc_feature: MA Experiment 20000535 PARAMETER Experiment Name: Zm_Hybrid_Seed_Dev_P Parameter: DAP Value: 30 vs. 12
  misc_feature: MA Experiment 20000535 PARAMETER Experiment Name: Zm_Hybrid_Seed_Dev_P Parameter: Organism Value: Zea mays
  misc_feature: MA Experiment 20000535 PARAMETER Experiment Name: Zm_Hybrid_Seed_Dev_P Parameter: Plant Line Value: 35A19
  misc_feature: MA Experiment 20000535 PARAMETER Experiment Name: Zm_Hybrid_Seed_Dev_P Parameter: Tissue Value: Embryo vs. Unfert Floret
tttttgccttgcctgcctgccttccttctcgtagaagataagcaaagcaaggcaaccgttgtcgttgtctctgttcctccgcttcctgctctcttggcttgctgcttgccctcggagcagtgccttccgccgccgccgccgccgcctgttgtgagaaggagaggccggggctgggaggagatgagcgtgaccaagttcatcaagtgcgtcacggtgggggacggcgcggtgggcaagacctgcatgctcatctgctacaccagcaacaagttccccacggattacatccccacggtgttcgacaacttcagcgccaacgtctccgtggacggcagcatcgtcaacctgggcctctgggacactgcaggacaagaggactacagcagattgcggccactgagctacaggggcgcggacgtgttcgtgctggccttctccttgatcagcagggcgagctatgagaacgtccttaagaagtgggtgccagagcttcgcagattcgcgcccgacgtcccggtcgttcttgtcgggaccaagttagatctccgtgaccacagggcctaccttgctgaccatcctggagcgtcgacgatcacgacggcacagggcgaagaactgaggaggcagatcggcgctgcggcttacatcgagtgcagttccaaaacgcagcagaatgtcaagtcggtcttcgacacagccatcaaagtggtccttcagcccccgcggaggagggaggcgacgcctgccaggaggaagaacaggcgtggctccgggtgctctatcatgaacctcatgtgtggcagcacgtgcgctgcttaggagtctagaacactgatctggaaggaggtgaaggtgaaggcatggtgtctatgtgctatggcgactggcaagttaatggggccgcatggatgactgctgctcttgtttttttaagctcgtctgccgtatgctttgtttttttaggcttcaaggactgacaattgcaagaatgcagtgtttatgtaagaggttgtttgctggaataggattgctgtaactgtaatgttgttctccgag

SEQ ID NO: 2401 - protein, 272 aa, Zea mays subsp. mays
  peptide (1)..(272): Ceres Seq. ID no. 12340733
  misc_feature (68)..(239): Pfam Name: Ras family Pfam Description: Ras family
  misc_feature (53)..(262): Homolog of NCBI NO: 27527525 NR Description: putative rac protein [Nicotiana tabacum]
  misc_feature (62)..(267): Homolog of NCBI NO: 7262647 NR Description: Rac-like protein Rop1 [Tradescantia virginiana]
  misc_feature (62)..(272): Homolog of NCBI NO: 38502278 NR Description: RAC-ROP-like G-protein [Hordeum vulgare subsp.
  misc_feature (62)..(272): Homolog of NCBI NO: 34904284 NR Description: unnamed protein product [Oryza sativa (japonica
  misc_feature (62)..(270): Homolog of NCBI NO: 11274346 NR Description: racC protein - maize
  misc_feature (61)..(272): Homolog of NCBI NO: 15235495 NR Description: rac GTP binding protein Arac7
  misc_feature (64)..(270): Homolog of NCBI NO: 5902928 NR Description: small GTP-binding protein OsRac2 [Oryza sativa]
  misc_feature (61)..(272): Homolog of NCBI NO: 38524281 NR Description: putative ROP6 protein [Hordeum vulgare subsp.
  misc_feature (61)..(272): Homolog of NCBI NO: 8979882 NR Description: putative Rop family GTPase, ROP6 [Zea mays]
  misc_feature (61)..(272): Homolog of NCBI NO: 8979880 NR Description: putative Rop family GTPase, ROP7 [Zea mays]
FLPCLPAFLLVEDKQSKATVVVVSVPPLPALLACCLPSEQCLPPPPPPPVVRRRGRGWEEMSVTKFIKCVTVGDGAVGKTCMLICYTSNKFPTDYIPTVFDNFSANVSVDGSIVNLGLWDTAGQEDYSRLRPLSYRGADVFVLAFSLISRASYENVLKKWVPELRRFAPDVPVVLVGTKLDLRDHRAYLADHPGASTITTAQGEELRRQIGAAAYIECSSKTQQNVKSVFDTAIKVVLQPPRRREATPARRKNRRGSGCSIMNLMCGSTCAA

SEQ ID NO: 2402 - protein, 212 aa, Zea mays subsp. mays
  peptide (1)..(212): Ceres Seq. ID no. 12340734
  misc_feature (8)..(179): Pfam Name: Ras family Pfam Description: Ras family
  misc_feature (1)..(202): Homolog of NCBI NO: 27527525 NR Description: putative rac protein [Nicotiana tabacum]
  misc_feature (2)..(207): Homolog of NCBI NO: 7262647 NR Description: Rac-like protein Rop1 [Tradescantia virginiana]
  misc_feature (2)..(212): Homolog of NCBI NO: 38502278 NR Description: RAC-ROP-like G-protein [Hordeum vulgare subsp.
  misc_feature (2)..(212): Homolog of NCBI NO: 34904284 NR Description: unnamed protein product [Oryza sativa (japonica
  misc_feature (2)..(210): Homolog of NCBI NO: 11274346 NR Description: racC protein - maize
  misc_feature (1)..(212): Homolog of NCBI NO: 15235495 NR Description: rac GTP binding protein Arac7
  misc_feature (4)..(210): Homolog of NCBI NO: 5902928 NR Description: small GTP-binding protein OsRac2 [Oryza sativa]
  misc_feature (1)..(212): Homolog of NCBI NO: 38524281 NR Description: putative ROP6 protein [Hordeum vulgare subsp.
  misc_feature (1)..(212): Homolog of NCBI NO: 8979882 NR Description: putative Rop family GTPase, ROP6 [Zea mays]
  misc_feature (1)..(212): Homolog of NCBI NO: 8979880 NR Description: putative Rop family GTPase, ROP7 [Zea mays]
MSVTKFIKCVTVGDGAVGKTCMLICYTSNKFPTDYIPTVFDNFSANVSVDGSIVNLGLWDTAGQEDYSRLRPLSYRGADVFVLAFSLISRASYENVLKKWVPELRRFAPDVPVVLVGTKLDLRDHRAYLADHPGASTITTAQGEELRRQIGAAAYIECSSKTQQNVKSVFDTAIKVVLQPPRRREATPARRKNRRGSGCSIMNLMCGSTCAA

SEQ ID NO: 2403 - protein, 191 aa, Zea mays subsp. mays
  peptide (1)..(191): Ceres Seq. ID no. 12340735
  misc_feature (1)..(158): Pfam Name: Ras family Pfam Description: Ras family
  misc_feature (1)..(181): Homolog of NCBI NO: 27527525 NR Description: putative rac protein [Nicotiana tabacum]
  misc_feature (1)..(186): Homolog of NCBI NO: 7262647 NR Description: Rac-like protein Rop1 [Tradescantia virginiana]
  misc_feature (1)..(191): Homolog of NCBI NO: 38502278 NR Description: RAC-ROP-like G-protein [Hordeum vulgare subsp.
  misc_feature (1)..(191): Homolog of NCBI NO: 34904284 NR Description: unnamed protein product [Oryza sativa (japonica
  misc_feature (1)..(189): Homolog of NCBI NO: 11274346 NR Description: racC protein - maize
  misc_feature (1)..(191): Homolog of NCBI NO: 15235495 NR Description: rac GTP binding protein Arac7
  misc_feature (1)..(189): Homolog of NCBI NO: 5902928 NR Description: small GTP-binding protein OsRac2 [Oryza sativa]
  misc_feature (1)..(191): Homolog of NCBI NO: 38524281 NR Description: putative ROP6 protein [Hordeum vulgare subsp.
  misc_feature (1)..(191): Homolog of NCBI NO: 8979882 NR Description: putative Rop family GTPase, ROP6 [Zea mays]
  misc_feature (1)..(191): Homolog of NCBI NO: 8979880 NR Description: putative Rop family GTPase, ROP7 [Zea mays]
MLICYTSNKFPTDYIPTVFDNFSANVSVDGSIVNLGLWDTAGQEDYSRLRPLSYRGADVFVLAFSLISRASYENVLKKWVPELRRFAPDVPVVLVGTKLDLRDHRAYLADHPGASTITTAQGEELRRQIGAAAYIECSSKTQQNVKSVFDTAIKVVLQPPRRREATPARRKNRRGSGCSIMNLMCGSTCAA

SEQ ID NO: 2404 - DNA, 1312 bp, Zea mays subsp. mays
  misc_feature (1)..(1312): Ceres Seq. ID no. 12349927
  misc_feature: MA Experiment ID: 108523 Result: Down-regulated in Transcription
  misc_feature: MA Experiment 108523 PARAMETER Experiment Name: Zm_42deg_Heat_P Parameter: Age (day) Value: 8
  misc_feature: MA Experiment 108523 PARAMETER Experiment Name: Zm_42deg_Heat_P Parameter: Organism Value: Zea mays
  misc_feature: MA Experiment 108523 PARAMETER Experiment Name: Zm_42deg_Heat_P Parameter: Plant Line Value: 35A19
  misc_feature: MA Experiment 108523 PARAMETER Experiment Name: Zm_42deg_Heat_P Parameter: Temperature (deg C) Value: 42 vs. 22
  misc_feature: MA Experiment 108523 PARAMETER Experiment Name: Zm_42deg_Heat_P Parameter: Timepoint (hr) Value: 6
  misc_feature: MA Experiment 108523 PARAMETER Experiment Name: Zm_42deg_Heat_P Parameter: Tissue Value: Aerial
  misc_feature: MA Experiment ID: 108527 Result: Down-regulated in Transcription
  misc_feature: MA Experiment 108527 PARAMETER Experiment Name: Zm_5mM_NO_P Parameter: Age (day) Value: 8
  misc_feature: MA Experiment 108527 PARAMETER Experiment Name: Zm_5mM_NO_P Parameter: Organism Value: Zea mays
  misc_feature: MA Experiment 108527 PARAMETER Experiment Name: Zm_5mM_NO_P Parameter: Plant Line Value: 35A19
  misc_feature: MA Experiment 108527 PARAMETER Experiment Name: Zm_5mM_NO_P Parameter: Timepoint (hr) Value: 6
  misc_feature: MA Experiment 108527 PARAMETER Experiment Name: Zm_5mM_NO_P Parameter: Tissue Value: Aerial
  misc_feature: MA Experiment 108527 PARAMETER Experiment Name: Zm_5mM_NO_P Parameter: Treatment Value: 5mM NO vs. No Treatment
  misc_feature: MA Experiment ID: 108536 Result: Down-regulated in Transcription
  misc_feature: MA Experiment 108536 PARAMETER Experiment Name: Zm_Meristem_P Parameter: Age (day) Value: 8
  misc_feature: MA Experiment 108536 PARAMETER Experiment Name: Zm_Meristem_P Parameter: Organism Value: Zea mays
  misc_feature: MA Experiment 108536 PARAMETER Experiment Name: Zm_Meristem_P Parameter: Plant Line Value: 35A19
  misc_feature: MA Experiment 108536 PARAMETER Experiment Name: Zm_Meristem_P Parameter: Tissue Value: Shoot Meristem vs. Above Shoot Meristem
  misc_feature: MA Experiment ID: 108544 Result: Up-regulated in Transcription
  misc_feature: MA Experiment ID: 108559 Result: Down-regulated in Transcription
  misc_feature: MA Experiment 108559 PARAMETER Experiment Name: Zm_5mM_NO_P Parameter: Age (day) Value: 8
  misc_feature: MA Experiment 108559 PARAMETER Experiment Name: Zm_5mM_NO_P Parameter: Organism Value: Zea mays
  misc_feature: MA Experiment 108559 PARAMETER Experiment Name: Zm_5mM_NO_P Parameter: Plant Line Value: 35A19
  misc_feature: MA Experiment 108559 PARAMETER Experiment Name: Zm_5mM_NO_P Parameter: Timepoint (hr) Value: 12
  misc_feature: MA Experiment 108559 PARAMETER Experiment Name: Zm_5mM_NO_P Parameter: Tissue Value: Aerial
  misc_feature: MA Experiment 108559 PARAMETER Experiment Name: Zm_5mM_NO_P Parameter: Treatment Value: 5mM NO vs. No Treatment
agtcactaggctacgaaacagtgccgcggtgcgcgcacacacagccgccacagcccagacccctcgcctcggcctcttttaaatatcgcgcattccggcgccgcaaatggctcacgcggcgctgctccattgctcccagtcctccaggagcctcgcagcctgccgccgcggcagccactaccccgccccttcgcacgtcccgcgccactcccgccgtcgccgacgcgccgtcgtcagcctgcgtccgatggcctcgtcgacggctcaggcccccgcgacggcgccgccgggtctgaaggagggcatcgcggggctgtacgacgagtcgtcagggctgtgggagaacatctggggcgaccacatgcaccacggcttctacgactcgagcgaggccgcctccatggccgatcaccgccgcgcccagatccgcatgatcgaggaggcgctcgccttcgccggcgtcccagcctcagatgatccagagaatacaccaaaaacaatagtcgatgtcggatgtggcattggtggtagttcaaggtacttggcgaagaaatacggagcgcagtgcacggggatcacgttgagccctgttcaagccgagagaggaaatgctctcgctggagcgcaggggttgtcggatcaggttactctgcaagttgctgatgctctggagcaaccgtttcctgacgggcagttcgatctggtgtggtccatggagagtggcgagcacatgccggacaagagaaagtttgttagtgagctagcacgcgtggcggctcctggagggacaataatcatcgtgacatggtgccataggaacctggatccatccgaaacctcgctaaagcccgatgaactgagcctcctgaagagaatatgcgacgcgtactacctcccggactggtgctcaccttcagactatgtgaacattgccaagtcactgtctctcgaggatatcaagacagctgactggtcggagaacgtggccccgttttggcccgccgtgataaaatcagcgctaacatggaagggcttcacctctctgctgacgaccggatggaagacgatcagaggcgcgatggtgatgccgctaatgatccagggctacaagaagggcctcatcaaattcaccatcatcacctgtcgcaagcctggagccgcgtaggaggaggccaaggagcaggagttacaggcacaggcacaggagtgccaagtgcaataatgtagatccgtggccccatcgccgtctactcatctgtactgcaccaaaatcaacattctcctaggacatgttaaataattttctgccacc

SEQ ID NO: 2405 - protein, 352 aa, Zea mays subsp. mays
  peptide (1)..(352): Ceres Seq. ID no. 12349928
  misc_feature (44)..(349): Homolog of NCBI NO: 16331764 NR Description: delta(24)-sterol C-methyltransferase
  misc_feature (63)..(348): Homolog of NCBI NO: 23039419 NR Description: hypothetical protein [Trichodesmium erythraeum
  misc_feature (63)..(344): Homolog of NCBI NO: 17229295 NR Description: gamma-tocopherol methyltransferase [Nostoc sp.
  misc_feature (63)..(348): Homolog of NCBI NO: 23128517 NR Description: hypothetical protein [Nostoc punctiforme]
  misc_feature (43)..(349): Homolog of NCBI NO: 21592747 NR Description: gamma-tocopherol methyltransferase [Arabidopsis
  misc_feature (43)..(349): Homolog of NCBI NO: 15217804 NR Description: gamma-tocopherol methyltransferase
  misc_feature (46)..(349): Homolog of NCBI NO: 27448218 NR Description: gamma-tocopherol methyltransferase [Brassica
  misc_feature (43)..(349): Homolog of NCBI NO: 24211769 NR Description: Tocopherol O-methyltransferase, chloroplast
  misc_feature (37)..(351): Homolog of NCBI NO: 17224292 NR Description: gamma-tocopherol methyltransferase [Perilla
  misc_feature (51)..(350): Homolog of NCBI NO: 22208517 NR Description: putative gamma-tocopherol methyltransferase
MAHAALLHCSQSSRSLAACRRGSHYPAPSHVPRHSRRRRRAVVSLRPMASSTAQAPATAPPGLKEGIAGLYDESSGLWENIWGDHMHHGFYDSSEAASMADHRRAQIRMIEEALAFAGVPASDDPENTPKTIVDVGCGIGGSSRYLAKKYGAQCTGITLSPVQAERGNALAGAQGLSDQVTLQVADALEQPFPDGQFDLVWSMESGEHMPDKRKFVSELARVAAPGGTIIIVTWCHRNLDPSETSLKPDELSLLKRICDAYYLPDWCSPSDYVNIAKSLSLEDIKTADWSENVAPFWPAVIKSALTWKGFTSLLTTGWKTIRGAMVMPLMIQGYKKGLIKFTIITCRKPGAA

SEQ ID NO: 2406 - protein, 305 aa, Zea mays subsp. mays
  peptide (1)..(305): Ceres Seq. ID no. 12349929
  misc_feature (1)..(302): Homolog of NCBI NO: 16331764 NR Description: delta(24)-sterol C-methyltransferase
  misc_feature (16)..(301): Homolog of NCBI NO: 23039419 NR Description: hypothetical protein [Trichodesmium erythraeum
  misc_feature (16)..(297): Homolog of NCBI NO: 17229295 NR Description: gamma-tocopherol methyltransferase [Nostoc sp.
  misc_feature (16)..(301): Homolog of NCBI NO: 23128517 NR Description: hypothetical protein [Nostoc punctiforme]
  misc_feature (1)..(302): Homolog of NCBI NO: 21592747 NR Description: gamma-tocopherol methyltransferase [Arabidopsis
  misc_feature (1)..(302): Homolog of NCBI NO: 15217804 NR Description: gamma-tocopherol methyltransferase
  misc_feature (1)..(302): Homolog of NCBI NO: 27448218 NR Description: gamma-tocopherol methyltransferase [Brassica
  misc_feature (1)..(302): Homolog of NCBI NO: 24211769 NR Description: Tocopherol O-methyltransferase, chloroplast
  misc_feature (1)..(304): Homolog of NCBI NO: 17224292 NR Description: gamma-tocopherol methyltransferase [Perilla
  misc_feature (4)..(303): Homolog of NCBI NO: 22208517 NR Description: putative gamma-tocopherol methyltransferase
MASSTAQAPATAPPGLKEGIAGLYDESSGLWENIWGDHMHHGFYDSSEAASMADHRRAQIRMIEEALAFAGVPASDDPENTPKTIVDVGCGIGGSSRYLAKKYGAQCTGITLSPVQAERGNALAGAQGLSDQVTLQVADALEQPFPDGQFDLVWSMESGEHMPDKRKFVSELARVAAPGGTIIIVTWCHRNLDPSETSLKPDELSLLKRICDAYYLPDWCSPSDYVNIAKSLSLEDIKTADWSENVAPFWPAVIKSALTWKGFTSLLTTGWKTIRGAMVMPLMIQGYKKGLIKFTIITCRKPGAA

SEQ ID NO: 2407 - protein, 267 aa, Zea mays subsp. mays
  peptide (1)..(267): Ceres Seq. ID no. 12349930
  misc_feature (1)..(264): Homolog of NCBI NO: 16331764 NR Description: delta(24)-sterol C-methyltransferase
  misc_feature (1)..(263): Homolog of NCBI NO: 23039419 NR Description: hypothetical protein [Trichodesmium erythraeum
  misc_feature (1)..(259): Homolog of NCBI NO: 17229295 NR Description: gamma-tocopherol methyltransferase [Nostoc sp.
  misc_feature (1)..(263): Homolog of NCBI NO: 23128517 NR Description: hypothetical protein [Nostoc punctiforme]
  misc_feature (1)..(264): Homolog of NCBI NO: 21592747 NR Description: gamma-tocopherol methyltransferase [Arabidopsis
  misc_feature (1)..(264): Homolog of NCBI NO: 15217804 NR Description: gamma-tocopherol methyltransferase
  misc_feature (1)..(264): Homolog of NCBI NO: 27448218 NR Description: gamma-tocopherol methyltransferase [Brassica
  misc_feature (1)..(264): Homolog of NCBI NO: 24211769 NR Description: Tocopherol O-methyltransferase, chloroplast
  misc_feature (1)..(266): Homolog of NCBI NO: 17224292 NR Description: gamma-tocopherol methyltransferase [Perilla
  misc_feature (1)..(265): Homolog of NCBI NO: 22208517 NR Description: putative gamma-tocopherol methyltransferase
MHHGFYDSSEAASMADHRRAQIRMIEEALAFAGVPASDDPENTPKTIVDVGCGIGGSSRYLAKKYGAQCTGITLSPVQAERGNALAGAQGLSDQVTLQVADALEQPFPDGQFDLVWSMESGEHMPDKRKFVSELARVAAPGGTIIIVTWCHRNLDPSETSLKPDELSLLKRICDAYYLPDWCSPSDYVNIAKSLSLEDIKTADWSENVAPFWPAVIKSALTWKGFTSLLTTGWKTIRGAMVMPLMIQGYKKGLIKFTIITCRKPGAA

SEQ ID NO: 2408 - DNA, 1236 bp, Zea mays subsp. mays
  misc_feature (1)..(1236): Ceres Seq. ID no. 12405803
  misc_feature: MA Experiment ID: 108534 Result: Up-regulated in Transcription
  misc_feature: MA Experiment 108534 PARAMETER Experiment Name: Zm_4deg_Cold_P Parameter: Age (hr) Value: 8
  misc_feature: MA Experiment 108534 PARAMETER Experiment Name: Zm_4deg_Cold_P Parameter: Organism Value: Zea mays
  misc_feature: MA Experiment 108534 PARAMETER Experiment Name: Zm_4deg_Cold_P Parameter: Plant Line Value: 35A19
  misc_feature: MA Experiment 108534 PARAMETER Experiment Name: Zm_4deg_Cold_P Parameter: Temperature (deg C) Value: 4 vs. 22
  misc_feature: MA Experiment 108534 PARAMETER Experiment Name: Zm_4deg_Cold_P Parameter: Timepoint (hr) Value: 6
  misc_feature: MA Experiment 108534 PARAMETER Experiment Name: Zm_4deg_Cold_P Parameter: Tissue Value: Aerial
  misc_feature: MA Experiment ID: 20000534 Result: Down-regulated in Transcription
  misc_feature: MA Experiment 20000534 PARAMETER Experiment Name: Zm_Hybrid_Pollen_P Parameter: Age (day) Value: 8
  misc_feature: MA Experiment 20000534 PARAMETER Experiment Name: Zm_Hybrid_Pollen_P Parameter: Organism Value: Zea mays
  misc_feature: MA Experiment 20000534 PARAMETER Experiment Name: Zm_Hybrid_Pollen_P Parameter: Plant Line Value: 35A19
  misc_feature: MA Experiment 20000534 PARAMETER Experiment Name: Zm_Hybrid_Pollen_P Parameter: Tissue Value: Pollen vs. Aerial
aatagaggttactgctctcctgggctgtgaggctgtgaggctgtgaccaaacgctctacgctcccacttcccaccaactcccaaatcctccctgaaaataagaatacgagggtgagcgatcgagcggtcgagggggttgtgcttgtgcgtcagatcaaccgactggtggcgaggctgcgggaggagatggccggcgaagggaatggggatgaagggtggaggcggagcggcatcgaggtcagcgccctgcagttcggctacgacgggcagccgccgctcttcgcgcgcttcaacctctgcgtcgcacccggctcccgctgcctcctcgtcggcgccaacggatcaggcaagaccacactcttgaagattcttgcgggaaagcatatggttggaggaagagatgtggtccgtgtcctcaatggttccgcttttcatgatacacagctagtgtgcaatggtgacctttcgtacttgggtggttcttggagccgtactattggttcagctggggatgttccactgcaaggcgacttctctgctgagcacatgatttttggagttgatggggttgatcctgtcaggcgagagaagctggttgatctgctagacattgatctgcagtggcgcatgcataaagtttcagatgggcagcgccgcagggtgcaaatctgcatgggtcttcttcatccatacaaggtgcttttgctcgatgagatcacggttgatctggacgtggtgaccaggatggacctgcttggtttcttcaaggaagagtgcgagcagagggaagctaccatcgtgtacgccacccatatatttgacggactcgagacgtgggctaccgactttgcgtacatccaagaaggcgagctgagaaggtccgggagatactccgacatcgaggagctaaggagcgccaagaacttgctgtcggtagtcgagtcgtggctgaggtcagagaccaaactcccgaagaaggaacccccaccacgtcctgagacccaggccaggcgttcctcgccgttcgatgcttctcctttccgttcgtcacgccacatggcctactaccgttgatggtttcccaactcgtactacaccattgcctcttgttattttgttgtcactcatatcgtatagtagctgtggagtttaatatgtgtcctcttcacggcccttgtagacatcaatcaatatatagcaggcagcacagaaataaaagtttggttcggttggtct

SEQ ID NO: 2409 - protein, 295 aa, Zea mays subsp. mays
  peptide (1)..(295): Ceres Seq. ID no. 12405804
  misc_feature (42)..(227): Pfam Name: ABC transporter Pfam Description: ABC transporter
  misc_feature (36)..(190): Homolog of NCBI NO: 23509543 NR Description: ABC transporter, putative [Plasmodium falciparum
  misc_feature (36)..(250): Homolog of NCBI NO: 23483625 NR Description: NBD-like protein [Plasmodium yoelii yoelii]
  misc_feature (93)..(258): Homolog of NCBI NO: 40738662 NR Description: hypothetical protein AN6512.2 [Aspergillus
  misc_feature (16)..(245): Homolog of NCBI NO: 14318491 NR Description: CCR4 associated factor; Caf16p [Saccharomyces
  misc_feature (42)..(260): Homolog of NCBI NO: 19115648 NR Description: probable ATP-dependent transporter
  misc_feature (8)..(281): Homolog of NCBI NO: 15241744 NR Description: ABC transporter family protein
  misc_feature (1)..(295): Homolog of NCBI NO: 25406749 NR Description: hypothetical protein [imported] - Arabidopsis
  misc_feature (16)..(295): Homolog of NCBI NO: 21592901 NR Description: NBD-like protein [Arabidopsis thaliana]
  misc_feature (16)..(295): Homolog of NCBI NO: 15240093 NR Description: ABC transporter family protein
  misc_feature (16)..(295): Homolog of NCBI NO: 18379174 NR Description: ABC transporter family protein; protein id:
MAGEGNGDEGWRRSGIEVSALQFGYDGQPPLFARFNLCVAPGSRCLLVGANGSGKTTLLKILAGKHMVGGRDVVRVLNGSAFHDTQLVCNGDLSYLGGSWSRTIGSAGDVPLQGDFSAEHMIFGVDGVDPVRREKLVDLLDIDLQWRMHKVSDGQRRRVQICMGLLHPYKVLLLDEITVDLDVVTRMDLLGFFKEECEQREATIVYATHIFDGLETWATDFAYIQEGELRRSGRYSDIEELRSAKNLLSVVESWLRSETKLPKKEPPPRPETQARRSSPFDASPFRSSRHMAYYR

SEQ ID NO: 2410 - protein, 229 aa, Zea mays subsp. mays
  peptide (1)..(229): Ceres Seq. ID no. 12405805
  misc_feature (1)..(161): Pfam Name: ABC transporter Pfam Description: ABC transporter
  misc_feature (1)..(194): Homolog of NCBI NO: 19115648 NR Description: probable ATP-dependent transporter
  misc_feature (1)..(215): Homolog of NCBI NO: 15241744 NR Description: ABC transporter family protein
  misc_feature (1)..(229): Homolog of NCBI NO: 25406749 NR Description: hypothetical protein [imported] - Arabidopsis
  misc_feature (1)..(124): Homolog of NCBI NO: 23509543 NR Description: ABC transporter, putative [Plasmodium falciparum
  misc_feature (27)..(192): Homolog of NCBI NO: 40738662 NR Description: hypothetical protein AN6512.2 [Aspergillus
  misc_feature (1)..(179): Homolog of NCBI NO: 14318491 NR Description: CCR4 associated factor; Caf16p [Saccharomyces
  misc_feature (1)..(184): Homolog of NCBI NO: 23483625 NR Description: NBD-like protein [Plasmodium yoelii yoelii]
  misc_feature (1)..(229): Homolog of NCBI NO: 21592901 NR Description: NBD-like protein [Arabidopsis thaliana]
  misc_feature (1)..(229): Homolog of NCBI NO: 15240093 NR Description: ABC transporter family protein
  misc_feature (1)..(229): Homolog of NCBI NO: 18379174 NR Description: ABC transporter family protein; protein id:
MVGGRDVVRVLNGSAFHDTQLVCNGDLSYLGGSWSRTIGSAGDVPLQGDFSAEHMIFGVDGVDPVRREKLVDLLDIDLQWRMHKVSDGQRRRVQICMGLLHPYKVLLLDEITVDLDVVTRMDLLGFFKEECEQREATIVYATHIFDGLETWATDFAYIQEGELRRSGRYSDIEELRSAKNLLSVVESWLRSETKLPKKEPPPRPETQARRSSPFDASPFRSSRHMAYYR

SEQ ID NO: 2411 - protein, 175 aa, Zea mays subsp. mays
  peptide (1)..(175): Ceres Seq. ID no. 12405806
  misc_feature (1)..(107): Pfam Name: ABC transporter Pfam Description: ABC transporter
  misc_feature (1)..(70): Homolog of NCBI NO: 23509543 NR Description: ABC transporter, putative [Plasmodium falciparum
  misc_feature (1)..(130): Homolog of NCBI NO: 23483625 NR Description: NBD-like protein [Plasmodium yoelii yoelii]
  misc_feature (1)..(138): Homolog of NCBI NO: 40738662 NR Description: hypothetical protein AN6512.2 [Aspergillus
  misc_feature (1)..(125): Homolog of NCBI NO: 14318491 NR Description: CCR4 associated factor; Caf16p [Saccharomyces
  misc_feature (1)..(140): Homolog of NCBI NO: 19115648 NR Description: probable ATP-dependent transporter
  misc_feature (1)..(161): Homolog of NCBI NO: 15241744 NR Description: ABC transporter family protein
  misc_feature (1)..(175): Homolog of NCBI NO: 25406749 NR Description: hypothetical protein [imported] - Arabidopsis
  misc_feature (1)..(175): Homolog of NCBI NO: 21592901 NR Description: NBD-like protein [Arabidopsis thaliana]
  misc_feature (1)..(175): Homolog of NCBI NO: 15240093 NR Description: ABC transporter family protein
  misc_feature (1)..(175): Homolog of NCBI NO: 18379174 NR Description: ABC transporter family protein; protein id:
MIFGVDGVDPVRREKLVDLLDIDLQWRMHKVSDGQRRRVQICMGLLHPYKVLLLDEITVDLDVVTRMDLLGFFKEECEQREATIVYATHIFDGLETWATDFAYIQEGELRRSGRYSDIEELRSAKNLLSVVESWLRSETKLPKKEPPPRPETQARRSSPFDASPFRSSRHMAYYR

SEQ ID NO: 2412 - DNA, 1179 bp, Zea mays subsp. mays
  misc_feature (1)..(1179): Ceres Seq. ID no. 12381139
  misc_feature: MA Experiment ID: 108503 Result: Up-regulated in Transcription
  misc_feature: MA Experiment 108503 PARAMETER Experiment Name: Zm_Drought_P Parameter: Age (day) Value: 8
  misc_feature: MA Experiment 108503 PARAMETER Experiment Name: Zm_Drought_P Parameter: Organism Value: Zea mays
  misc_feature: MA Experiment 108503 PARAMETER Experiment Name: Zm_Drought_P Parameter: Plant Line Value: 35A19
  misc_feature: MA Experiment 108503 PARAMETER Experiment Name: Zm_Drought_P Parameter: Timepoint (hr) Value: 6
  misc_feature: MA Experiment 108503 PARAMETER Experiment Name: Zm_Drought_P Parameter: Tissue Value: Aerial
  misc_feature: MA Experiment 108503 PARAMETER Experiment Name: Zm_Drought_P Parameter: Treatment Value: Drought vs. No Drought
  misc_feature: MA Experiment ID: 108504 Result: Up-regulated in Transcription
  misc_feature: MA Experiment 108504 PARAMETER Experiment Name: Zm_Drought_P Parameter: Age (day) Value: 8
  misc_feature: MA Experiment 108504 PARAMETER Experiment Name: Zm_Drought_P Parameter: Organism Value: Zea mays
  misc_feature: MA Experiment 108504 PARAMETER Experiment Name: Zm_Drought_P Parameter: Plant Line Value: 35A19
  misc_feature: MA Experiment 108504 PARAMETER Experiment Name: Zm_Drought_P Parameter: Timepoint (hr) Value: 12
  misc_feature: MA Experiment 108504 PARAMETER Experiment Name: Zm_Drought_P Parameter: Tissue Value: Aerial
  misc_feature: MA Experiment 108504 PARAMETER Experiment Name: Zm_Drought_P Parameter: Treatment Value: Drought vs. No Drought
  misc_feature: MA Experiment ID: 108527 Result: Up-regulated in Transcription
  misc_feature: MA Experiment 108527 PARAMETER Experiment Name: Zm_5mM_NO_P Parameter: Age (day) Value: 8
  misc_feature: MA Experiment 108527 PARAMETER Experiment Name: Zm_5mM_NO_P Parameter: Organism Value: Zea mays
  misc_feature: MA Experiment 108527 PARAMETER Experiment Name: Zm_5mM_NO_P Parameter: Plant Line Value: 35A19
  misc_feature: MA Experiment 108527 PARAMETER Experiment Name: Zm_5mM_NO_P Parameter: Timepoint (hr) Value: 6
  misc_feature: MA Experiment 108527 PARAMETER Experiment Name: Zm_5mM_NO_P Parameter: Tissue Value: Aerial
  misc_feature: MA Experiment 108527 PARAMETER Experiment Name: Zm_5mM_NO_P Parameter: Treatment Value: 5mM NO vs. No Treatment
  misc_feature: MA Experiment ID: 108534 Result: Up-regulated in Transcription
  misc_feature: MA Experiment 108534 PARAMETER Experiment Name: Zm_4deg_Cold_P Parameter: Age (hr) Value: 8
  misc_feature: MA Experiment 108534 PARAMETER Experiment Name: Zm_4deg_Cold_P Parameter: Organism Value: Zea mays
  misc_feature: MA Experiment 108534 PARAMETER Experiment Name: Zm_4deg_Cold_P Parameter: Plant Line Value: 35A19
  misc_feature: MA Experiment 108534 PARAMETER Experiment Name: Zm_4deg_Cold_P Parameter: Temperature (deg C) Value: 4 vs. 22
  misc_feature: MA Experiment 108534 PARAMETER Experiment Name: Zm_4deg_Cold_P Parameter: Timepoint (hr) Value: 6
  misc_feature: MA Experiment 108534 PARAMETER Experiment Name: Zm_4deg_Cold_P Parameter: Tissue Value: Aerial
  misc_feature: MA Experiment ID: 108536 Result: Up-regulated in Transcription
  misc_feature: MA Experiment 108536 PARAMETER Experiment Name: Zm_Meristem_P Parameter: Age (day) Value: 8
  misc_feature: MA Experiment 108536 PARAMETER Experiment Name: Zm_Meristem_P Parameter: Organism Value: Zea mays
  misc_feature: MA Experiment 108536 PARAMETER Experiment Name: Zm_Meristem_P Parameter: Plant Line Value: 35A19
  misc_feature: MA Experiment 108536 PARAMETER Experiment Name: Zm_Meristem_P Parameter: Tissue Value: Shoot Meristem vs. Above Shoot Meristem
  misc_feature: MA Experiment ID: 108540 Result: Up-regulated in Transcription
  misc_feature: MA Experiment 108540 PARAMETER Experiment Name: Zm_20percent_PEG_P Parameter: Age (day) Value: 8
  misc_feature: MA Experiment 108540 PARAMETER Experiment Name: Zm_20percent_PEG_P Parameter: Organism Value: Zea mays
  misc_feature: MA Experiment 108540 PARAMETER Experiment Name: Zm_20percent_PEG_P Parameter: Plant Line Value: 35A19
  misc_feature: MA Experiment 108540 PARAMETER Experiment Name: Zm_20percent_PEG_P Parameter: Timepoint (hr) Value: 6
  misc_feature: MA Experiment 108540 PARAMETER Experiment Name: Zm_20percent_PEG_P Parameter: Tissue Value: Aerial
  misc_feature: MA Experiment 108540 PARAMETER Experiment Name: Zm_20percent_PEG_P Parameter: Treatment Value: 20percent PEG vs. No Treatment
  misc_feature: MA Experiment ID: 108556 Result: Up-regulated in Transcription
  misc_feature: MA Experiment 108556 PARAMETER Experiment Name: Zm_Drought_P Parameter: Age (day) Value: 9
  misc_feature: MA Experiment 108556 PARAMETER Experiment Name: Zm_Drought_P Parameter: Organism Value: Zea mays
  misc_feature: MA Experiment 108556 PARAMETER Experiment Name: Zm_Drought_P Parameter: Plant Line Value: 35A19
  misc_feature: MA Experiment 108556 PARAMETER Experiment Name: Zm_Drought_P Parameter: Timepoint (hr) Value: 24
  misc_feature: MA Experiment 108556 PARAMETER Experiment Name: Zm_Drought_P Parameter: Tissue Value: Aerial
  misc_feature: MA Experiment 108556 PARAMETER Experiment Name: Zm_Drought_P Parameter: Treatment Value: Drought vs. No Drought
  misc_feature: MA Experiment ID: 108597 Result: Up-regulated in Transcription
  misc_feature: MA Experiment 108597 PARAMETER Experiment Name: Zm_100uM_ABA_P Parameter: Age (day) Value: 9
  misc_feature: MA Experiment 108597 PARAMETER Experiment Name: Zm_100uM_ABA_P Parameter: Organism Value: Zea mays
  misc_feature: MA Experiment 108597 PARAMETER Experiment Name: Zm_100uM_ABA_P Parameter: Plant Line Value: 35A19
  misc_feature: MA Experiment 108597 PARAMETER Experiment Name: Zm_100uM_ABA_P Parameter: Timepoint (hr) Value: 24
  misc_feature: MA Experiment 108597 PARAMETER Experiment Name: Zm_100uM_ABA_P Parameter: Tissue Value: Aerial
  misc_feature: MA Experiment 108597 PARAMETER Experiment Name: Zm_100uM_ABA_P Parameter: Treatment Value: 100uM ABA vs. No Treatment
  misc_feature: MA Experiment ID: 108689 Result: Up-regulated in Transcription
  misc_feature: MA Experiment 108689 PARAMETER Experiment Name: Zm_Drought_Roots_P Parameter: Age (day) Value: 9
  misc_feature: MA Experiment 108689 PARAMETER Experiment Name: Zm_Drought_Roots_P Parameter: Organism Value: Zea mays
  misc_feature: MA Experiment 108689 PARAMETER Experiment Name: Zm_Drought_Roots_P Parameter: Plant Line Value: 35A19
  misc_feature: MA Experiment 108689 PARAMETER Experiment Name: Zm_Drought_Roots_P Parameter: Timepoint (hr) Value: 24
  misc_feature: MA Experiment 108689 PARAMETER Experiment Name: Zm_Drought_Roots_P Parameter: Tissue Value: Roots
  misc_feature: MA Experiment 108689 PARAMETER Experiment Name: Zm_Drought_Roots_P Parameter: Treatment Value: Drought vs. No Drought
  misc_feature: MA Experiment ID: 20000477 Result: Up-regulated in Transcription
  misc_feature: MA Experiment 20000477 PARAMETER Experiment Name: Zm_5mM_SA_P Parameter: Age (day) Value: 10
  misc_feature: MA Experiment 20000477 PARAMETER Experiment Name: Zm_5mM_SA_P Parameter: Organism Value: Zea mays
  misc_feature: MA Experiment 20000477 PARAMETER Experiment Name: Zm_5mM_SA_P Parameter: Plant Line Value: 35A19
  misc_feature: MA Experiment 20000477 PARAMETER Experiment Name: Zm_5mM_SA_P Parameter: Timepoint (hr) Value: 48
  misc_feature: MA Experiment 20000477 PARAMETER Experiment Name: Zm_5mM_SA_P Parameter: Tissue Value: Aerial
  misc_feature: MA Experiment 20000477 PARAMETER Experiment Name: Zm_5mM_SA_P Parameter: Treatment Value: 5mM SA vs. No Treatment
  misc_feature: MA Experiment ID: 20000478 Result: Up-regulated in Transcription
  misc_feature: MA Experiment 20000478 PARAMETER Experiment Name: Zm_5mM_SA_P Parameter: Age (day) Value: 11
  misc_feature: MA Experiment 20000478 PARAMETER Experiment Name: Zm_5mM_SA_P Parameter: Organism Value: Zea mays
  misc_feature: MA Experiment 20000478 PARAMETER Experiment Name: Zm_5mM_SA_P Parameter: Plant Line Value: 35A19
  misc_feature: MA Experiment 20000478 PARAMETER Experiment Name: Zm_5mM_SA_P Parameter: Timepoint (hr) Value: 72
  misc_feature: MA Experiment 20000478 PARAMETER Experiment Name: Zm_5mM_SA_P Parameter: Tissue Value: Aerial
  misc_feature: MA Experiment 20000478 PARAMETER Experiment Name: Zm_5mM_SA_P Parameter: Treatment Value: 5mM SA vs. No Treatment
  misc_feature: MA Experiment ID: 20000479 Result: Up-regulated in Transcription
  misc_feature: MA Experiment 20000479 PARAMETER Experiment Name: Zm_Drought_P Parameter: Age (day) Value: 10
  misc_feature: MA Experiment 20000479 PARAMETER Experiment Name: Zm_Drought_P Parameter: Organism Value: Zea mays
  misc_feature: MA Experiment 20000479 PARAMETER Experiment Name: Zm_Drought_P Parameter: Plant Line Value: 35A19
  misc_feature: MA Experiment 20000479 PARAMETER Experiment Name: Zm_Drought_P Parameter: Timepoint (hr) Value: 48
  misc_feature: MA Experiment 20000479 PARAMETER Experiment Name: Zm_Drought_P Parameter: Tissue Value: Aerial
  misc_feature: MA Experiment 20000479 PARAMETER Experiment Name: Zm_Drought_P Parameter: Treatment Value: Drought vs. No Drought
  misc_feature: MA Experiment ID: 20000480 Result: Up-regulated in Transcription
  misc_feature: MA Experiment 20000480 PARAMETER Experiment Name: Zm_Drought_P Parameter: Age (day) Value: 11
  misc_feature: MA Experiment 20000480 PARAMETER Experiment Name: Zm_Drought_P Parameter: Organism Value: Zea mays
  misc_feature: MA Experiment 20000480 PARAMETER Experiment Name: Zm_Drought_P Parameter: Plant Line Value: 35A19
  misc_feature: MA Experiment 20000480 PARAMETER Experiment Name: Zm_Drought_P Parameter: Timepoint (hr) Value: 72
  misc_feature: MA Experiment 20000480 PARAMETER Experiment Name: Zm_Drought_P Parameter: Tissue Value: Aerial
  misc_feature: MA Experiment 20000480 PARAMETER Experiment Name: Zm_Drought_P Parameter: Treatment Value: Drought vs. No Drought
  misc_feature: MA Experiment ID: 20000532 Result: Up-regulated in Transcription
  misc_feature: MA Experiment 20000532 PARAMETER Experiment Name: Zm_0.001percent_MeJA_P Parameter: Age (day) Value: 10
  misc_feature: MA Experiment 20000532 PARAMETER Experiment Name: Zm_0.001percent_MeJA_P Parameter: Organism Value: Zea mays
  misc_feature: MA Experiment 20000532 PARAMETER Experiment Name: Zm_0.001percent_MeJA_P Parameter: Plant Line Value: 35A19
  misc_feature: MA Experiment 20000532 PARAMETER Experiment Name: Zm_0.001percent_MeJA_P Parameter: Timepoint (hr) Value: 48
  misc_feature: MA Experiment 20000532 PARAMETER Experiment Name: Zm_0.001percent_MeJA_P Parameter: Tissue Value: Aerial
  misc_feature: MA Experiment 20000532 PARAMETER Experiment Name: Zm_0.001percent_MeJA_P Parameter: Treatment Value: 0.001percent MeJA vs. No Treatment
  misc_feature: MA Experiment ID: 20000533 Result: Up-regulated in Transcription
  misc_feature: MA Experiment 20000533 PARAMETER Experiment Name: Zm_0.001percent_MeJA_P Parameter: Age (day) Value: 11
  misc_feature: MA Experiment 20000533 PARAMETER Experiment Name: Zm_0.001percent_MeJA_P Parameter: Organism Value: Zea mays
  misc_feature: MA Experiment 20000533 PARAMETER Experiment Name: Zm_0.001percent_MeJA_P Parameter: Plant Line Value: 35A19
  misc_feature: MA Experiment 20000533 PARAMETER Experiment Name: Zm_0.001percent_MeJA_P Parameter: Timepoint (hr) Value: 72
  misc_feature: MA Experiment 20000533 PARAMETER Experiment Name: Zm_0.001percent_MeJA_P Parameter: Tissue Value: Aerial
  misc_feature: MA Experiment 20000533 PARAMETER Experiment Name: Zm_0.001percent_MeJA_P Parameter: Treatment Value: 0.001percent MeJA vs. No Treatment
  misc_feature: MA Experiment ID: 20000626 Result: Up-regulated in Transcription
  misc_feature: MA Experiment 20000626 PARAMETER Experiment Name: Zm_Herbicide-Treatments_P Parameter: Timepoint (hr) Value: 12
  misc_feature: MA Experiment 20000626 PARAMETER Experiment Name: Zm_Herbicide-Treatments_P Parameter: Tissue Value: Aerial
  misc_feature: MA Experiment 20000626 PARAMETER Experiment Name: Zm_Herbicide-Treatments_P Parameter: Treatment Value: Roundup vs. No Treatment
  misc_feature: MA Experiment ID: 20000627 Result: Up-regulated in Transcription
  misc_feature: MA Experiment 20000627 PARAMETER Experiment Name: Zm_Herbicide-Treatments_P Parameter: Timepoint (hr) Value: 12
  misc_feature: MA Experiment 20000627 PARAMETER Experiment Name: Zm_Herbicide-Treatments_P Parameter: Tissue Value: Aerial
  misc_feature: MA Experiment 20000627 PARAMETER Experiment Name: Zm_Herbicide-Treatments_P Parameter: Treatment Value: Finale vs. No Treatment
  misc_feature: MA Experiment ID: 20000630 Result: Up-regulated in Transcription
  misc_feature: MA Experiment 20000630 PARAMETER Experiment Name: Zm_Herbicide-Treatments_P Parameter: Timepoint (hr) Value: 4
  misc_feature: MA Experiment 20000630 PARAMETER Experiment Name: Zm_Herbicide-Treatments_P Parameter: Tissue Value: Aerial
  misc_feature: MA Experiment 20000630 PARAMETER Experiment Name: Zm_Herbicide-Treatments_P Parameter: Treatment Value: Roundup vs. No Treatment
  misc_feature: MA Experiment ID: 20001608 Result: Down-regulated in Transcription
  misc_feature: MA Experiment 20001608 PARAMETER Experiment Name: Zm_50ppm_KNO3_L-to-H_P Parameter: Age (day) Value: 21
  misc_feature: MA Experiment 20001608 PARAMETER Experiment Name: Zm_50ppm_KNO3_L-to-H_P Parameter: Organism Value: Zea mays
  misc_feature: MA Experiment 20001608 PARAMETER Experiment Name: Zm_50ppm_KNO3_L-to-H_P Parameter: Plant Line Value: 35A19
  misc_feature: MA Experiment 20001608 PARAMETER Experiment Name: Zm_50ppm_KNO3_L-to-H_P Parameter: Timepoint (hr) Value: 48
  misc_feature: MA Experiment 20001608 PARAMETER Experiment Name: Zm_50ppm_KNO3_L-to-H_P Parameter: Tissue Value: Shoots
  misc_feature: MA Experiment 20001608 PARAMETER Experiment Name: Zm_50ppm_KNO3_L-to-H_P Parameter: Treatment Value: 50ppm KNO3 vs. 50ppm KCl
aggtttgcttggtgcccccgatttgcctgctactcgtggcgcgccgctcctaggcgaagggaaggatccgactcaacatggccgccgccgcttctaccatgtccctgctcccgatctcccagcccaggaagcagcagcagcaaggcgcgggcgccgtggtcgtgttccagcggcggccctgggacgcgcggcggaggcgatacgtcgtcccgacggcgaggttgttcgggccggcgatcttcgaggcgtccaagctgaaggtgctgttcctgggcgtggacgagggcgaggggagcagcaagcatctgcatgcgcaccacccggcgccggcgccggcgctgctgccgcggacgtacacgctgacgcacagcgacgtgacggccagcctgacgctcgccgtctcccacaccatcaaccgcgcgcagctgcagggctggtacaaccgcctgcagcgcgacgaggtggtggccgagtggaagaaggtgcgcggccggatgtcgctgcacgtgcactgccacatctccggcggacacttgctcctggacctcatcgccggcctccgctactacatcttccgcaaggagctccccgtggtgctcgaggcgttcgtgcacggcgacggcgacctgttcagccgtcacccggagctggaggaggccacggtgtgggtctatttccactccaacctggcccgcttcaaccgcgtcgagtgctggggtccgctccgcgacgccgccgcccccgcgcccgccgaggacgactccaccgcgccggccgccgcctccatcgccatggagggccagatgcccgtgggcgagtggccgcaccggtgtccccagcagtgcgactgctgcttcccgccgcacagcctcataccctggccgaacgagcaagacatggccaccgccgccggccaggtccgacagcagtagtgaagctgcacctgtacctgtacgtacggaggaagagcctttgccgcagctaataatacactactagcgcgttgtttggtttgctattgctagatgcaagcgtgtgcgtgcaccgtgcagtgcaggtgtggagtggcgtcaacaccttgcatgcacgcgctattctttaattggtagcttagctcagctcagctcagttccacttctacaccttcgtatttggaagtagcttggttgaggttggggg

SEQ ID NO: 2413 - protein, 327 aa, Zea mays subsp. mays
  peptide (1)..(327): Ceres Seq. ID no. 12381140
GLLGAPDLPATRGAPLLGEGKDPTQHGRRRFYHVPAPDLPAQEAAAARRGRRGRVPAAALGRAAEAIRRPDGEVVRAGDLRGVQAEGAVPGRGRGRGEQQASACAPPGAGAGAAAADVHADAQRRDGQPDARRLPHHQPRAAAGLVQPPAARRGGGRVEEGARPDVAARALPHLRRTLAPGPHRRPPLLHLPQGAPRGARGVRARRRRPVQPSPGAGGGHGVGLFPLQPGPLQPRRVLGSAPRRRRPRARRGRLHRAGRRLHRHGGPDARGRVAAPVSPAVRLLLPAAQPHTLAERARHGHRRRPGPTAVVKLHLYLYVRRKSLCRS

SEQ ID NO: 2414 - protein, 284 aa, Zea mays subsp. mays
  peptide (1)..(284): Ceres Seq. ID no. 12381141
  misc_feature (88)..(218): Homolog of NCBI NO: 15896657 NR Description: Uncharacterized protein, homolog of YYBI fused to uncharacterized domain similar to A.thaliana (gi:3292817
  misc_feature (56)..(194): Homolog of NCBI NO: 38567838 NR Description: OSJNBb0020J19.16 [Oryza sativa (japonica
  misc_feature (43)..(220): Homolog of NCBI NO: 18401163 NR Description: expressed protein
  misc_feature (43)..(220): Homolog of NCBI NO: 8778672 NR Description: F9C16.20 [Arabidopsis thaliana]
  misc_feature (45)..(268): Homolog of NCBI NO: 15234348 NR Description: putative protein; protein id: At4g11910.1
  misc_feature (1)..(261): Homolog of NCBI NO: 15234348 NR Description: putative protein; protein id: At4g11910.1
  misc_feature (251)..(268): Homolog of NCBI NO: 21592527 NR Description: unknown [Arabidopsis thaliana]
  misc_feature (6)..(234): Homolog of NCBI NO: 21592527 NR Description: unknown [Arabidopsis thaliana]
  misc_feature (251)..(268): Homolog of NCBI NO: 18416035 NR Description: expressed protein
  misc_feature (6)..(234): Homolog of NCBI NO: 18416035 NR Description: expressed protein
MAAAASTMSLLPISQPRKQQQQGAGAVVVFQRRPWDARRRRYVVPTARLFGPAIFEASKLKVLFLGVDEGEGSSKHLHAHHPAPAPALLPRTYTLTHSDVTASLTLAVSHTINRAQLQGWYNRLQRDEVVAEWKKVRGRMSLHVHCHISGGHLLLDLIAGLRYYIFRKELPVVLEAFVHGDGDLFSRHPELEEATVWVYFHSNLARFNRVECWGPLRDAAAPAPAEDDSTAPAAASIAMEGQMPVGEWPHRCPQQCDCCFPPHSLIPWPNEQDMATAAGQVRQQ

SEQ ID NO: 2415 - protein, 277 aa, Zea mays subsp. mays
  peptide (1)..(277): Ceres Seq. ID no. 12381142
  misc_feature (81)..(211): Homolog of NCBI NO: 15896657 NR Description: Uncharacterized protein, homolog of YYBI fused to uncharacterized domain similar to A.thaliana (gi:3292817
  misc_feature (49)..(187): Homolog of NCBI NO: 38567838 NR Description: OSJNBb0020J19.16 [Oryza sativa (japonica
  misc_feature (36)..(213): Homolog of NCBI NO: 18401163 NR Description: expressed protein
  misc_feature (36)..(213): Homolog of NCBI NO: 8778672 NR Description: F9C16.20 [Arabidopsis thaliana]
  misc_feature (38)..(261): Homolog of NCBI NO: 15234348 NR Description: putative protein; protein id: At4g11910.1
  misc_feature (1)..(254): Homolog of NCBI NO: 15234348 NR Description: putative protein; protein id: At4g11910.1
  misc_feature (244)..(261): Homolog of NCBI NO: 21592527 NR Description: unknown [Arabidopsis thaliana]
  misc_feature (1)..(227): Homolog of NCBI NO: 21592527 NR Description: unknown [Arabidopsis thaliana]
  misc_feature (244)..(261): Homolog of NCBI NO: 18416035 NR Description: expressed protein
  misc_feature (1)..(227): Homolog of NCBI NO: 18416035 NR Description: expressed protein
MSLLPISQPRKQQQQGAGAVVVFQRRPWDARRRRYVVPTARLFGPAIFEASKLKVLFLGVDEGEGSSKHLHAHHPAPAPALLPRTYTLTHSDVTASLTLAVSHTINRAQLQGWYNRLQRDEVVAEWKKVRGRMSLHVHCHISGGHLLLDLIAGLRYYIFRKELPVVLEAFVHGDGDLFSRHPELEEATVWVYFHSNLARFNRVECWGPLRDAAAPAPAEDDSTAPAAASIAMEGQMPVGEWPHRCPQQCDCCFPPHSLIPWPNEQDMATAAGQVRQQ

SEQ ID NO: 2416 - DNA, 775 bp, Zea mays subsp. mays
  misc_feature (1)..(775): Ceres Seq. ID no. 12544805
  misc_feature: MA Experiment ID: 108522 Result: Down-regulated in Transcription
  misc_feature: MA Experiment 108522 PARAMETER Experiment Name: Zm_42deg_Heat_P Parameter: Age (day) Value: 8
  misc_feature: MA Experiment 108522 PARAMETER Experiment Name: Zm_42deg_Heat_P Parameter: Organism Value: Zea mays
  misc_feature: MA Experiment 108522 PARAMETER Experiment Name: Zm_42deg_Heat_P Parameter: Plant Line Value: 35A19
  misc_feature: MA Experiment 108522 PARAMETER Experiment Name: Zm_42deg_Heat_P Parameter: Temperature (deg C) Value: 42 vs. 22
  misc_feature: MA Experiment 108522 PARAMETER Experiment Name: Zm_42deg_Heat_P Parameter: Timepoint (hr) Value: 1
  misc_feature: MA Experiment 108522 PARAMETER Experiment Name: Zm_42deg_Heat_P Parameter: Tissue Value: Aerial
  misc_feature: MA Experiment ID: 108535 Result: Up-regulated in Transcription
  misc_feature: MA Experiment 108535 PARAMETER Experiment Name: Zm_Meristem_P Parameter: Age (day) Value: 8
  misc_feature: MA Experiment 108535 PARAMETER Experiment Name: Zm_Meristem_P Parameter: Organism Value: Zea mays
  misc_feature: MA Experiment 108535 PARAMETER Experiment Name: Zm_Meristem_P Parameter: Plant Line Value: 35A19
  misc_feature: MA Experiment 108535 PARAMETER Experiment Name: Zm_Meristem_P Parameter: Tissue Value: Root Meristem vs. Above Root Meristem
  misc_feature: MA Experiment ID: 108544 Result: Down-regulated in Transcription
  misc_feature: MA Experiment ID: 108556 Result: Down-regulated in Transcription
  misc_feature: MA Experiment 108556 PARAMETER Experiment Name: Zm_Drought_P Parameter: Age (day) Value: 9
  misc_feature: MA Experiment 108556 PARAMETER Experiment Name: Zm_Drought_P Parameter: Organism Value: Zea mays
  misc_feature: MA Experiment 108556 PARAMETER Experiment Name: Zm_Drought_P Parameter: Plant Line Value: 35A19
  misc_feature: MA Experiment 108556 PARAMETER Experiment Name: Zm_Drought_P Parameter: Timepoint (hr) Value: 24
  misc_feature: MA Experiment 108556 PARAMETER Experiment Name: Zm_Drought_P Parameter: Tissue Value: Aerial
  misc_feature: MA Experiment 108556 PARAMETER Experiment Name: Zm_Drought_P Parameter: Treatment Value: Drought vs. No Drought
  misc_feature: MA Experiment ID: 20000478 Result: Down-regulated in Transcription
  misc_feature: MA Experiment 20000478 PARAMETER Experiment Name: Zm_5mM_SA_P Parameter: Age (day) Value: 11
  misc_feature: MA Experiment 20000478 PARAMETER Experiment Name: Zm_5mM_SA_P Parameter: Organism Value: Zea mays
  misc_feature: MA Experiment 20000478 PARAMETER Experiment Name: Zm_5mM_SA_P Parameter: Plant Line Value: 35A19
  misc_feature: MA Experiment 20000478 PARAMETER Experiment Name: Zm_5mM_SA_P Parameter: Timepoint (hr) Value: 72
  misc_feature: MA Experiment 20000478 PARAMETER Experiment Name: Zm_5mM_SA_P Parameter: Tissue Value: Aerial
  misc_feature: MA Experiment 20000478 PARAMETER Experiment Name: Zm_5mM_SA_P Parameter: Treatment Value: 5mM SA vs. No Treatment
  misc_feature: MA Experiment ID: 20000479 Result: Down-regulated in Transcription
  misc_feature: MA Experiment 20000479 PARAMETER Experiment Name: Zm_Drought_P Parameter: Age (day) Value: 10
  misc_feature: MA Experiment 20000479 PARAMETER Experiment Name: Zm_Drought_P Parameter: Organism Value: Zea mays
  misc_feature: MA Experiment 20000479 PARAMETER Experiment Name: Zm_Drought_P Parameter: Plant Line Value: 35A19
  misc_feature: MA Experiment 20000479 PARAMETER Experiment Name: Zm_Drought_P Parameter: Timepoint (hr) Value: 48
  misc_feature: MA Experiment 20000479 PARAMETER Experiment Name: Zm_Drought_P Parameter: Tissue Value: Aerial
  misc_feature: MA Experiment 20000479 PARAMETER Experiment Name: Zm_Drought_P Parameter: Treatment Value: Drought vs. No Drought
  misc_feature: MA Experiment ID: 20000488 Result: Up-regulated in Transcription
  misc_feature: MA Experiment 20000488 PARAMETER Experiment Name: Zm_50mM_NH4NO3_L_to_H_P Parameter: Organism Value: Zea mays
  misc_feature: MA Experiment 20000488 PARAMETER Experiment Name: Zm_50mM_NH4NO3_L_to_H_P Parameter: Timepoint (hr) Value: 8
  misc_feature: MA Experiment 20000488 PARAMETER Experiment Name: Zm_50mM_NH4NO3_L_to_H_P Parameter: Tissue Value: Leaves
  misc_feature: MA Experiment 20000488 PARAMETER Experiment Name: Zm_50mM_NH4NO3_L_to_H_P Parameter: Treatment Value: 50mM NH4NO3 vs. 100mM Mannitol
  misc_feature: MA Experiment ID: 20001612 Result: Up-regulated in Transcription
  misc_feature: MA Experiment 20001612 PARAMETER Experiment Name: Zm_50ppm_KNO3_L-to-H_P Parameter: Age (day) Value: 19
  misc_feature: MA Experiment 20001612 PARAMETER Experiment Name: Zm_50ppm_KNO3_L-to-H_P Parameter: Organism Value: Zea mays
  misc_feature: MA Experiment 20001612 PARAMETER Experiment Name: Zm_50ppm_KNO3_L-to-H_P Parameter: Plant Line Value: 35A19
  misc_feature: MA Experiment 20001612 PARAMETER Experiment Name: Zm_50ppm_KNO3_L-to-H_P Parameter: Timepoint (hr) Value: 8
  misc_feature: MA Experiment 20001612 PARAMETER Experiment Name: Zm_50ppm_KNO3_L-to-H_P Parameter: Tissue Value: Roots
  misc_feature: MA Experiment 20001612 PARAMETER Experiment Name: Zm_50ppm_KNO3_L-to-H_P Parameter: Treatment Value: 50ppm KNO3 vs. 50ppm KCl
aagtcagcacactgaaacccctgcaaaccctagtgcttcccaccgatccatttcagccgccgccgcgcgtagcaagcaggagcagcaaggatgccggctggccacgggctgcgctcgcggacgcgcgacctgttcgcgcgccccttccgcaagaagggctacatcccgctcaccacctacctccgcacctacaagatcggcgactacgtcgacgtcaaggtgaacggcgccgtccacaaggggatgccgcacaagttctaccacggccgcaccggtcgcgtctggaacgtcaccaagcgcgccatcggcgtcgagataaacaagcaggtgaatggtcgcatcatcaggaagcgtatccatgtccgcgtggagcatgtgcagccgtcccgctgcacagaagagttccgcctgaggaaggtgaagaatgatcagctgaaggcggatgcaaaggagcgcggcgaggtcatcagcaccaagaggcagccgttgggtcccaagcctggcttcatggttgaggggactaccatcgagaccgtcactcccatcccgtacgatgtggtcaatgatcttaagggcggatactaggttgtttgtttggtctttctacctgttctacatctgtgttactctagtgcgtacaattttgctcacactgagcagtagtatgaacctattgtgtgttcatgttgaaaattttcccgttctgtgcaaacctgagtttagaagaacgctatgccttgatctttgcttctgagaacaaagatttgcatttttc

SEQ ID NO: 2417 - protein, 164 aa, Zea mays subsp. mays
  peptide (1)..(164): Ceres Seq. ID no. 12544806
  misc_feature (2)..(100): Pfam Name: Ribosomal protein L21e Pfam Description: Ribosomal protein L21e
  misc_feature (1)..(155): Homolog of NCBI NO: 6319668 NR Description: Homology to rat L21; Rpl21ap [Saccharomyces
  misc_feature (1)..(164): Homolog of NCBI NO: 37535194 NR Description: 60S ribosomal protein L21 [Oryza sativa (japonica group)] >gi|13489167|gb|AAK27801.1| 60S ribosomal protein L21
  misc_feature (1)..(164): Homolog of NCBI NO: 11276828 NR Description: ribosomal protein L21 [imported] - rice
  misc_feature (1)..(164): Homolog of NCBI NO: 18406015 NR Description: 60S ribosomal protein L21, putative; protein id: supported by cDNA: 28545., supported by cDNA: gi_15292812, by cDNA: gi_20258868 [Arabidopsis thaliana]
  misc_feature (1)..(164): Homolog of NCBI NO: 18391042 NR Description: putative 60S ribosomal protein L21; protein id: supported by cDNA: gi_13877928, supported by cDNA: gi_16323461 thaliana] >gi|18391054|ref|NP_563849.1| putative 60S come from
  misc_feature (1)..(157): Homolog of NCBI NO: 15213768 NR Description: ribosomal protein L21 [Spodoptera frugiperda]
  misc_feature (1)..(155): Homolog of NCBI NO: 6094029 NR Description: 60S RIBOSOMAL PROTEIN L21
  misc_feature (1)..(157): Homolog of NCBI NO: 38048363 NR Description: similar to Drosophila melanogaster CG12775
  misc_feature (1)..(157): Homolog of NCBI NO: 20129705 NR Description: CG12775-PA [Drosophila melanogaster]
  misc_feature (1)..(155): Homolog of NCBI NO: 40741182 NR Description: hypothetical protein AN4802.2 [Aspergillus
MPAGHGLRSRTRDLFARPFRKKGYIPLTTYLRTYKIGDYVDVKVNGAVHKGMPHKFYHGRTGRVWNVTKRAIGVEINKQVNGRIIRKRIHVRVEHVQPSRCTEEFRLRKVKNDQLKADAKERGEVISTKRQPLGPKPGFMVEGTTIETVTPIPYDVVNDLKGGY

SEQ ID NO: 2418 - protein, 141 aa, Zea mays subsp. mays
  peptide (1)..(141): Ceres Seq. ID no. 12544807
VSTLKPLQTLVLPTDPFQPPPRVASRSSKDAGWPRAALADARPVRAPLPQEGLHPAHHLPPHLQDRRLRRRQGERRRPQGDAAQVLPRPHRSRLERHQARHRRRDKQAGEWSHHQEAYPCPRGACAAVPLHRRVPPEEGEE

SEQ ID NO: 2419 - protein, 113 aa, Zea mays subsp. mays
  peptide (1)..(113): Ceres Seq. ID no. 12544808
  misc_feature (1)..(113): Homolog of NCBI NO: 37535194 NR Description: 60S ribosomal protein L21 [Oryza sativa (japonica group)] >gi|13489167|gb|AAK27801.1| 60S ribosomal protein L21
  misc_feature (1)..(113): Homolog of NCBI NO: 11276828 NR Description: ribosomal protein L21 [imported] - rice
  misc_feature (1)..(113): Homolog of NCBI NO: 18406015 NR Description: 60S ribosomal protein L21, putative; protein id: supported by cDNA: 28545., supported by cDNA: gi_15292812, by cDNA: gi_20258868 [Arabidopsis thaliana]
  misc_feature (1)..(113): Homolog of NCBI NO: 18391042 NR Description: putative 60S ribosomal protein L21; protein id: supported by cDNA: gi_13877928, supported by cDNA: gi_16323461 thaliana] >gi|18391054|ref|NP_563849.1| putative 60S come from
  misc_feature (1)..(106): Homolog of NCBI NO: 15213768 NR Description: ribosomal protein L21 [Spodoptera frugiperda]
  misc_feature (1)..(104): Homolog of NCBI NO: 6094029 NR Description: 60S RIBOSOMAL PROTEIN L21
  misc_feature (1)..(106): Homolog of NCBI NO: 38048363 NR Description: similar to Drosophila melanogaster CG12775
  misc_feature (1)..(106): Homolog of NCBI NO: 20129705 NR Description: CG12775-PA [Drosophila melanogaster]
  misc_feature (1)..(104): Homolog of NCBI NO: 40741182 NR Description: hypothetical protein AN4802.2 [Aspergillus
  misc_feature (1)..(104): Homolog of NCBI NO: 6319668 NR Description: Homology to rat L21; Rpl21ap [Saccharomyces
MPHKFYHGRTGRVWNVTKRAIGVEINKQVNGRIIRKRIHVRVEHVQPSRCTEEFRLRKVKNDQLKADAKERGEVISTKRQPLGPKPGFMVEGTTIETVTPIPYDVVNDLKGGY

SEQ ID NO: 2420 - DNA, 1573 bp, Zea mays subsp. mays
  misc_feature (1)..(1573): Ceres Seq. ID no. 13493056
  misc_feature: MA Experiment ID: 108530 Result: Down-regulated in Transcription
  misc_feature: MA Experiment 108530 PARAMETER Experiment Name: Zm_Imbibed_Seeds_P Parameter: Age (day) Value: 6 vs. 2
  misc_feature: MA Experiment 108530 PARAMETER Experiment Name: Zm_Imbibed_Seeds_P Parameter: Organism Value: Zea mays
  misc_feature: MA Experiment 108530 PARAMETER Experiment Name: Zm_Imbibed_Seeds_P Parameter: Plant Line Value: 35A19
  misc_feature: MA Experiment 108530 PARAMETER Experiment Name: Zm_Imbibed_Seeds_P Parameter: Tissue Value: Aerial vs. Embryo
  misc_feature: MA Experiment ID: 108535 Result: Up-regulated in Transcription
  misc_feature: MA Experiment 108535 PARAMETER Experiment Name: Zm_Meristem_P Parameter: Age (day) Value: 8
  misc_feature: MA Experiment 108535 PARAMETER Experiment Name: Zm_Meristem_P Parameter: Organism Value: Zea mays
  misc_feature: MA Experiment 108535 PARAMETER Experiment Name: Zm_Meristem_P Parameter: Plant Line Value: 35A19
  misc_feature: MA Experiment 108535 PARAMETER Experiment Name: Zm_Meristem_P Parameter: Tissue Value: Root Meristem vs. Above Root Meristem
gcattttggctcctcactgccgcgccgccacccactacaggtgaatgaatataacgaatccgccgccggcgtcatctcctcctcccacctcgactcgccttgctcgccgtcggcggccatttcgtcgcctcgcggcgagccgcccaagttgagctcgcggcggatctgatgggcttgttgtgatctcctgcaggtaaggaagaggaggagggcaggatgtcgcaccgtaagttcgagcacccgaggcacggctccctcggcttccttcccaggaagcgctcctcccgccaccgcggcaaggtgaagtcatttcccagggatgaccccaagaagccttgccatctcactgccttccttggctacaaggctggcatgactcacattgtccgtgaggttgagaagccaggatccaaactccataagaaggaaacttgtgaggctgttaccatcattgaaacccctcctcttgtcattgttgggctcgtggcatatgtgaagactcctcgtggcctccgcacactcaactctgtttgggcccaacatcttagcgaagaagtgaggagaaggttctacaagaactggtgcaagagcaagaagaaggctttcacaaagtatgctctcaaatatgaaaatgatgctggcaagaaggaaattcagctgcagcttgagaagatgaagaaatatgcttctgttatccgtgtcattgctcatacccagattaggaagatgaagggtttgaagcagaagaaggctcacctgatggagattcaggtcaatggtggtaccattgctgacaaggtggactacggctataaattttttgagaaagaggtccctgttgatgctgtcttccagaaggatgagatgattgacatcattggtgtgaccaaaggtaaaggttatgagggtgtggtcactcgttggggtgtcacccgccttccccgcaaaacccacaggggtctccgcaaggttgcttgtatcggtgcatggcatccggctagggtctcgtatacggttgcccgtgctggtcagaatgggtaccaccaccgcactgagatgaacaagaaggtctacaagatcggcaaggctggacaagagacccacgatgcctccacagagtttgacaggaccgagaaggacatcactcccatgggtggcttcccccactatggtatcgtgaagggtgactacctgatgatcaagggatgctgtgtgggtccaaaaaagagggtggtgaccctccgccagtccctcctgaagcagacttcccggctggcgctggaggagatcaagctcaagttcattgacacatcgtccaaatttgggcacggtcgcttccagactaccgatgagaagcagaggttctttggtaagctcaaggcgtaaggtgctgcggtgcagcgaaagtcccatttgtcaaaatcatcaaactgtgaaacctttgtttgttaccttgctgtaccaagttttgtagcaggatgatttgggagcatgttccggtcttcaatggattgttctacgcttcagaactgcagtgactatgttttgtgctattttggttgttttaatgccc

SEQ ID NO: 2421 - protein, 389 aa, Zea mays subsp. mays
  peptide (1)..(389): Ceres Seq. ID no. 13493057
  misc_feature (50)..(343): Pfam Name: Ribosomal protein L3 Pfam Description: Ribosomal protein L3
  misc_feature (50)..(343): Pfam Name: Ribosomal protein L3 Pfam Description: Ribosomal protein L3
  misc_feature (1)..(388): Homolog of NCBI NO: 22203712 NR Description: ribosomal protein L3 [Chlamys farreri]
  misc_feature (1)..(388): Homolog of NCBI NO: 4506649 NR Description: ribosomal protein L3
  misc_feature (1)..(388): Homolog of NCBI NO: 7305441 NR Description: ribosomal protein L3; ribosomal protein L3
  misc_feature (1)..(387): Homolog of NCBI NO: 81657 NR Description: ribosomal protein L3.e (clone ARP1), cytosolic -
  misc_feature (1)..(387): Homolog of NCBI NO: 23397228 NR Description: putative ribosomal protein [Arabidopsis thaliana]
  misc_feature (1)..(388): Homolog of NCBI NO: 22203712 NR Description: ribosomal protein L3 [Chlamys farreri]
  misc_feature (1)..(388): Homolog of NCBI NO: 7305441 NR Description: ribosomal protein L3; ribosomal protein L3
  misc_feature (1)..(387): Homolog of NCBI NO: 23397228 NR Description: putative ribosomal protein [Arabidopsis thaliana]
  misc_feature (1)..(389): Homolog of NCBI NO: 548770 NR Description: 60S RIBOSOMAL PROTEIN L3
  misc_feature (1)..(381): Homolog of NCBI NO: 6688812 NR Description: L3 Ribosomal protein [Medicago sativa subsp. x
  misc_feature (1)..(389): Homolog of NCBI NO: 15220533 NR Description: 60S ribosomal protein L3 (RPL3B) [Arabidopsis
  misc_feature (1)..(389): Homolog of NCBI NO: 81658 NR Description: ribosomal protein L3.e (clone ARP2), cytosolic -
  misc_feature (1)..(387): Homolog of NCBI NO: 15218306 NR Description: 60S ribosomal protein L3 (RPL3A) [Arabidopsis
  misc_feature (1)..(387): Homolog of NCBI NO: 81657 NR Description: ribosomal protein L3.e (clone ARP1), cytosolic -
  misc_feature (1)..(388): Homolog of NCBI NO: 4506649 NR Description: ribosomal protein L3
  misc_feature (1)..(387): Homolog of NCBI NO: 15218306 NR Description: 60S ribosomal protein L3 (RPL3A) [Arabidopsis
  misc_feature (1)..(389): Homolog of NCBI NO: 81658 NR Description: ribosomal protein L3.e (clone ARP2), cytosolic -
  misc_feature (1)..(389): Homolog of NCBI NO: 15220533 NR Description: 60S ribosomal protein L3 (RPL3B) [Arabidopsis
  misc_feature (1)..(381): Homolog of NCBI NO: 6688812 NR Description: L3 Ribosomal protein [Medicago sativa subsp. x
  misc_feature (1)..(389): Homolog of NCBI NO: 548770 NR Description: 60S RIBOSOMAL PROTEIN L3
MSHRKFEHPRHGSLGFLPRKRSSRHRGKVKSFPRDDPKKPCHLTAFLGYKAGMTHIVREVEKPGSKLHKKETCEAVTIIETPPLVIVGLVAYVKTPRGLRTLNSVWAQHLSEEVRRRFYKNWCKSKKKAFTKYALKYENDAGKKEIQLQLEKMKKYASVIRVIAHTQIRKMKGLKQKKAHLMEIQVNGGTIADKVDYGYKFFEKEVPVDAVFQKDEMIDIIGVTKGKGYEGVVTRWGVTRLPRKTHRGLRKVACIGAWHPARVSYTVARAGQNGYHHRTEMNKKVYKIGKAGQETHDASTEFDRTEKDITPMGGFPHYGIVKGDYLMIKGCCVGPKKRVVTLRQSLLKQTSRLALEEIKLKFIDTSSKFGHGRFQTTDEKQRFFGKLKA

SEQ ID NO: 2422 - protein, 337 aa, Zea mays subsp. mays
  peptide (1)..(337): Ceres Seq. ID no. 13493058
  misc_feature (1)..(291): Pfam Name: Ribosomal protein L3 Pfam Description: Ribosomal protein L3
  misc_feature (1)..(291): Pfam Name: Ribosomal protein L3 Pfam Description: Ribosomal protein L3
  misc_feature (1)..(336): Homolog of NCBI NO: 22203712 NR Description: ribosomal protein L3 [Chlamys farreri]
  misc_feature (1)..(336): Homolog of NCBI NO: 4506649 NR Description: ribosomal protein L3
  misc_feature (1)..(336): Homolog of NCBI NO: 7305441 NR Description: ribosomal protein L3; ribosomal protein L3
  misc_feature (1)..(335): Homolog of NCBI NO: 81657 NR Description: ribosomal protein L3.e (clone ARP1), cytosolic -
  misc_feature (1)..(335): Homolog of NCBI NO: 23397228 NR Description: putative ribosomal protein [Arabidopsis thaliana]
  misc_feature (1)..(336): Homolog of NCBI NO: 22203712 NR Description: ribosomal protein L3 [Chlamys farreri]
  misc_feature (1)..(336): Homolog of NCBI NO: 7305441 NR Description: ribosomal protein L3; ribosomal protein L3
  misc_feature (1)..(335): Homolog of NCBI NO: 23397228 NR Description: putative ribosomal protein [Arabidopsis thaliana]
  misc_feature (1)..(337): Homolog of NCBI NO: 548770 NR Description: 60S RIBOSOMAL PROTEIN L3
  misc_feature (1)..(329): Homolog of NCBI NO: 6688812 NR Description: L3 Ribosomal protein [Medicago sativa subsp. x
  misc_feature (1)..(337): Homolog of NCBI NO: 15220533 NR Description: 60S ribosomal protein L3 (RPL3B) [Arabidopsis
  misc_feature (1)..(337): Homolog of NCBI NO: 81658 NR Description: ribosomal protein L3.e (clone ARP2), cytosolic -
  misc_feature (1)..(335): Homolog of NCBI NO: 15218306 NR Description: 60S ribosomal protein L3 (RPL3A) [Arabidopsis
  misc_feature (1)..(335): Homolog of NCBI NO: 81657 NR Description: ribosomal protein L3.e (clone ARP1), cytosolic -
  misc_feature (1)..(336): Homolog of NCBI NO: 4506649 NR Description: ribosomal protein L3
  misc_feature (1)..(335): Homolog of NCBI NO: 15218306 NR Description: 60S ribosomal protein L3 (RPL3A) [Arabidopsis
  misc_feature (1)..(337): Homolog of NCBI NO: 81658 NR Description: ribosomal protein L3.e (clone ARP2), cytosolic -
  misc_feature (1)..(337): Homolog of NCBI NO: 15220533 NR Description: 60S ribosomal protein L3 (RPL3B) [Arabidopsis
  misc_feature (1)..(329): Homolog of NCBI NO: 6688812 NR Description: L3 Ribosomal protein [Medicago sativa subsp. x
  misc_feature (1)..(337): Homolog of NCBI NO: 548770 NR Description: 60S RIBOSOMAL PROTEIN L3
MTHIVREVEKPGSKLHKKETCEAVTIIETPPLVIVGLVAYVKTPRGLRTLNSVWAQHLSEEVRRRFYKNWCKSKKKAFTKYALKYENDAGKKEIQLQLEKMKKYASVIRVIAHTQIRKMKGLKQKKAHLMEIQVNGGTIADKVDYGYKFFEKEVPVDAVFQKDEMIDIIGVTKGKGYEGVVTRWGVTRLPRKTHRGLRKVACIGAWHPARVSYTVARAGQNGYHHRTEMNKKVYKIGKAGQETHDASTEFDRTEKDITPMGGFPHYGIVKGDYLMIKGCCVGPKKRVVTLRQSLLKQTSRLALEEIKLKFIDTSSKFGHGRFQTTDEKQRFFGKLKA

SEQ ID NO: 2423 - protein, 237 aa, Zea mays subsp. mays
  peptide (1)..(237): Ceres Seq. ID no. 13493059
  misc_feature (1)..(191): Pfam Name: Ribosomal protein L3 Pfam Description: Ribosomal protein L3
  misc_feature (1)..(191): Pfam Name: Ribosomal protein L3 Pfam Description: Ribosomal protein L3
  misc_feature (1)..(237): Homolog of NCBI NO: 15220533 NR Description: 60S ribosomal protein L3 (RPL3B) [Arabidopsis
  misc_feature (1)..(229): Homolog of NCBI NO: 6688812 NR Description: L3 Ribosomal protein [Medicago sativa subsp. x
  misc_feature (1)..(236): Homolog of NCBI NO: 4506649 NR Description: ribosomal protein L3
  misc_feature (1)..(235): Homolog of NCBI NO: 81657 NR Description: ribosomal protein L3.e (clone ARP1), cytosolic -
  misc_feature (1)..(235): Homolog of NCBI NO: 15218306 NR Description: 60S ribosomal protein L3 (RPL3A) [Arabidopsis
  misc_feature (1)..(236): Homolog of NCBI NO: 22203712 NR Description: ribosomal protein L3 [Chlamys farreri]
  misc_feature (1)..(236): Homolog of NCBI NO: 7305441 NR Description: ribosomal protein L3; ribosomal protein L3
  misc_feature (1)..(235): Homolog of NCBI NO: 23397228 NR Description: putative ribosomal protein [Arabidopsis thaliana]
  misc_feature (1)..(237): Homolog of NCBI NO: 548770 NR Description: 60S RIBOSOMAL PROTEIN L3
  misc_feature (1)..(229): Homolog of NCBI NO: 6688812 NR Description: L3 Ribosomal protein [Medicago sativa subsp. x
  misc_feature (1)..(237): Homolog of NCBI NO: 15220533 NR Description: 60S ribosomal protein L3 (RPL3B) [Arabidopsis
  misc_feature (1)..(237): Homolog of NCBI NO: 81658 NR Description: ribosomal protein L3.e (clone ARP2), cytosolic -
  misc_feature (1)..(235): Homolog of NCBI NO: 15218306 NR Description: 60S ribosomal protein L3 (RPL3A) [Arabidopsis
  misc_feature (1)..(235): Homolog of NCBI NO: 81657 NR Description: ribosomal protein L3.e (clone ARP1), cytosolic -
  misc_feature (1)..(236): Homolog of NCBI NO: 4506649 NR Description: ribosomal protein L3
  misc_feature (1)..(237): Homolog of NCBI NO: 81658 NR Description: ribosomal protein L3.e (clone ARP2), cytosolic -
  misc_feature (1)..(235): Homolog of NCBI NO: 23397228 NR Description: putative ribosomal protein [Arabidopsis thaliana]
  misc_feature (1)..(236): Homolog of NCBI NO: 7305441 NR Description: ribosomal protein L3; ribosomal protein L3
  misc_feature (1)..(236): Homolog of NCBI NO: 22203712 NR Description: ribosomal protein L3 [Chlamys farreri]
  misc_feature (1)..(237): Homolog of NCBI NO: 548770 NR Description: 60S RIBOSOMAL PROTEIN L3
MKKYASVIRVIAHTQIRKMKGLKQKKAHLMEIQVNGGTIADKVDYGYKFFEKEVPVDAVFQKDEMIDIIGVTKGKGYEGVVTRWGVTRLPRKTHRGLRKVACIGAWHPARVSYTVARAGQNGYHHRTEMNKKVYKIGKAGQETHDASTEFDRTEKDITPMGGFPHYGIVKGDYLMIKGCCVGPKKRVVTLRQSLLKQTSRLALEEIKLKFIDTSSKFGHGRFQTTDEKQRFFGKLKA

SEQ ID NO: 2424 - DNA, 1103 bp, Zea mays subsp. mays
  misc_feature (1)..(1103): Ceres Seq. ID no. 12407827
  misc_feature: MA Experiment ID: 108535 Result: Up-regulated in Transcription
  misc_feature: MA Experiment 108535 PARAMETER Experiment Name: Zm_Meristem_P Parameter: Age (day) Value: 8
  misc_feature: MA Experiment 108535 PARAMETER Experiment Name: Zm_Meristem_P Parameter: Organism Value: Zea mays
  misc_feature: MA Experiment 108535 PARAMETER Experiment Name: Zm_Meristem_P Parameter: Plant Line Value: 35A19
  misc_feature: MA Experiment 108535 PARAMETER Experiment Name: Zm_Meristem_P Parameter: Tissue Value: Root Meristem vs. Above Root Meristem
  misc_feature: MA Experiment ID: 20000108 Result: Up-regulated in Transcription
  misc_feature: MA Experiment 20000108 PARAMETER Experiment Name: Zm_Root-Tips_P Parameter: Age (day) Value: 12
  misc_feature: MA Experiment 20000108 PARAMETER Experiment Name: Zm_Root-Tips_P Parameter: Organism Value: Zea mays
  misc_feature: MA Experiment 20000108 PARAMETER Experiment Name: Zm_Root-Tips_P Parameter: Tissue Value: Root tips vs. Root mid region    35
  misc_feature: MA Experiment 20000108 PARAMETER Experiment Name: Zm_Root-Tips_P Parameter: Tissue Value: Root tips vs. Root mid region   Sequence Listing-Misc Features (4)
atggcggtgaccacttaagcgtggtggcttctgagttttgcctcgatttcgattctttctttttcccccacgtgcgccgccgcgaccttcctcgatcccatctcccaacgcccccgcctcgcctcgggatcccgccgccgctccatctgcctttgctcccccacccgcaggcagcgagcgacagcgacggcgagggatggccaaggccaggtcgttggcgaagcagaagcaggcgcagcaatcaaacggcggcggcggccacgcgctgtcctccaagctcgcccggtacctcgacccggaggcctccttggacaaggaccaactgctggacgcggtgcactggatccgccaggcggtggggctcatatgcggcctgctctggggagccgtccccgtcgtcggcgccgtctggatcgcactatttatggccatctcgactggcattatctattggtactacacctacttgctgaaggttgacgaggaggaatatggaggccatggggcgcttcttcaggagggtcttttcgcttcattcacccttttcctgctttcgtggactctagtatacagtctggctcacttctgagaagctcctttggcgcacatacctttgttcactgtgccagacagaaaagactcaccaggacagtgtagactaaggagcttctcagaagttgagcgagatgagctgatcaaagtccacgaggacaagaagttgaagctcaagaaagaatacatggatctggagctggagctggagaaggagtttgacgcagccctgacgggcctgatggagaagcataagccagataccttcgaggcctccagctcgtaagggggcttcagcggctaagcgctttccttaggccccagctaagcttggagcagtctcgtacatgctcctgcttgcttatccatgaaataatgcctggacagtctgtagatgttgcgaaaacatggtgccccctgtggttgccgcgtgtgtagtaagtatctctcagtcgtagtgtggttgaagcatctgaactcttgagcggtttgcctgtgatggcatatgggtcaaactacaactggagtgtgatatctagtttatatggtcc

SEQ ID NO: 2425 - protein, 156 aa, Zea mays subsp. mays
  peptide (1)..(156): Ceres Seq. ID no. 12407828
GGDHLSVVASEFCLDFDSFFFPHVRRRDLPRSHLPTPPPRLGIPPPLHLPLLPHPQAASDSDGEGWPRPGRWRSRSRRSNQTAAAATRCPPSSPGTSTRRPPWTRTNCWTRCTGSARRWGSYAACSGEPSPSSAPSGSHYLWPSRLALSIGTTPTC

SEQ ID NO: 2426 - protein, 130 aa, Zea mays subsp. mays
  peptide (1)..(130): Ceres Seq. ID no. 12407829
  misc_feature (1)..(129): Homolog of NCBI NO: 24211596 NR Description: Protein C20orf24 (Rab5-interacting protein)
  misc_feature (1)..(129): Homolog of NCBI NO: 34872254 NR Description: similar to RIKEN cDNA 1110008F13 [Rattus
  misc_feature (6)..(130): Homolog of NCBI NO: 27503935 NR Description: Similar to RIKEN cDNA 1110008F13 gene [Danio
  misc_feature (1)..(130): Homolog of NCBI NO: 27704314 NR Description: similar to RIKEN cDNA 1110008F13
  misc_feature (1)..(130): Homolog of NCBI NO: 10047116 NR Description: putative Rab5-interacting protein [Homo sapiens]
  misc_feature (1)..(130): Homolog of NCBI NO: 13385630 NR Description: RIKEN cDNA 1110008F13 [Mus musculus]
  misc_feature (1)..(118): Homolog of NCBI NO: 8885547 NR Description: gb|AAF17201.1~gene_id:F2O15.9~similar to unknown
  misc_feature (4)..(130): Homolog of NCBI NO: 18401926 NR Description: expressed protein
  misc_feature (1)..(130): Homolog of NCBI NO: 15238396 NR Description: putative Rab5-interacting protein - like; protein
  misc_feature (1)..(119): Homolog of NCBI NO: 14719336 NR Description: hypothetical protein [Oryza sativa]
MAKARSLAKQKQAQQSNGGGGHALSSKLARYLDPEASLDKDQLLDAVHWIRQAVGLICGLLWGAVPVVGAVWIALFMAISTGIIYWYYTYLLKVDEEEYGGHGALLQEGLFASFTLFLLSWTLVYSLAHF

SEQ ID NO: 2427 - DNA, 1290 bp, Zea mays subsp. mays
  misc_feature (1)..(1290): Ceres Seq. ID no. 12410757
  misc_feature: MA Experiment ID: 108522 Result: Down-regulated in Transcription
  misc_feature: MA Experiment 108522 PARAMETER Experiment Name: Zm_42deg_Heat_P Parameter: Age (day) Value: 8
  misc_feature: MA Experiment 108522 PARAMETER Experiment Name: Zm_42deg_Heat_P Parameter: Organism Value: Zea mays
  misc_feature: MA Experiment 108522 PARAMETER Experiment Name: Zm_42deg_Heat_P Parameter: Plant Line Value: 35A19
  misc_feature: MA Experiment 108522 PARAMETER Experiment Name: Zm_42deg_Heat_P Parameter: Temperature (deg C) Value: 42 vs. 22
  misc_feature: MA Experiment 108522 PARAMETER Experiment Name: Zm_42deg_Heat_P Parameter: Timepoint (hr) Value: 1
  misc_feature: MA Experiment 108522 PARAMETER Experiment Name: Zm_42deg_Heat_P Parameter: Tissue Value: Aerial
gaatttgttcctcgtttcgttgccagcccaatcggttcagtttcggcggtaacaagatcaactgcggtcgccagtcgattctgtgagcctgccagccatggagttgtccagttccgtctcgtccacggcggcggcggcggcgcaggcgcggctgctccggccgccgtcgtttcgccagccggggccggcgggattcgtgtcctgtaggagttacgctataaggagcaaactggtgagggcgatgcctccgatccttgctagcttccagcctgcatctcctcggtacccaagctttcaagacgcaaatggcaaaagacgaaatgttccttgttatcagagacaacaaaccccgcaggtagaagccaggtcgatggaggaggtatatgacgctttggctgaacaccttctttcggtcttgaagaatattgaacatcttgattcaaaatacattgttggtctagctggcccacctggtgctggcaagtccacagttgcctctgaagttgttcgacgtgttaatacattttggtcccagaagcacacaaagggtagtggagcaccgcttcctaccaaggaaattgctgcaatgcttccaatggatggtttccacctttatcgtgcccagcttgatgcaatggaggatccaaaagaagcacatgcaagaagaggagcaccctggacattcaatccatcactgtttctgaaatgtctacatacactaagaacagagggttcagtttatgctccatcatttgatcatggtgttggcgacccagttgagaatgacatatttgtaaagccacagcacaaaatagtgatagttgaagggaactatctgttactggaagaagatgtttggaccgaaattagagacttgtttgatgagaaatggttcattgacattgacatcgatatctccatgcaaagagtgctcaagagacatattgcaaccggaaaagagccagatgtagcagcatggaggatctcctacaacgaccgaccgaatgcagagcttatcctggaatcaaggaagaatgctgaccttgtgatcagatcagtagacttctcaagctagtgttcaattctttcaataggaaatagcattgtggttctagagttggaggttgttgtgggctgtttccgtggagattcctgtacatataataagctgaatgcctgtttcaaattttcatggtgattgtgttgcatgtaataagatattccttcactatgtaccgtggaggattgttaagtaatttattgacattttttaatagaaacacccttcag

SEQ ID NO: 2428 - protein, 325 aa, Zea mays subsp. mays
  peptide (1)..(325): Ceres Seq. ID no. 12410758
  misc_feature (118)..(321): Pfam Name: Phosphoribulokinase / Uridine kinase family Pfam Description: Phosphoribulokinase / Uridine kinase family
  misc_feature (160)..(318): Homolog of NCBI NO: 15887420 NR Description: AGR_C_100p [Agrobacterium tumefaciens]
  misc_feature (162)..(319): Homolog of NCBI NO: 40740541 NR Description: hypothetical protein AN8109.2 [Aspergillus
  misc_feature (84)..(172): Homolog of NCBI NO: 23500977 NR Description: kinase-related protein [Brucella suis 1330]
  misc_feature (150)..(318): Homolog of NCBI NO: 23500977 NR Description: kinase-related protein [Brucella suis 1330]
  misc_feature (116)..(305): Homolog of NCBI NO: 38108268 NR Description: hypothetical protein MG02303.4 [Magnaporthe
  misc_feature (86)..(321): Homolog of NCBI NO: 19113880 NR Description: similarity to uridine kinase [Schizosaccharomyces
  misc_feature (114)..(320): Homolog of NCBI NO: 40741109 NR Description: hypothetical protein AN4382.2 [Aspergillus
  misc_feature (214)..(322): Homolog of NCBI NO: 25363622 NR Description: hypothetical protein F10O3.15 - Arabidopsis
  misc_feature (76)..(191): Homolog of NCBI NO: 25363622 NR Description: hypothetical protein F10O3.15 - Arabidopsis
  misc_feature (72)..(322): Homolog of NCBI NO: 15218676 NR Description: unknown protein; protein id: At1g03030.1
MELSSSVSSTAAAAAQARLLRPPSFRQPGPAGFVSCRSYAIRSKLVRAMPPILASFQPASPRYPSFQDANGKRRNVPCYQRQQTPQVEARSMEEVYDALAEHLLSVLKNIEHLDSKYIVGLAGPPGAGKSTVASEVVRRVNTFWSQKHTKGSGAPLPTKEIAAMLPMDGFHLYRAQLDAMEDPKEAHARRGAPWTFNPSLFLKCLHTLRTEGSVYAPSFDHGVGDPVENDIFVKPQHKIVIVEGNYLLLEEDVWTEIRDLFDEKWFIDIDIDISMQRVLKRHIATGKEPDVAAWRISYNDRPNAELILESRKNADLVIRSVDFSS

SEQ ID NO: 2429 - protein, 277 aa, Zea mays subsp. mays
  peptide (1)..(277): Ceres Seq. ID no. 12410759
  misc_feature (70)..(273): Pfam Name: Phosphoribulokinase / Uridine kinase family Pfam Description: Phosphoribulokinase / Uridine kinase family
  misc_feature (112)..(270): Homolog of NCBI NO: 15887420 NR Description: AGR_C_100p [Agrobacterium tumefaciens]
  misc_feature (114)..(271): Homolog of NCBI NO: 40740541 NR Description: hypothetical protein AN8109.2 [Aspergillus
  misc_feature (36)..(124): Homolog of NCBI NO: 23500977 NR Description: kinase-related protein [Brucella suis 1330]
  misc_feature (102)..(270): Homolog of NCBI NO: 23500977 NR Description: kinase-related protein [Brucella suis 1330]
  misc_feature (68)..(257): Homolog of NCBI NO: 38108268 NR Description: hypothetical protein MG02303.4 [Magnaporthe
  misc_feature (38)..(273): Homolog of NCBI NO: 19113880 NR Description: similarity to uridine kinase [Schizosaccharomyces
  misc_feature (66)..(272): Homolog of NCBI NO: 40741109 NR Description: hypothetical protein AN4382.2 [Aspergillus
  misc_feature (166)..(274): Homolog of NCBI NO: 25363622 NR Description: hypothetical protein F10O3.15 - Arabidopsis
  misc_feature (28)..(143): Homolog of NCBI NO: 25363622 NR Description: hypothetical protein F10O3.15 - Arabidopsis
  misc_feature (24)..(274): Homolog of NCBI NO: 15218676 NR Description: unknown protein; protein id: At1g03030.1
MPPILASFQPASPRYPSFQDANGKRRNVPCYQRQQTPQVEARSMEEVYDALAEHLLSVLKNIEHLDSKYIVGLAGPPGAGKSTVASEVVRRVNTFWSQKHTKGSGAPLPTKEIAAMLPMDGFHLYRAQLDAMEDPKEAHARRGAPWTFNPSLFLKCLHTLRTEGSVYAPSFDHGVGDPVENDIFVKPQHKIVIVEGNYLLLEEDVWTEIRDLFDEKWFIDIDIDISMQRVLKRHIATGKEPDVAAWRISYNDRPNAELILESRKNADLVIRSVDFSS

SEQ ID NO: 2430 - protein, 234 aa, Zea mays subsp. mays
  peptide (1)..(234): Ceres Seq. ID no. 12410760
  misc_feature (27)..(230): Pfam Name: Phosphoribulokinase / Uridine kinase family Pfam Description: Phosphoribulokinase / Uridine kinase family
  misc_feature (69)..(227): Homolog of NCBI NO: 15887420 NR Description: AGR_C_100p [Agrobacterium tumefaciens]
  misc_feature (71)..(228): Homolog of NCBI NO: 40740541 NR Description: hypothetical protein AN8109.2 [Aspergillus
  misc_feature (1)..(81): Homolog of NCBI NO: 23500977 NR Description: kinase-related protein [Brucella suis 1330]
  misc_feature (59)..(227): Homolog of NCBI NO: 23500977 NR Description: kinase-related protein [Brucella suis 1330]
  misc_feature (25)..(214): Homolog of NCBI NO: 38108268 NR Description: hypothetical protein MG02303.4 [Magnaporthe
  misc_feature (1)..(230): Homolog of NCBI NO: 19113880 NR Description: similarity to uridine kinase [Schizosaccharomyces
  misc_feature (23)..(229): Homolog of NCBI NO: 40741109 NR Description: hypothetical protein AN4382.2 [Aspergillus
  misc_feature (123)..(231): Homolog of NCBI NO: 25363622 NR Description: hypothetical protein F10O3.15 - Arabidopsis
  misc_feature (1)..(100): Homolog of NCBI NO: 25363622 NR Description: hypothetical protein F10O3.15 - Arabidopsis
  misc_feature (1)..(231): Homolog of NCBI NO: 15218676 NR Description: unknown protein; protein id: At1g03030.1
MEEVYDALAEHLLSVLKNIEHLDSKYIVGLAGPPGAGKSTVASEVVRRVNTFWSQKHTKGSGAPLPTKEIAAMLPMDGFHLYRAQLDAMEDPKEAHARRGAPWTFNPSLFLKCLHTLRTEGSVYAPSFDHGVGDPVENDIFVKPQHKIVIVEGNYLLLEEDVWTEIRDLFDEKWFIDIDIDISMQRVLKRHIATGKEPDVAAWRISYNDRPNAELILESRKNADLVIRSVDFSS

SEQ ID NO: 2431 - DNA, 1632 bp, Zea mays subsp. mays
  misc_feature (1)..(1632): Ceres Seq. ID no. 12410754
  misc_feature: MA Experiment ID: 108527 Result: Down-regulated in Transcription
  misc_feature: MA Experiment 108527 PARAMETER Experiment Name: Zm_5mM_NO_P Parameter: Age (day) Value: 8
  misc_feature: MA Experiment 108527 PARAMETER Experiment Name: Zm_5mM_NO_P Parameter: Organism Value: Zea mays
  misc_feature: MA Experiment 108527 PARAMETER Experiment Name: Zm_5mM_NO_P Parameter: Plant Line Value: 35A19
  misc_feature: MA Experiment 108527 PARAMETER Experiment Name: Zm_5mM_NO_P Parameter: Timepoint (hr) Value: 6
  misc_feature: MA Experiment 108527 PARAMETER Experiment Name: Zm_5mM_NO_P Parameter: Tissue Value: Aerial
  misc_feature: MA Experiment 108527 PARAMETER Experiment Name: Zm_5mM_NO_P Parameter: Treatment Value: 5mM NO vs. No Treatment
  misc_feature: MA Experiment ID: 108535 Result: Down-regulated in Transcription
  misc_feature: MA Experiment 108535 PARAMETER Experiment Name: Zm_Meristem_P Parameter: Age (day) Value: 8
  misc_feature: MA Experiment 108535 PARAMETER Experiment Name: Zm_Meristem_P Parameter: Organism Value: Zea mays
  misc_feature: MA Experiment 108535 PARAMETER Experiment Name: Zm_Meristem_P Parameter: Plant Line Value: 35A19
  misc_feature: MA Experiment 108535 PARAMETER Experiment Name: Zm_Meristem_P Parameter: Tissue Value: Root Meristem vs. Above Root Meristem
  misc_feature: MA Experiment ID: 108536 Result: Up-regulated in Transcription
  misc_feature: MA Experiment 108536 PARAMETER Experiment Name: Zm_Meristem_P Parameter: Age (day) Value: 8
  misc_feature: MA Experiment 108536 PARAMETER Experiment Name: Zm_Meristem_P Parameter: Organism Value: Zea mays
  misc_feature: MA Experiment 108536 PARAMETER Experiment Name: Zm_Meristem_P Parameter: Plant Line Value: 35A19
  misc_feature: MA Experiment 108536 PARAMETER Experiment Name: Zm_Meristem_P Parameter: Tissue Value: Shoot Meristem vs. Above Shoot Meristem
  misc_feature: MA Experiment ID: 20000479 Result: Up-regulated in Transcription
  misc_feature: MA Experiment 20000479 PARAMETER Experiment Name: Zm_Drought_P Parameter: Age (day) Value: 10
  misc_feature: MA Experiment 20000479 PARAMETER Experiment Name: Zm_Drought_P Parameter: Organism Value: Zea mays
  misc_feature: MA Experiment 20000479 PARAMETER Experiment Name: Zm_Drought_P Parameter: Plant Line Value: 35A19
  misc_feature: MA Experiment 20000479 PARAMETER Experiment Name: Zm_Drought_P Parameter: Timepoint (hr) Value: 48
  misc_feature: MA Experiment 20000479 PARAMETER Experiment Name: Zm_Drought_P Parameter: Tissue Value: Aerial
  misc_feature: MA Experiment 20000479 PARAMETER Experiment Name: Zm_Drought_P Parameter: Treatment Value: Drought vs. No Drought
  misc_feature: MA Experiment ID: 20000480 Result: Up-regulated in Transcription
  misc_feature: MA Experiment 20000480 PARAMETER Experiment Name: Zm_Drought_P Parameter: Age (day) Value: 11
  misc_feature: MA Experiment 20000480 PARAMETER Experiment Name: Zm_Drought_P Parameter: Organism Value: Zea mays
  misc_feature: MA Experiment 20000480 PARAMETER Experiment Name: Zm_Drought_P Parameter: Plant Line Value: 35A19
  misc_feature: MA Experiment 20000480 PARAMETER Experiment Name: Zm_Drought_P Parameter: Timepoint (hr) Value: 72
  misc_feature: MA Experiment 20000480 PARAMETER Experiment Name: Zm_Drought_P Parameter: Tissue Value: Aerial
  misc_feature: MA Experiment 20000480 PARAMETER Experiment Name: Zm_Drought_P Parameter: Treatment Value: Drought vs. No Drought
  misc_feature: MA Experiment ID: 20000492 Result: Up-regulated in Transcription
  misc_feature: MA Experiment 20000492 PARAMETER Experiment Name: Zm_Hybrid_Seed_Dev_P Parameter: DAP Value: 12
  misc_feature: MA Experiment 20000492 PARAMETER Experiment Name: Zm_Hybrid_Seed_Dev_P Parameter: Organism Value: Zea mays
  misc_feature: MA Experiment 20000492 PARAMETER Experiment Name: Zm_Hybrid_Seed_Dev_P Parameter: Plant Line Value: 35A19
  misc_feature: MA Experiment 20000492 PARAMETER Experiment Name: Zm_Hybrid_Seed_Dev_P Parameter: Tissue Value: Fert Kernel vs. Unfert Floret
  misc_feature: MA Experiment ID: 20000535 Result: Up-regulated in Transcription
  misc_feature: MA Experiment 20000535 PARAMETER Experiment Name: Zm_Hybrid_Seed_Dev_P Parameter: DAP Value: 30 vs. 12
  misc_feature: MA Experiment 20000535 PARAMETER Experiment Name: Zm_Hybrid_Seed_Dev_P Parameter: Organism Value: Zea mays
  misc_feature: MA Experiment 20000535 PARAMETER Experiment Name: Zm_Hybrid_Seed_Dev_P Parameter: Plant Line Value: 35A19
  misc_feature: MA Experiment 20000535 PARAMETER Experiment Name: Zm_Hybrid_Seed_Dev_P Parameter: Tissue Value: Embryo vs. Unfert Floret
agacgtgcagccagcgccggggcgtccagctaactcgcaaacatttttataacccgagcacgcgtcagacatgggaaacggcggtgggactggcgataagacgaagacgaaggcgacaggagggctcaccggtcgcgaatcctcctcctccagccacgcctcgaaacggcgtcggggcctgcgcggcgagtccatggctgatcgcttcattcccaatgactttcctgacttcgtcgccgaggctgaggcctccgacggcgaggggcaccgccccgcagggcatcggggcctgctctcgcttccgtacaccaggctctccgaccacttcgtccgcgccgcgcgccgcctcaaggacaaggtggttgaggagacgtgggtgaaagccggacggaaggtgacggactacacgctctacacgggctctctcgggacagcgctgctgctgttcaagtccttccaggtcactggagaccgcggggacctcgccctcgccgctgatatcgtccgcgcgtgcgatgatgcatcgcggggcctgccgttcttgacattcatatgcgggagggcgggtgtctgcgctcttggggcggtgattgccaagcattgcgatgatcagctgagggtcactcagtatctgagctcctttgatgagataacaatcaccgagaaagttccaaatgagttgctgtatggaagggcaggctatctgtgggcttgtttgttcttgaataagcatctcagcgagaagacgatccctctcgatcacattaattctgtggcgaaggacattattaatgagggaagaggttttgcaagcaaggggagtagccctctgatgtacgaatggcatgggaagaaatactggggggctgcgcatggtcttgctggaatcatgcacgtgctaatgcacaccgaactgaaaccagatgagcaggatgatgtaaagaacaccctgcggtatatgatcaaaaacaagtttcctagtggcaattatccctcaagtgaaggcaatgaatcagatcacttggtgcactggtgtcatggtgccccaggtgttgctcttacccttgctaaagcatatgaggtcttccatgatgattatttcgagcaatcagctgcagaggctgctgaggttgtctggaaccgagggcttctgaagagagtcggaatatgccacggtgtaagcgggaatgcctatgcgtttctctcactctacaggctaaccggtaatgttgagtacctctaccgggcaaaggcttttgcctgctttcttctggagaaagctgatcagttgatagccgagggggccatgcatggtggtgatcgcccgttttcactgtttgaagggaaagctgggatgtcatacctcctcttggacatggttgatccatctgaatcaaggttccctgcgtatgaactttgagatatactattaccctgcgacttgtgaggctgttcgatgatccatcagtcacgaaaactctgtttgtattttctcgtctagtatgtgatgtgtgcttagacctcggtggtctgttgtgtttgtagatttggcgttcgtgatgttgcaaacttgaatcttctgtgaagtatgtgtgaccatcacattctgctaaatagattataatctcaaac

SEQ ID NO: 2432 - protein, 449 aa, Zea mays subsp. mays
  peptide (1)..(449): Ceres Seq. ID no. 12410755
  misc_feature (93)..(449): Pfam Name: Lanthionine synthetase C-like protein Pfam Description: Lanthionine synthetase C-like protein
  misc_feature (81)..(449): Homolog of NCBI NO: 19584353 NR Description: hypothetical protein [Homo sapiens]
  misc_feature (81)..(449): Homolog of NCBI NO: 8923911 NR Description: LanC lantibiotic synthetase component C-like 2
  misc_feature (73)..(449): Homolog of NCBI NO: 19526936 NR Description: RIKEN cDNA 1700003F10 [Mus musculus]
  misc_feature (109)..(449): Homolog of NCBI NO: 15451140 NR Description: G protein-coupled receptor-like protein
  misc_feature (109)..(449): Homolog of NCBI NO: 15238395 NR Description: G protein-coupled receptor-like protein
  misc_feature (99)..(449): Homolog of NCBI NO: 8489877 NR Description: putative 7-transmembrane G-protein-coupled
  misc_feature (93)..(449): Homolog of NCBI NO: 25411993 NR Description: hypothetical protein At2g20770 [imported] -
  misc_feature (74)..(449): Homolog of NCBI NO: 15219126 NR Description: putative G protein-coupled receptor; protein id:
  misc_feature (42)..(449): Homolog of NCBI NO: 30681129 NR Description: expressed protein [Arabidopsis thaliana]
  misc_feature (1)..(449): Homolog of NCBI NO: 37535720 NR Description: putative lanthionine synthetase
MGNGGGTGDKTKTKATGGLTGRESSSSSHASKRRRGLRGESMADRFIPNDFPDFVAEAEASDGEGHRPAGHRGLLSLPYTRLSDHFVRAARRLKDKVVEETWVKAGRKVTDYTLYTGSLGTALLLFKSFQVTGDRGDLALAADIVRACDDASRGLPFLTFICGRAGVCALGAVIAKHCDDQLRVTQYLSSFDEITITEKVPNELLYGRAGYLWACLFLNKHLSEKTIPLDHINSVAKDIINEGRGFASKGSSPLMYEWHGKKYWGAAHGLAGIMHVLMHTELKPDEQDDVKNTLRYMIKNKFPSGNYPSSEGNESDHLVHWCHGAPGVALTLAKAYEVFHDDYFEQSAAEAAEVVWNRGLLKRVGICHGVSGNAYAFLSLYRLTGNVEYLYRAKAFACFLLEKADQLIAEGAMHGGDRPFSLFEGKAGMSYLLLDMVDPSESRFPAYEL

SEQ ID NO: 2433 - protein, 408 aa, Zea mays subsp. mays
  peptide (1)..(408): Ceres Seq. ID no. 12410756
  misc_feature (52)..(408): Pfam Name: Lanthionine synthetase C-like protein Pfam Description: Lanthionine synthetase C-like protein
  misc_feature (40)..(408): Homolog of NCBI NO: 19584353 NR Description: hypothetical protein [Homo sapiens]
  misc_feature (40)..(408): Homolog of NCBI NO: 8923911 NR Description: LanC lantibiotic synthetase component C-like 2
  misc_feature (32)..(408): Homolog of NCBI NO: 19526936 NR Description: RIKEN cDNA 1700003F10 [Mus musculus]
  misc_feature (68)..(408): Homolog of NCBI NO: 15451140 NR Description: G protein-coupled receptor-like protein
  misc_feature (68)..(408): Homolog of NCBI NO: 15238395 NR Description: G protein-coupled receptor-like protein
  misc_feature (58)..(408): Homolog of NCBI NO: 8489877 NR Description: putative 7-transmembrane G-protein-coupled
  misc_feature (52)..(408): Homolog of NCBI NO: 25411993 NR Description: hypothetical protein At2g20770 [imported] -
  misc_feature (33)..(408): Homolog of NCBI NO: 15219126 NR Description: putative G protein-coupled receptor; protein id:
  misc_feature (1)..(408): Homolog of NCBI NO: 30681129 NR Description: expressed protein [Arabidopsis thaliana]
  misc_feature (1)..(408): Homolog of NCBI NO: 37535720 NR Description: putative lanthionine synthetase
MADRFIPNDFPDFVAEAEASDGEGHRPAGHRGLLSLPYTRLSDHFVRAARRLKDKVVEETWVKAGRKVTDYTLYTGSLGTALLLFKSFQVTGDRGDLALAADIVRACDDASRGLPFLTFICGRAGVCALGAVIAKHCDDQLRVTQYLSSFDEITITEKVPNELLYGRAGYLWACLFLNKHLSEKTIPLDHINSVAKDIINEGRGFASKGSSPLMYEWHGKKYWGAAHGLAGIMHVLMHTELKPDEQDDVKNTLRYMIKNKFPSGNYPSSEGNESDHLVHWCHGAPGVALTLAKAYEVFHDDYFEQSAAEAAEVVWNRGLLKRVGICHGVSGNAYAFLSLYRLTGNVEYLYRAKAFACFLLEKADQLIAEGAMHGGDRPFSLFEGKAGMSYLLLDMVDPSESRFPAYEL

SEQ ID NO: 2434 - DNA, 1479 bp, Zea mays subsp. mays
  misc_feature (1)..(1479): Ceres Seq. ID no. 12410751
  misc_feature: MA Experiment ID: 108528 Result: Up-regulated in Transcription
  misc_feature: MA Experiment 108528 PARAMETER Experiment Name: Zm_Imbibed_Seeds_P Parameter: Age (day) Value: 5 vs. 2
  misc_feature: MA Experiment 108528 PARAMETER Experiment Name: Zm_Imbibed_Seeds_P Parameter: Organism Value: Zea mays
  misc_feature: MA Experiment 108528 PARAMETER Experiment Name: Zm_Imbibed_Seeds_P Parameter: Plant Line Value: 35A19
  misc_feature: MA Experiment 108528 PARAMETER Experiment Name: Zm_Imbibed_Seeds_P Parameter: Tissue Value: Aerial vs. Embryo
  misc_feature: MA Experiment ID: 108535 Result: Up-regulated in Transcription
  misc_feature: MA Experiment 108535 PARAMETER Experiment Name: Zm_Meristem_P Parameter: Age (day) Value: 8
  misc_feature: MA Experiment 108535 PARAMETER Experiment Name: Zm_Meristem_P Parameter: Organism Value: Zea mays
  misc_feature: MA Experiment 108535 PARAMETER Experiment Name: Zm_Meristem_P Parameter: Plant Line Value: 35A19
  misc_feature: MA Experiment 108535 PARAMETER Experiment Name: Zm_Meristem_P Parameter: Tissue Value: Root Meristem vs. Above Root Meristem
  misc_feature: MA Experiment ID: 108546 Result: Down-regulated in Transcription
  misc_feature: MA Experiment 108546 PARAMETER Experiment Name: Zm_Imbibed_Seeds_P Parameter: Age (day) Value: 3 vs. 2
  misc_feature: MA Experiment 108546 PARAMETER Experiment Name: Zm_Imbibed_Seeds_P Parameter: Organism Value: Zea mays
  misc_feature: MA Experiment 108546 PARAMETER Experiment Name: Zm_Imbibed_Seeds_P Parameter: Plant Line Value: 35A19
  misc_feature: MA Experiment 108546 PARAMETER Experiment Name: Zm_Imbibed_Seeds_P Parameter: Tissue Value: Roots vs. Embryo
  misc_feature: MA Experiment ID: 108547 Result: Up-regulated in Transcription
  misc_feature: MA Experiment 108547 PARAMETER Experiment Name: Zm_Imbibed_Seeds_P Parameter: Age (day) Value: 4 vs. 2
  misc_feature: MA Experiment 108547 PARAMETER Experiment Name: Zm_Imbibed_Seeds_P Parameter: Organism Value: Zea mays
  misc_feature: MA Experiment 108547 PARAMETER Experiment Name: Zm_Imbibed_Seeds_P Parameter: Plant Line Value: 35A19
  misc_feature: MA Experiment 108547 PARAMETER Experiment Name: Zm_Imbibed_Seeds_P Parameter: Tissue Value: Aerial vs. Embryo
  misc_feature: MA Experiment ID: 20000480 Result: Down-regulated in Transcription
  misc_feature: MA Experiment 20000480 PARAMETER Experiment Name: Zm_Drought_P Parameter: Age (day) Value: 11
  misc_feature: MA Experiment 20000480 PARAMETER Experiment Name: Zm_Drought_P Parameter: Organism Value: Zea mays
  misc_feature: MA Experiment 20000480 PARAMETER Experiment Name: Zm_Drought_P Parameter: Plant Line Value: 35A19
  misc_feature: MA Experiment 20000480 PARAMETER Experiment Name: Zm_Drought_P Parameter: Timepoint (hr) Value: 72
  misc_feature: MA Experiment 20000480 PARAMETER Experiment Name: Zm_Drought_P Parameter: Tissue Value: Aerial
  misc_feature: MA Experiment 20000480 PARAMETER Experiment Name: Zm_Drought_P Parameter: Treatment Value: Drought vs. No Drought
  misc_feature: MA Experiment ID: 20000535 Result: Up-regulated in Transcription
  misc_feature: MA Experiment 20000535 PARAMETER Experiment Name: Zm_Hybrid_Seed_Dev_P Parameter: DAP Value: 30 vs. 12
  misc_feature: MA Experiment 20000535 PARAMETER Experiment Name: Zm_Hybrid_Seed_Dev_P Parameter: Organism Value: Zea mays
  misc_feature: MA Experiment 20000535 PARAMETER Experiment Name: Zm_Hybrid_Seed_Dev_P Parameter: Plant Line Value: 35A19
  misc_feature: MA Experiment 20000535 PARAMETER Experiment Name: Zm_Hybrid_Seed_Dev_P Parameter: Tissue Value: Embryo vs. Unfert Floret
  misc_feature: MA Experiment ID: 20000626 Result: Down-regulated in Transcription
  misc_feature: MA Experiment 20000626 PARAMETER Experiment Name: Zm_Herbicide-Treatments_P Parameter: Timepoint (hr) Value: 12
  misc_feature: MA Experiment 20000626 PARAMETER Experiment Name: Zm_Herbicide-Treatments_P Parameter: Tissue Value: Aerial
  misc_feature: MA Experiment 20000626 PARAMETER Experiment Name: Zm_Herbicide-Treatments_P Parameter: Treatment Value: Roundup vs. No Treatment
  misc_feature: MA Experiment ID: 20000630 Result: Down-regulated in Transcription
  misc_feature: MA Experiment 20000630 PARAMETER Experiment Name: Zm_Herbicide-Treatments_P Parameter: Timepoint (hr) Value: 4
  misc_feature: MA Experiment 20000630 PARAMETER Experiment Name: Zm_Herbicide-Treatments_P Parameter: Tissue Value: Aerial
  misc_feature: MA Experiment 20000630 PARAMETER Experiment Name: Zm_Herbicide-Treatments_P Parameter: Treatment Value: Roundup vs. No Treatment
agtcgctcgtcccgcttcctgatcctcacccctgcctgcgcggctcggctcctcggctttccgcgttcgctacggtcggtttgtgccagcagccgtgccggatcgttggccttgcgccgttgcgcggttacaccgtgctccaggcaatggcgagccaacagcaagcaaaaggcacaatcctgtgagccaatcaacactcactaggactctaggagccagggcattgattcagagaactctgagaccatttttgttgcatcttttgacaggattacatgatgagtgctcttgtttttcctctggttgtatatgttatccagtgaacacatgtttaattttataaacatttcaatttttgtcatgtttgaatctattattttctagctttcgcagtttcaaaaaagtgtggtccagtgtctgtacttttatgctgtttaggttttcgcggccactgcctcctcccatcgtggtattcattccttccggactgtcagagagcggggatctatctacgctagtattcagttcttccattactggtctaccacacgatggttccctgtcatggagcggctactgcgaatcctcagcagtttggtgttattgccgcaaaccgctatggttctcctgtgaagccatctttatgccctagtgttgcgtttctgagactgcagggttccgcatttcgtcttgggaataaatccttggctttgagagctggtgcggattctcaccgttatgcgacatcttcagcatttgcaaagtataatcctgtcaagaacatcaagccactactgtcatccccaaagttgaaaccaagaactaaagttggttgtcaagcatccttgtcgtcattcagctaccctgagttatcttccaaaccgaaatggtggtggaggaccctagcatgtgtaccttatcttctgccactgcacaacatgtgggggcatgcagatgctatctatcagcttcatccatacttgcaaagatttagcctgccttacgctttcatcgatacaatggctctgctccctgggtggcttttcctggcgatcttcatgactatatacttctttgttgtgaggcggaagtggtcgccacacttcttgcgcttccacatcatattggctatcctgcttgacacgggctcacaagctctggccactgcctgcaactggaatccaagcattgcttttcagggcaaacaaatggcacatttctggatggcaatggccttcattcaaatcttcacggttgccgagtgtgtaaggtgtgcactttcaggggtgtatgcaaatgttccatttatatgtcatgcagcactcatccattcagatcttaacctgtttaggtagttgatcattgcaaagtgcatttttggaattaagaggtactgaattggttaaactgtcgagtagaggactaatcagactatcagaggaaattaatgtaaccattgctcttcactgcattgttgtc

SEQ ID NO: 2435 - protein, 267 aa, Zea mays subsp. mays
  peptide (1)..(267): Ceres Seq. ID no. 12410752
  misc_feature (7)..(265): Homolog of NCBI NO: 15236283 NR Description: putative chloroplast protein import component
  misc_feature (100)..(244): Homolog of NCBI NO: 15220356 NR Description: unknown protein; protein id: At1g04940.1
  misc_feature (64)..(259): Homolog of NCBI NO: 3769673 NR Description: Tic20 [Pisum sativum]
  misc_feature (8)..(259): Homolog of NCBI NO: 6984128 NR Description: Tic20-like protein [Euphorbia esula]
  misc_feature (100)..(259): Homolog of NCBI NO: 26449432 NR Description: unknown protein [Arabidopsis thaliana]
  misc_feature (36)..(267): Homolog of NCBI NO: 34899836 NR Description: putative Tic20 protein [Oryza sativa (japonica
  misc_feature (1)..(267): Homolog of NCBI NO: 34393290 NR Description: putative Tic20 protein [Oryza sativa (japonica
MVPCHGAATANPQQFGVIAANRYGSPVKPSLCPSVAFLRLQGSAFRLGNKSLALRAGADSHRYATSSAFAKYNPVKNIKPLLSSPKLKPRTKVGCQASLSSFSYPELSSKPKWWWRTLACVPYLLPLHNMWGHADAIYQLHPYLQRFSLPYAFIDTMALLPGWLFLAIFMTIYFFVVRRKWSPHFLRFHIILAILLDTGSQALATACNWNPSIAFQGKQMAHFWMAMAFIQIFTVAECVRCALSGVYANVPFICHAALIHSDLNLFR

SEQ ID NO: 2436 - protein, 138 aa, Zea mays subsp. mays
  peptide (1)..(138): Ceres Seq. ID no. 12410753
  misc_feature (1)..(136): Homolog of NCBI NO: 15236283 NR Description: putative chloroplast protein import component
  misc_feature (1)..(115): Homolog of NCBI NO: 15220356 NR Description: unknown protein; protein id: At1g04940.1
  misc_feature (1)..(130): Homolog of NCBI NO: 3769673 NR Description: Tic20 [Pisum sativum]
  misc_feature (1)..(130): Homolog of NCBI NO: 6984128 NR Description: Tic20-like protein [Euphorbia esula]
  misc_feature (1)..(130): Homolog of NCBI NO: 26449432 NR Description: unknown protein [Arabidopsis thaliana]
  misc_feature (1)..(138): Homolog of NCBI NO: 34899836 NR Description: putative Tic20 protein [Oryza sativa (japonica
  misc_feature (1)..(138): Homolog of NCBI NO: 34393290 NR Description: putative Tic20 protein [Oryza sativa (japonica
MWGHADAIYQLHPYLQRFSLPYAFIDTMALLPGWLFLAIFMTIYFFVVRRKWSPHFLRFHIILAILLDTGSQALATACNWNPSIAFQGKQMAHFWMAMAFIQIFTVAECVRCALSGVYANVPFICHAALIHSDLNLFR

SEQ ID NO: 2437 - DNA, 963 bp, Zea mays subsp. mays
  misc_feature (1)..(963): Ceres Seq. ID no. 12353619
  misc_feature: MA Experiment ID: 108528 Result: Up-regulated in Transcription
  misc_feature: MA Experiment 108528 PARAMETER Experiment Name: Zm_Imbibed_Seeds_P Parameter: Age (day) Value: 5 vs. 2
  misc_feature: MA Experiment 108528 PARAMETER Experiment Name: Zm_Imbibed_Seeds_P Parameter: Organism Value: Zea mays
  misc_feature: MA Experiment 108528 PARAMETER Experiment Name: Zm_Imbibed_Seeds_P Parameter: Plant Line Value: 35A19
  misc_feature: MA Experiment 108528 PARAMETER Experiment Name: Zm_Imbibed_Seeds_P Parameter: Tissue Value: Aerial vs. Embryo
  misc_feature: MA Experiment ID: 108529 Result: Up-regulated in Transcription
  misc_feature: MA Experiment 108529 PARAMETER Experiment Name: Zm_Imbibed_Seeds_P Parameter: Age (day) Value: 5 vs. 2
  misc_feature: MA Experiment 108529 PARAMETER Experiment Name: Zm_Imbibed_Seeds_P Parameter: Organism Value: Zea mays
  misc_feature: MA Experiment 108529 PARAMETER Experiment Name: Zm_Imbibed_Seeds_P Parameter: Plant Line Value: 35A19
  misc_feature: MA Experiment 108529 PARAMETER Experiment Name: Zm_Imbibed_Seeds_P Parameter: Tissue Value: Roots vs. Embryo
  misc_feature: MA Experiment ID: 108530 Result: Up-regulated in Transcription
  misc_feature: MA Experiment 108530 PARAMETER Experiment Name: Zm_Imbibed_Seeds_P Parameter: Age (day) Value: 6 vs. 2
  misc_feature: MA Experiment 108530 PARAMETER Experiment Name: Zm_Imbibed_Seeds_P Parameter: Organism Value: Zea mays
  misc_feature: MA Experiment 108530 PARAMETER Experiment Name: Zm_Imbibed_Seeds_P Parameter: Plant Line Value: 35A19
  misc_feature: MA Experiment 108530 PARAMETER Experiment Name: Zm_Imbibed_Seeds_P Parameter: Tissue Value: Aerial vs. Embryo
  misc_feature: MA Experiment ID: 108535 Result: Down-regulated in Transcription
  misc_feature: MA Experiment 108535 PARAMETER Experiment Name: Zm_Meristem_P Parameter: Age (day) Value: 8
  misc_feature: MA Experiment 108535 PARAMETER Experiment Name: Zm_Meristem_P Parameter: Organism Value: Zea mays
  misc_feature: MA Experiment 108535 PARAMETER Experiment Name: Zm_Meristem_P Parameter: Plant Line Value: 35A19
  misc_feature: MA Experiment 108535 PARAMETER Experiment Name: Zm_Meristem_P Parameter: Tissue Value: Root Meristem vs. Above Root Meristem
  misc_feature: MA Experiment ID: 108543 Result: Up-regulated in Transcription
  misc_feature: MA Experiment ID: 108547 Result: Up-regulated in Transcription
  misc_feature: MA Experiment 108547 PARAMETER Experiment Name: Zm_Imbibed_Seeds_P Parameter: Age (day) Value: 4 vs. 2
  misc_feature: MA Experiment 108547 PARAMETER Experiment Name: Zm_Imbibed_Seeds_P Parameter: Organism Value: Zea mays
  misc_feature: MA Experiment 108547 PARAMETER Experiment Name: Zm_Imbibed_Seeds_P Parameter: Plant Line Value: 35A19
  misc_feature: MA Experiment 108547 PARAMETER Experiment Name: Zm_Imbibed_Seeds_P Parameter: Tissue Value: Aerial vs. Embryo
  misc_feature: MA Experiment ID: 108556 Result: Down-regulated in Transcription
  misc_feature: MA Experiment 108556 PARAMETER Experiment Name: Zm_Drought_P Parameter: Age (day) Value: 9
  misc_feature: MA Experiment 108556 PARAMETER Experiment Name: Zm_Drought_P Parameter: Organism Value: Zea mays
  misc_feature: MA Experiment 108556 PARAMETER Experiment Name: Zm_Drought_P Parameter: Plant Line Value: 35A19
  misc_feature: MA Experiment 108556 PARAMETER Experiment Name: Zm_Drought_P Parameter: Timepoint (hr) Value: 24
  misc_feature: MA Experiment 108556 PARAMETER Experiment Name: Zm_Drought_P Parameter: Tissue Value: Aerial
  misc_feature: MA Experiment 108556 PARAMETER Experiment Name: Zm_Drought_P Parameter: Treatment Value: Drought vs. No Drought
  misc_feature: MA Experiment ID: 108559 Result: Down-regulated in Transcription
  misc_feature: MA Experiment 108559 PARAMETER Experiment Name: Zm_5mM_NO_P Parameter: Age (day) Value: 8
  misc_feature: MA Experiment 108559 PARAMETER Experiment Name: Zm_5mM_NO_P Parameter: Organism Value: Zea mays
  misc_feature: MA Experiment 108559 PARAMETER Experiment Name: Zm_5mM_NO_P Parameter: Plant Line Value: 35A19
  misc_feature: MA Experiment 108559 PARAMETER Experiment Name: Zm_5mM_NO_P Parameter: Timepoint (hr) Value: 12
  misc_feature: MA Experiment 108559 PARAMETER Experiment Name: Zm_5mM_NO_P Parameter: Tissue Value: Aerial
  misc_feature: MA Experiment 108559 PARAMETER Experiment Name: Zm_5mM_NO_P Parameter: Treatment Value: 5mM NO vs. No Treatment
  misc_feature: MA Experiment ID: 108597 Result: Down-regulated in Transcription
  misc_feature: MA Experiment 108597 PARAMETER Experiment Name: Zm_100uM_ABA_P Parameter: Age (day) Value: 9
  misc_feature: MA Experiment 108597 PARAMETER Experiment Name: Zm_100uM_ABA_P Parameter: Organism Value: Zea mays
  misc_feature: MA Experiment 108597 PARAMETER Experiment Name: Zm_100uM_ABA_P Parameter: Plant Line Value: 35A19
  misc_feature: MA Experiment 108597 PARAMETER Experiment Name: Zm_100uM_ABA_P Parameter: Timepoint (hr) Value: 24
  misc_feature: MA Experiment 108597 PARAMETER Experiment Name: Zm_100uM_ABA_P Parameter: Tissue Value: Aerial
  misc_feature: MA Experiment 108597 PARAMETER Experiment Name: Zm_100uM_ABA_P Parameter: Treatment Value: 100uM ABA vs. No Treatment
  misc_feature: MA Experiment ID: 108688 Result: Down-regulated in Transcription
  misc_feature: MA Experiment 108688 PARAMETER Experiment Name: Zm_Embryos-Flowers__P Parameter: Tissue Value: Immature Flowers vs. Aerial+
  misc_feature: MA Experiment ID: 20000480 Result: Down-regulated in Transcription
  misc_feature: MA Experiment 20000480 PARAMETER Experiment Name: Zm_Drought_P Parameter: Age (day) Value: 11
  misc_feature: MA Experiment 20000480 PARAMETER Experiment Name: Zm_Drought_P Parameter: Organism Value: Zea mays
  misc_feature: MA Experiment 20000480 PARAMETER Experiment Name: Zm_Drought_P Parameter: Plant Line Value: 35A19
  misc_feature: MA Experiment 20000480 PARAMETER Experiment Name: Zm_Drought_P Parameter: Timepoint (hr) Value: 72
  misc_feature: MA Experiment 20000480 PARAMETER Experiment Name: Zm_Drought_P Parameter: Tissue Value: Aerial
  misc_feature: MA Experiment 20000480 PARAMETER Experiment Name: Zm_Drought_P Parameter: Treatment Value: Drought vs. No Drought
  misc_feature: MA Experiment ID: 20000534 Result: Down-regulated in Transcription
  misc_feature: MA Experiment 20000534 PARAMETER Experiment Name: Zm_Hybrid_Pollen_P Parameter: Age (day) Value: 8
  misc_feature: MA Experiment 20000534 PARAMETER Experiment Name: Zm_Hybrid_Pollen_P Parameter: Organism Value: Zea mays
  misc_feature: MA Experiment 20000534 PARAMETER Experiment Name: Zm_Hybrid_Pollen_P Parameter: Plant Line Value: 35A19
  misc_feature: MA Experiment 20000534 PARAMETER Experiment Name: Zm_Hybrid_Pollen_P Parameter: Tissue Value: Pollen vs. Aerial
  misc_feature: MA Experiment ID: 20000535 Result: Down-regulated in Transcription
  misc_feature: MA Experiment 20000535 PARAMETER Experiment Name: Zm_Hybrid_Seed_Dev_P Parameter: DAP Value: 30 vs. 12
  misc_feature: MA Experiment 20000535 PARAMETER Experiment Name: Zm_Hybrid_Seed_Dev_P Parameter: Organism Value: Zea mays
  misc_feature: MA Experiment 20000535 PARAMETER Experiment Name: Zm_Hybrid_Seed_Dev_P Parameter: Plant Line Value: 35A19
  misc_feature: MA Experiment 20000535 PARAMETER Experiment Name: Zm_Hybrid_Seed_Dev_P Parameter: Tissue Value: Embryo vs. Unfert Floret
ctgttctccaccagccccggaggtcgacacgtgcgccacaccatagggcagggcccagggagcccggcgacctccatctccatggccgagtgcgaggagctggtggagagcggcggcgccgaggaggacatgccccgcgtcgtagccgccctcgccggcatcctggagcgcgtcgcgaaccgcaacgacgctgcggcggtcgcagaggtctcggccgtagccccggcgtcggcgttccgggcgacgacgaagccgggcatctcggtgcgcgcgtacatggcgcgcatcgcgcggttcgctgggtgcagccccgcgtgctacgtcgtggcctacgtctacctcgaccgcctcctgcgccgcggccgcctcctggcgctggccgtcgactcctacagcgtgcaccgcctcctcattaccgccgtgcttgccgccgtcaagttcatggacgacatatgctacaacaacgcctacttcgccaaggtcgggggcatcagcctggtggagatgaactacctggaggtggacttcctgttcggcgtcggcttcgacctcaacgtggcgccggagacgttcggcgactactgcgccgtgctgcggtcggagctactgtgcgcggaggctgcccccgcgccactcaggctgcagcactgctgcctgtccgaggatgacgccggggccggatgcagcgcccagcagcagctcgctgcatgaatgaaagaaacctaagcccatcgatcgatcgacgactcatccggtggcttgggcgcaggagttgtaagccggtgcaaattgttccaaattattagatgttttgtcttttctagattataaagctttcgatatatacacacatctatatatacagtgtgtctagaggtgtagtggtggtgtaggtcgtcgtcggttgtaccagctgctacagtagattgtgtatacagtgctggtgtctttggtgactttctg

SEQ ID NO: 2438 - protein, 236 aa, Zea mays subsp. mays
  peptide (1)..(236): Ceres Seq. ID no. 12353620
  misc_feature (64)..(185): Pfam Name: Cyclin, N-terminal domain Pfam Description: Cyclin, N-terminal domain
  misc_feature (35)..(233): Homolog of NCBI NO: 37536902 NR Description: hypothetical protein [Oryza sativa (japonica
  misc_feature (28)..(236): Homolog of NCBI NO: 14140116 NR Description: PREG-like protein [Oryza sativa]
  misc_feature (34)..(201): Homolog of NCBI NO: 21593009 NR Description: unknown [Arabidopsis thaliana]
  misc_feature (34)..(201): Homolog of NCBI NO: 15229382 NR Description: putative protein
  misc_feature (41)..(207): Homolog of NCBI NO: 15233185 NR Description: PREG-like protein, putative; protein id:
  misc_feature (36)..(202): Homolog of NCBI NO: 38345471 NR Description: OSJNBa0010H02.9 [Oryza sativa (japonica
  misc_feature (41)..(204): Homolog of NCBI NO: 25493992 NR Description: PREG-like protein [imported] - Picea mariana
  misc_feature (42)..(202): Homolog of NCBI NO: 15240306 NR Description: PREG-like - like protein; protein id: At5g61650.1
  misc_feature (44)..(235): Homolog of NCBI NO: 15224950 NR Description: putative PREG1-like negative regulator; protein
  misc_feature (42)..(203): Homolog of NCBI NO: 15240794 NR Description: putative protein; protein id: At5g07450.1
LFSTSPGGRHVRHTIGQGPGSPATSISMAECEELVESGGAEEDMPRVVAALAGILERVANRNDAAAVAEVSAVAPASAFRATTKPGISVRAYMARIARFAGCSPACYVVAYVYLDRLLRRGRLLALAVDSYSVHRLLITAVLAAVKFMDDICYNNAYFAKVGGISLVEMNYLEVDFLFGVGFDLNVAPETFGDYCAVLRSELLCAEAAPAPLRLQHCCLSEDDAGAGCSAQQQLAA

SEQ ID NO: 2439 - protein, 221 aa, Zea mays subsp. mays
  peptide (1)..(221): Ceres Seq. ID no. 12353621
VLHQPRRSTRAPHHRAGPREPGDLHLHGRVRGAGGERRRRGGHAPRRSRPRRHPGARREPQRRCGGRRGLGRSPGVGVPGDDEAGHLGARVHGAHRAVRWVQPRVLRRGLRLPRPPPAPRPPPGAGRRLLQRAPPPHYRRACRRQVHGRHMLQQRLLRQGRGHQPGGDELPGGGLPVRRRLRPQRGAGDVRRLLRRAAVGATVRGGCPRATQAAALLPVRG

SEQ ID NO: 2440 - protein, 209 aa, Zea mays subsp. mays
  peptide (1)..(209): Ceres Seq. ID no. 12353622
  misc_feature (37)..(158): Pfam Name: Cyclin, N-terminal domain Pfam Description: Cyclin, N-terminal domain
  misc_feature (7)..(174): Homolog of NCBI NO: 21593009 NR Description: unknown [Arabidopsis thaliana]
  misc_feature (7)..(174): Homolog of NCBI NO: 15229382 NR Description: putative protein
  misc_feature (14)..(180): Homolog of NCBI NO: 15233185 NR Description: PREG-like protein, putative; protein id:
  misc_feature (9)..(175): Homolog of NCBI NO: 38345471 NR Description: OSJNBa0010H02.9 [Oryza sativa (japonica
  misc_feature (14)..(177): Homolog of NCBI NO: 25493992 NR Description: PREG-like protein [imported] - Picea mariana
  misc_feature (15)..(175): Homolog of NCBI NO: 15240306 NR Description: PREG-like - like protein; protein id: At5g61650.1
  misc_feature (17)..(208): Homolog of NCBI NO: 15224950 NR Description: putative PREG1-like negative regulator; protein
  misc_feature (15)..(176): Homolog of NCBI NO: 15240794 NR Description: putative protein; protein id: At5g07450.1
  misc_feature (8)..(206): Homolog of NCBI NO: 37536902 NR Description: hypothetical protein [Oryza sativa (japonica
  misc_feature (1)..(209): Homolog of NCBI NO: 14140116 NR Description: PREG-like protein [Oryza sativa]
MAECEELVESGGAEEDMPRVVAALAGILERVANRNDAAAVAEVSAVAPASAFRATTKPGISVRAYMARIARFAGCSPACYVVAYVYLDRLLRRGRLLALAVDSYSVHRLLITAVLAAVKFMDDICYNNAYFAKVGGISLVEMNYLEVDFLFGVGFDLNVAPETFGDYCAVLRSELLCAEAAPAPLRLQHCCLSEDDAGAGCSAQQQLAA

SEQ ID NO: 2441 - DNA, 1459 bp, Zea mays subsp. mays
  misc_feature (1)..(1459): Ceres Seq. ID no. 12454773
  misc_feature: MA Experiment ID: 108528 Result: Up-regulated in Transcription
  misc_feature: MA Experiment 108528 PARAMETER Experiment Name: Zm_Imbibed_Seeds_P Parameter: Age (day) Value: 5 vs. 2
  misc_feature: MA Experiment 108528 PARAMETER Experiment Name: Zm_Imbibed_Seeds_P Parameter: Organism Value: Zea mays
  misc_feature: MA Experiment 108528 PARAMETER Experiment Name: Zm_Imbibed_Seeds_P Parameter: Plant Line Value: 35A19
  misc_feature: MA Experiment 108528 PARAMETER Experiment Name: Zm_Imbibed_Seeds_P Parameter: Tissue Value: Aerial vs. Embryo
  misc_feature: MA Experiment ID: 20000492 Result: Down-regulated in Transcription
  misc_feature: MA Experiment 20000492 PARAMETER Experiment Name: Zm_Hybrid_Seed_Dev_P Parameter: DAP Value: 12
  misc_feature: MA Experiment 20000492 PARAMETER Experiment Name: Zm_Hybrid_Seed_Dev_P Parameter: Organism Value: Zea mays
  misc_feature: MA Experiment 20000492 PARAMETER Experiment Name: Zm_Hybrid_Seed_Dev_P Parameter: Plant Line Value: 35A19
  misc_feature: MA Experiment 20000492 PARAMETER Experiment Name: Zm_Hybrid_Seed_Dev_P Parameter: Tissue Value: Fert Kernel vs. Unfert Floret
  misc_feature: MA Experiment ID: 20000535 Result: Down-regulated in Transcription
  misc_feature: MA Experiment 20000535 PARAMETER Experiment Name: Zm_Hybrid_Seed_Dev_P Parameter: DAP Value: 30 vs. 12
  misc_feature: MA Experiment 20000535 PARAMETER Experiment Name: Zm_Hybrid_Seed_Dev_P Parameter: Organism Value: Zea mays
  misc_feature: MA Experiment 20000535 PARAMETER Experiment Name: Zm_Hybrid_Seed_Dev_P Parameter: Plant Line Value: 35A19
  misc_feature: MA Experiment 20000535 PARAMETER Experiment Name: Zm_Hybrid_Seed_Dev_P Parameter: Tissue Value: Embryo vs. Unfert Floret
aaaacgtgtggcgtcggcagccgggcaggtaggaaaaggtatcagcgtcgccaatctccatggagctcacaggcgccgcgctccggcgatacgcgctgccgtcggcgtccccggtggccgcgagggtggggaggaggaggcgaccagccagggtggcctgcgtcgggggcggggggttcgcggaggaggggcacctcaggtactacgaggcggccccgcggaggaaggcggtggaggcggtggcgagggacctgggaaagctccgggccatggggctcgtcgcgggggacgcagccaaggagaaggtcctctcggaagccacggatcttctgctgcaggagctgagccagatgaaggatgcggaatacaagataaacaagatggagaaagaacagaatgctgctatgaaagcactgaagaagcaggagaggcgcaccaagaagactgccatcatgatgatgaagtgtgaagaagatgagtcatctgagtcgagcgagagcgattgtgaggacgaggcaaccatgaatgccgagcaggacatggtgatgtcaacagcggttcccgaggttgttgcatcaagcatctcagctgtcctcgcgatggagtgtgataaggctgcagtgaaggccatgaagaaaatggagaaggaacaaatgaaggccatgaagaagatggagaaggaacagaagaaggctgcgaagaaggccatgaagatggagaaggaagcaaagaagatggcaatggctacactgaatggctgcagggatgaagacgattcctcatgctcatcagagtcgagtgaaagtgaatgcgagggccaagttatgaggatgagccgctgcggctacaatcaccgcaccggaaatgccacctccaagcacgggtcttccaatcatagttcctcaaattccagcacctttggcaccacagccgtctcaatctcaaccttcagagccagcaaccgcagtgcaagccaccagagtcagcagcgttgcagtaactgagacatccacaaccagcagaattgaggtctgcatggggggcaaatgcaagaagtcaggcgcgcttgctctcctgcaggagttcgagaaggctgtgggcaccggtggcgcggtcgtcggctgcaagtgcctggggaagtgcggcctaggtcccaacgtgaggctgaggagcggtgcctctgcggaaggttctgcaaaggggaacccactctgcatcggtgtaggctttgaagatgttgacaccatcgtggctggtctctttggaggcgctgatctgggcatgacacccacctagacctggtggtactacctcgacctagtcgtacttcaagaaatcaagagcacaacttgtaatcacagatgttgcattgaacaaatgtatagtgcagctacggccttgctagtgctaagtttatgtactctatgtctatatagaacacgtatggtaatcttgttcc

SEQ ID NO: 2442 - protein, 314 aa, Zea mays subsp. mays
  peptide (1)..(314): Ceres Seq. ID no. 12454774
  misc_feature (93)..(297): Homolog of NCBI NO: 16759686 NR Description: tolA protein [Salmonella enterica subsp. enterica
  misc_feature (41)..(253): Homolog of NCBI NO: 23102768 NR Description: hypothetical protein [Azotobacter vinelandii]
  misc_feature (168)..(259): Homolog of NCBI NO: 25405260 NR Description: hypothetical protein F11A17.15 [imported] -
  misc_feature (168)..(259): Homolog of NCBI NO: 22330104 NR Description: hypothetical protein
  misc_feature (72)..(183): Homolog of NCBI NO: 25405260 NR Description: hypothetical protein F11A17.15 [imported] -
  misc_feature (72)..(183): Homolog of NCBI NO: 22330104 NR Description: hypothetical protein
MELTGAALRRYALPSASPVAARVGRRRRPARVACVGGGGFAEEGHLRYYEAAPRRKAVEAVARDLGKLRAMGLVAGDAAKEKVLSEATDLLLQELSQMKDAEYKINKMEKEQNAAMKALKKQERRTKKTAIMMMKCEEDESSESSESDCEDEATMNAEQDMVMSTAVPEVVASSISAVLAMECDKAAVKAMKKMEKEQMKAMKKMEKEQKKAAKKAMKMEKEAKKMAMATLNGCRDEDDSSCSSESSESECEGQVMRMSRCGYNHRTGNATSKHGSSNHSSSNSSTFGTTAVSISTFRASNRSASHQSQQRCSN

SEQ ID NO: 2443 - protein, 244 aa, Zea mays subsp. mays
  peptide (1)..(244): Ceres Seq. ID no. 12454775
  misc_feature (23)..(227): Homolog of NCBI NO: 16759686 NR Description: tolA protein [Salmonella enterica subsp. enterica
  misc_feature (1)..(183): Homolog of NCBI NO: 23102768 NR Description: hypothetical protein [Azotobacter vinelandii]
  misc_feature (98)..(189): Homolog of NCBI NO: 25405260 NR Description: hypothetical protein F11A17.15 [imported] -
  misc_feature (98)..(189): Homolog of NCBI NO: 22330104 NR Description: hypothetical protein
  misc_feature (2)..(113): Homolog of NCBI NO: 25405260 NR Description: hypothetical protein F11A17.15 [imported] -
  misc_feature (2)..(113): Homolog of NCBI NO: 22330104 NR Description: hypothetical protein
MGLVAGDAAKEKVLSEATDLLLQELSQMKDAEYKINKMEKEQNAAMKALKKQERRTKKTAIMMMKCEEDESSESSESDCEDEATMNAEQDMVMSTAVPEVVASSISAVLAMECDKAAVKAMKKMEKEQMKAMKKMEKEQKKAAKKAMKMEKEAKKMAMATLNGCRDEDDSSCSSESSESECEGQVMRMSRCGYNHRTGNATSKHGSSNHSSSNSSTFGTTAVSISTFRASNRSASHQSQQRCSN

SEQ ID NO: 2444 - protein, 217 aa, Zea mays subsp. mays
  peptide (1)..(217): Ceres Seq. ID no. 12454776
  misc_feature (1)..(200): Homolog of NCBI NO: 16759686 NR Description: tolA protein [Salmonella enterica subsp. enterica
  misc_feature (1)..(156): Homolog of NCBI NO: 23102768 NR Description: hypothetical protein [Azotobacter vinelandii]
  misc_feature (71)..(162): Homolog of NCBI NO: 25405260 NR Description: hypothetical protein F11A17.15 [imported] -
  misc_feature (71)..(162): Homolog of NCBI NO: 22330104 NR Description: hypothetical protein
  misc_feature (1)..(86): Homolog of NCBI NO: 25405260 NR Description: hypothetical protein F11A17.15 [imported] -
  misc_feature (1)..(86): Homolog of NCBI NO: 22330104 NR Description: hypothetical protein
MKDAEYKINKMEKEQNAAMKALKKQERRTKKTAIMMMKCEEDESSESSESDCEDEATMNAEQDMVMSTAVPEVVASSISAVLAMECDKAAVKAMKKMEKEQMKAMKKMEKEQKKAAKKAMKMEKEAKKMAMATLNGCRDEDDSSCSSESSESECEGQVMRMSRCGYNHRTGNATSKHGSSNHSSSNSSTFGTTAVSISTFRASNRSASHQSQQRCSN

SEQ ID NO: 2445 - DNA, 1132 bp, Zea mays subsp. mays
  misc_feature (1)..(1132): Ceres Seq. ID no. 12352055
  misc_feature: MA Experiment ID: 108504 Result: Down-regulated in Transcription
  misc_feature: MA Experiment 108504 PARAMETER Experiment Name: Zm_Drought_P Parameter: Age (day) Value: 8
  misc_feature: MA Experiment 108504 PARAMETER Experiment Name: Zm_Drought_P Parameter: Organism Value: Zea mays
  misc_feature: MA Experiment 108504 PARAMETER Experiment Name: Zm_Drought_P Parameter: Plant Line Value: 35A19
  misc_feature: MA Experiment 108504 PARAMETER Experiment Name: Zm_Drought_P Parameter: Timepoint (hr) Value: 12
  misc_feature: MA Experiment 108504 PARAMETER Experiment Name: Zm_Drought_P Parameter: Tissue Value: Aerial
  misc_feature: MA Experiment 108504 PARAMETER Experiment Name: Zm_Drought_P Parameter: Treatment Value: Drought vs. No Drought
  misc_feature: MA Experiment ID: 108515 Result: Down-regulated in Transcription
  misc_feature: MA Experiment 108515 PARAMETER Experiment Name: Zm_2mM_SA_P Parameter: Age (day) Value: 8
  misc_feature: MA Experiment 108515 PARAMETER Experiment Name: Zm_2mM_SA_P Parameter: Organism Value: Zea mays
  misc_feature: MA Experiment 108515 PARAMETER Experiment Name: Zm_2mM_SA_P Parameter: Plant Line Value: 35A19
  misc_feature: MA Experiment 108515 PARAMETER Experiment Name: Zm_2mM_SA_P Parameter: Timepoint (hr) Value: 12
  misc_feature: MA Experiment 108515 PARAMETER Experiment Name: Zm_2mM_SA_P Parameter: Tissue Value: Aerial
  misc_feature: MA Experiment 108515 PARAMETER Experiment Name: Zm_2mM_SA_P Parameter: Treatment Value: 2mM SA vs. No Treatment
  misc_feature: MA Experiment ID: 108523 Result: Down-regulated in Transcription
  misc_feature: MA Experiment 108523 PARAMETER Experiment Name: Zm_42deg_Heat_P Parameter: Age (day) Value: 8
  misc_feature: MA Experiment 108523 PARAMETER Experiment Name: Zm_42deg_Heat_P Parameter: Organism Value: Zea mays
  misc_feature: MA Experiment 108523 PARAMETER Experiment Name: Zm_42deg_Heat_P Parameter: Plant Line Value: 35A19
  misc_feature: MA Experiment 108523 PARAMETER Experiment Name: Zm_42deg_Heat_P Parameter: Temperature (deg C) Value: 42 vs. 22
  misc_feature: MA Experiment 108523 PARAMETER Experiment Name: Zm_42deg_Heat_P Parameter: Timepoint (hr) Value: 6
  misc_feature: MA Experiment 108523 PARAMETER Experiment Name: Zm_42deg_Heat_P Parameter: Tissue Value: Aerial
  misc_feature: MA Experiment ID: 108528 Result: Up-regulated in Transcription
  misc_feature: MA Experiment 108528 PARAMETER Experiment Name: Zm_Imbibed_Seeds_P Parameter: Age (day) Value: 5 vs. 2
  misc_feature: MA Experiment 108528 PARAMETER Experiment Name: Zm_Imbibed_Seeds_P Parameter: Organism Value: Zea mays
  misc_feature: MA Experiment 108528 PARAMETER Experiment Name: Zm_Imbibed_Seeds_P Parameter: Plant Line Value: 35A19
  misc_feature: MA Experiment 108528 PARAMETER Experiment Name: Zm_Imbibed_Seeds_P Parameter: Tissue Value: Aerial vs. Embryo
  misc_feature: MA Experiment ID: 108529 Result: Up-regulated in Transcription
  misc_feature: MA Experiment 108529 PARAMETER Experiment Name: Zm_Imbibed_Seeds_P Parameter: Age (day) Value: 5 vs. 2
  misc_feature: MA Experiment 108529 PARAMETER Experiment Name: Zm_Imbibed_Seeds_P Parameter: Organism Value: Zea mays
  misc_feature: MA Experiment 108529 PARAMETER Experiment Name: Zm_Imbibed_Seeds_P Parameter: Plant Line Value: 35A19
  misc_feature: MA Experiment 108529 PARAMETER Experiment Name: Zm_Imbibed_Seeds_P Parameter: Tissue Value: Roots vs. Embryo
  misc_feature: MA Experiment ID: 108530 Result: Up-regulated in Transcription
  misc_feature: MA Experiment 108530 PARAMETER Experiment Name: Zm_Imbibed_Seeds_P Parameter: Age (day) Value: 6 vs. 2
  misc_feature: MA Experiment 108530 PARAMETER Experiment Name: Zm_Imbibed_Seeds_P Parameter: Organism Value: Zea mays
  misc_feature: MA Experiment 108530 PARAMETER Experiment Name: Zm_Imbibed_Seeds_P Parameter: Plant Line Value: 35A19
  misc_feature: MA Experiment 108530 PARAMETER Experiment Name: Zm_Imbibed_Seeds_P Parameter: Tissue Value: Aerial vs. Embryo
  misc_feature: MA Experiment ID: 108540 Result: Down-regulated in Transcription
  misc_feature: MA Experiment 108540 PARAMETER Experiment Name: Zm_20percent_PEG_P Parameter: Age (day) Value: 8
  misc_feature: MA Experiment 108540 PARAMETER Experiment Name: Zm_20percent_PEG_P Parameter: Organism Value: Zea mays
  misc_feature: MA Experiment 108540 PARAMETER Experiment Name: Zm_20percent_PEG_P Parameter: Plant Line Value: 35A19
  misc_feature: MA Experiment 108540 PARAMETER Experiment Name: Zm_20percent_PEG_P Parameter: Timepoint (hr) Value: 6
  misc_feature: MA Experiment 108540 PARAMETER Experiment Name: Zm_20percent_PEG_P Parameter: Tissue Value: Aerial
  misc_feature: MA Experiment 108540 PARAMETER Experiment Name: Zm_20percent_PEG_P Parameter: Treatment Value: 20percent PEG vs. No Treatment
  misc_feature: MA Experiment ID: 108546 Result: Up-regulated in Transcription
  misc_feature: MA Experiment 108546 PARAMETER Experiment Name: Zm_Imbibed_Seeds_P Parameter: Age (day) Value: 3 vs. 2
  misc_feature: MA Experiment 108546 PARAMETER Experiment Name: Zm_Imbibed_Seeds_P Parameter: Organism Value: Zea mays
  misc_feature: MA Experiment 108546 PARAMETER Experiment Name: Zm_Imbibed_Seeds_P Parameter: Plant Line Value: 35A19
  misc_feature: MA Experiment 108546 PARAMETER Experiment Name: Zm_Imbibed_Seeds_P Parameter: Tissue Value: Roots vs. Embryo
  misc_feature: MA Experiment ID: 108547 Result: Up-regulated in Transcription
  misc_feature: MA Experiment 108547 PARAMETER Experiment Name: Zm_Imbibed_Seeds_P Parameter: Age (day) Value: 4 vs. 2
  misc_feature: MA Experiment 108547 PARAMETER Experiment Name: Zm_Imbibed_Seeds_P Parameter: Organism Value: Zea mays
  misc_feature: MA Experiment 108547 PARAMETER Experiment Name: Zm_Imbibed_Seeds_P Parameter: Plant Line Value: 35A19
  misc_feature: MA Experiment 108547 PARAMETER Experiment Name: Zm_Imbibed_Seeds_P Parameter: Tissue Value: Aerial vs. Embryo
  misc_feature: MA Experiment ID: 108597 Result: Down-regulated in Transcription
  misc_feature: MA Experiment 108597 PARAMETER Experiment Name: Zm_100uM_ABA_P Parameter: Age (day) Value: 9
  misc_feature: MA Experiment 108597 PARAMETER Experiment Name: Zm_100uM_ABA_P Parameter: Organism Value: Zea mays
  misc_feature: MA Experiment 108597 PARAMETER Experiment Name: Zm_100uM_ABA_P Parameter: Plant Line Value: 35A19
  misc_feature: MA Experiment 108597 PARAMETER Experiment Name: Zm_100uM_ABA_P Parameter: Timepoint (hr) Value: 24
  misc_feature: MA Experiment 108597 PARAMETER Experiment Name: Zm_100uM_ABA_P Parameter: Tissue Value: Aerial
  misc_feature: MA Experiment 108597 PARAMETER Experiment Name: Zm_100uM_ABA_P Parameter: Treatment Value: 100uM ABA vs. No Treatment
  misc_feature: MA Experiment ID: 20000532 Result: Down-regulated in Transcription
  misc_feature: MA Experiment 20000532 PARAMETER Experiment Name: Zm_0.001percent_MeJA_P Parameter: Age (day) Value: 10
  misc_feature: MA Experiment 20000532 PARAMETER Experiment Name: Zm_0.001percent_MeJA_P Parameter: Organism Value: Zea mays
  misc_feature: MA Experiment 20000532 PARAMETER Experiment Name: Zm_0.001percent_MeJA_P Parameter: Plant Line Value: 35A19
  misc_feature: MA Experiment 20000532 PARAMETER Experiment Name: Zm_0.001percent_MeJA_P Parameter: Timepoint (hr) Value: 48
  misc_feature: MA Experiment 20000532 PARAMETER Experiment Name: Zm_0.001percent_MeJA_P Parameter: Tissue Value: Aerial
  misc_feature: MA Experiment 20000532 PARAMETER Experiment Name: Zm_0.001percent_MeJA_P Parameter: Treatment Value: 0.001percent MeJA vs. No Treatment
  misc_feature: MA Experiment ID: 20000535 Result: Down-regulated in Transcription
  misc_feature: MA Experiment 20000535 PARAMETER Experiment Name: Zm_Hybrid_Seed_Dev_P Parameter: DAP Value: 30 vs. 12
  misc_feature: MA Experiment 20000535 PARAMETER Experiment Name: Zm_Hybrid_Seed_Dev_P Parameter: Organism Value: Zea mays
  misc_feature: MA Experiment 20000535 PARAMETER Experiment Name: Zm_Hybrid_Seed_Dev_P Parameter: Plant Line Value: 35A19
  misc_feature: MA Experiment 20000535 PARAMETER Experiment Name: Zm_Hybrid_Seed_Dev_P Parameter: Tissue Value: Embryo vs. Unfert Floret
  misc_feature: MA Experiment ID: 20000626 Result: Down-regulated in Transcription
  misc_feature: MA Experiment 20000626 PARAMETER Experiment Name: Zm_Herbicide-Treatments_P Parameter: Timepoint (hr) Value: 12
  misc_feature: MA Experiment 20000626 PARAMETER Experiment Name: Zm_Herbicide-Treatments_P Parameter: Tissue Value: Aerial
  misc_feature: MA Experiment 20000626 PARAMETER Experiment Name: Zm_Herbicide-Treatments_P Parameter: Treatment Value: Roundup vs. No Treatment
  misc_feature: MA Experiment ID: 20000630 Result: Down-regulated in Transcription
  misc_feature: MA Experiment 20000630 PARAMETER Experiment Name: Zm_Herbicide-Treatments_P Parameter: Timepoint (hr) Value: 4
  misc_feature: MA Experiment 20000630 PARAMETER Experiment Name: Zm_Herbicide-Treatments_P Parameter: Tissue Value: Aerial
  misc_feature: MA Experiment 20000630 PARAMETER Experiment Name: Zm_Herbicide-Treatments_P Parameter: Treatment Value: Roundup vs. No Treatment
tatatatgcatgcgcatcaagatcaagaataatccagcgccacacgggatcgacctagtacatagatacaacaagtcaacaacgtactaactagcccaccatggcgtcacgcctcgccgccgcccttctcctctccgtcgtcgccctgctgacgtccgtggcgccgctggcgtgcggccaggcagcgtcggcgccgtccccagcccccgcgccgcccaagaccatcacggcgatcctgagcaaggccgggcagttcaccaagttcctccagctgctgcagtcgacgcgggaggcggagcagatcaccaaccagctcaagggcaagccgtccaacggcgggctcacggtgttcgcgccgcccgacagcgccttctccgcgctccccgccggcacgctcaactccctctccgaccagcagaagacgtcgctggtgcagttccacgtcgtgtccgcggcgctccccgccgcgcagctcgagaccgtcagcaacccgctgcggacgcaggctggcgacaccggcaggggcaagtacccgctcaacctcaccgcggacggctccagcgtcaacgtctccacgggggtcgtcaacgccacgctcgacgccacgccgctttacgccggggacaggctcgtcgtctaccaggtcagcaaggtgctgctgccgtgggcgctctacggcccgccggtccccgcgccggccccttccccggcggagagcaagaagaagaagaaggccacgccggatgctgtggcggatgcgccggcggctgagactgcggcggggacgacgacggcgtcggcggccgcgcgcgcgggagggaccccagctggcgtccgagctgcttcgtcctgcgtcgtggcgctcgccgccgtggcagctttgtggtgggctatctgaccacgtacagtacagtaaggatgcatgcgtgttttgccatcgtggagcttctttccggacagatttgtttctaattcatcaatcgaccagttcattattcttttcttcgttttataaaaaaagatgtattgtggatgtatttggtggcgttttgtaatgtttgtattgtatactttgaagaactgtacatcatattttgtggacgtatattgttatccaattgtattaatgtgg

SEQ ID NO: 2446 - protein, 265 aa, Zea mays subsp. mays
  peptide (1)..(265): Ceres Seq. ID no. 12352056
  misc_feature (42)..(188): Pfam Name: Fasciclin domain Pfam Description: Fasciclin domain
  misc_feature (15)..(257): Homolog of NCBI NO: 2129473 NR Description: arabinogalactan-like protein - loblolly pine
  misc_feature (1)..(254): Homolog of NCBI NO: 34910950 NR Description: putative arabinogalactan-like protein
  misc_feature (23)..(223): Homolog of NCBI NO: 5919185 NR Description: arabinogalactan protein Pop14A9 [Populus x
  misc_feature (9)..(222): Homolog of NCBI NO: 21553590 NR Description: arabinogalactan protein-like [Arabidopsis
  misc_feature (9)..(222): Homolog of NCBI NO: 15294288 NR Description: AT5g60490/muf9_140 [Arabidopsis thaliana]
  misc_feature (9)..(222): Homolog of NCBI NO: 15239344 NR Description: fasciclin-like arabinogalactan-protein (FLA12)
  misc_feature (31)..(262): Homolog of NCBI NO: 21553523 NR Description: arabinogalactan protein-like [Arabidopsis
  misc_feature (31)..(262): Homolog of NCBI NO: 15242651 NR Description: fasciclin-like arabinogalactan-protein (FLA11)
  misc_feature (23)..(249): Homolog of NCBI NO: 30841338 NR Description: arabinogalactan protein [Gossypium hirsutum]
  misc_feature (21)..(258): Homolog of NCBI NO: 34896012 NR Description: EST D25138(R3286) corresponds to a region of the gene.~Similar to Pinus taeda arabinogalactan-like protein
MASRLAAALLLSVVALLTSVAPLACGQAASAPSPAPAPPKTITAILSKAGQFTKFLQLLQSTREAEQITNQLKGKPSNGGLTVFAPPDSAFSALPAGTLNSLSDQQKTSLVQFHVVSAALPAAQLETVSNPLRTQAGDTGRGKYPLNLTADGSSVNVSTGVVNATLDATPLYAGDRLVVYQVSKVLLPWALYGPPVPAPAPSPAESKKKKKATPDAVADAPAAETAAGTTTASAAARAGGTPAGVRAASSCVVALAAVAALWWAI

SEQ ID NO: 2447 - DNA, 473 bp, Zea mays subsp. mays
  misc_feature (1)..(473): Ceres Seq. ID no. 13564955
  misc_feature: MA Experiment ID: 20000487 Result: Up-regulated in Transcription
  misc_feature: MA Experiment 20000487 PARAMETER Experiment Name: Zm_50mM_NH4NO3_L_to_H_P Parameter: Organism Value: Zea mays
  misc_feature: MA Experiment 20000487 PARAMETER Experiment Name: Zm_50mM_NH4NO3_L_to_H_P Parameter: Timepoint (hr) Value: 4
  misc_feature: MA Experiment 20000487 PARAMETER Experiment Name: Zm_50mM_NH4NO3_L_to_H_P Parameter: Tissue Value: Leaves
  misc_feature: MA Experiment 20000487 PARAMETER Experiment Name: Zm_50mM_NH4NO3_L_to_H_P Parameter: Treatment Value: 50mM NH4NO3 vs. 100mM Mannitol
acgcgctcaactccacgggccttgagctagggttttcttcgccgctacctccctacgargcgggcgtgcagccatggcgctggtgcaggcgggcatgggccttacccgggtcgttatcctcgtcggcgccggcgttgccgctccgtcgtcctccgcaacggccgcctcgccgagatcctcggcgagctccaggagatactcgacaaggggaagaaggtgaaggatggavgarggggagacggggaaaccgatctcaacgaggctcttacctcgcaggtgcgtcgccttgccatggaggtccggcaacttggtaattcacgttcaataactgttctcaatggaggttctgcacaatcaggagtatcaggcctgatagtacctgcagcaactgtaggagcactgggttacggttatatgtrgtggaaggggatctcgttctcagatctaatgtatgtcaccaagcgcaacatggc

SEQ ID NO: 2448 - protein, 103 aa, Zea mays subsp. mays
  peptide (1)..(103): Ceres Seq. ID no. 13564956
  misc_feature (19)..(19): Xaa is any aa, unknown or other
  misc_feature (76)..(76): Xaa is any aa, unknown or other
  misc_feature (77)..(77): Xaa is any aa, unknown or other
ALNSTGLELGFSSPLPPYXAGVQPWRWCRRAWALPGSLSSSAPALPLRRPPQRPPRRDPRRAPGDTRQGEEGEGWXXGRRGNRSQRGSYLAGASPCHGGPATW

SEQ ID NO: 2449 - protein, 60 aa, Zea mays subsp. mays
  peptide (1)..(60): Ceres Seq. ID no. 13564957
  misc_feature (1)..(59): Homolog of NCBI NO: 22329773 NR Description: expressed protein [Arabidopsis thaliana]
  misc_feature (1)..(59): Homolog of NCBI NO: 34894218 NR Description: P0439B06.30 [Oryza sativa (japonica
  misc_feature (1)..(59): Homolog of NCBI NO: 18390460 NR Description: expressed protein [Arabidopsis thaliana]
  misc_feature (1)..(59): Homolog of NCBI NO: 34906300 NR Description: unnamed protein product [Oryza sativa (japonica
  misc_feature (1)..(59): Homolog of NCBI NO: 7487252 NR Description: hypothetical protein At2g02730 [imported] -
  misc_feature (1)..(59): Homolog of NCBI NO: 15227027 NR Description: expressed protein [Arabidopsis thaliana]
  misc_feature (1)..(59): Homolog of NCBI NO: 25361065 NR Description: protein T7N9.6 [imported] - Arabidopsis thaliana
  misc_feature (1)..(59): Homolog of NCBI NO: 21537323 NR Description: unknown [Arabidopsis thaliana]
  misc_feature (1)..(59): Homolog of NCBI NO: 18396143 NR Description: bZIP family transcription factor [Arabidopsis
  misc_feature (43)..(43): Xaa is any aa, unknown or other
MEVRQLGNSRSITVLNGGSAQSGVSGLIVPAATVGALGYGYMXWKGISFSDLMYVTKRNM

SEQ ID NO: 2450 - DNA, 1377 bp, Zea mays subsp. mays
  misc_feature (1)..(1377): Ceres Seq. ID no. 12407875
  misc_feature: MA Experiment ID: 108528 Result: Up-regulated in Transcription
  misc_feature: MA Experiment 108528 PARAMETER Experiment Name: Zm_Imbibed_Seeds_P Parameter: Age (day) Value: 5 vs. 2
  misc_feature: MA Experiment 108528 PARAMETER Experiment Name: Zm_Imbibed_Seeds_P Parameter: Organism Value: Zea mays
  misc_feature: MA Experiment 108528 PARAMETER Experiment Name: Zm_Imbibed_Seeds_P Parameter: Plant Line Value: 35A19
  misc_feature: MA Experiment 108528 PARAMETER Experiment Name: Zm_Imbibed_Seeds_P Parameter: Tissue Value: Aerial vs. Embryo
  misc_feature: MA Experiment ID: 108530 Result: Up-regulated in Transcription
  misc_feature: MA Experiment 108530 PARAMETER Experiment Name: Zm_Imbibed_Seeds_P Parameter: Age (day) Value: 6 vs. 2
  misc_feature: MA Experiment 108530 PARAMETER Experiment Name: Zm_Imbibed_Seeds_P Parameter: Organism Value: Zea mays
  misc_feature: MA Experiment 108530 PARAMETER Experiment Name: Zm_Imbibed_Seeds_P Parameter: Plant Line Value: 35A19
  misc_feature: MA Experiment 108530 PARAMETER Experiment Name: Zm_Imbibed_Seeds_P Parameter: Tissue Value: Aerial vs. Embryo
  misc_feature: MA Experiment ID: 108547 Result: Up-regulated in Transcription
  misc_feature: MA Experiment 108547 PARAMETER Experiment Name: Zm_Imbibed_Seeds_P Parameter: Age (day) Value: 4 vs. 2
  misc_feature: MA Experiment 108547 PARAMETER Experiment Name: Zm_Imbibed_Seeds_P Parameter: Organism Value: Zea mays
  misc_feature: MA Experiment 108547 PARAMETER Experiment Name: Zm_Imbibed_Seeds_P Parameter: Plant Line Value: 35A19
  misc_feature: MA Experiment 108547 PARAMETER Experiment Name: Zm_Imbibed_Seeds_P Parameter: Tissue Value: Aerial vs. Embryo
aaaacccaatccacttcgcaagccccgccgcacacttcttccccctgcctccaaaaactcagaaaaccctgaccgccggcggcggccatgcttctccaccaccgcctcctccctcgcctacttcttgttccttccacacatacctccacactcctctgcccctcccgtttgccgcgccgcctctccctctcgccgcgcttctacgcgctgccccacctcgcggcaccccagaccgtcgaccactccgacgatgagggggcaccccagggggaggggcagatcaagctcccgctcgaccatctcttcgtgccgcccggggcaacaatggatgcgggggaccaggaggccgtgagcgcacgggtgcttaagggctccaacatcgtgctgggcccatacgcgcgcggcgacgcacaggtggtcaacgcagattttgtaaagagcagcgtgcgtcccgatgactgccctcgggacggccttccggagtttgcactcgttggccggtccaacgtcggcaaatcgtcgctgctcaactcgcttgtccgccgcaagcgccttgcccttacctccaagaagcctgggaagacccaatgtatcaatcatttcaaagtaaatgacagctggtatcttgttgacttgcctggttatggatatgcttctgcaccacaggaagctcgtaccaattgggatgaatttactagaaattactttctcagtcgggagaatttggtatctgtttttcttcttatagatgcaagtatacctgccaagaagattgatcttgactatgctagttggcttggccaaaacaaggttcccatgacccttgtgttcacaaaatgtgacaagcgcaagaagaagaagaacggcggcaggaaacctgaagaaaacgtggaaactttccagggcctaatccgcgaatacttcgaggccgcgcctccttggatcatgacgagcagcgtgaccaaccagggccgcgatgagatactcctgcacatgtctcagcttaggaattattggctcaagcattgagatgcaatgataaccaaaccggagcgaagcaactagaacagcatgcaaagcactgtagtccattgacgcatggacattcagcagtcggcgcctccgcaatcaggcgttcgcaccaactagtccagccttttgagctgttgactgtccaatatggcccctgtacatgattacccaatcaacactccggggatgcggacaaggtgctaaaatcagctgatcatggttttttttctttatttctattgtgtacacgtacaatcccaaccaacgttttccccttgttcccatctgattataggcttgtgtatactgtggggttaaatgattaataaattctggtgttagctg

SEQ ID NO: 2451 - protein, 313 aa, Zea mays subsp. mays
  peptide (1)..(313): Ceres Seq. ID no. 12407876
  misc_feature (132)..(259): Pfam Name: GTPase of unknown function Pfam Description: GTPase of unknown function
  misc_feature (109)..(308): Homolog of NCBI NO: 19705309 NR Description: GTP-binding protein
  misc_feature (111)..(306): Homolog of NCBI NO: 23137475 NR Description: hypothetical protein [Cytophaga hutchinsonii]
  misc_feature (109)..(306): Homolog of NCBI NO: 29346493 NR Description: putative GTP-binding protein
  misc_feature (92)..(187): Homolog of NCBI NO: 20330773 NR Description: Putative nucleotide binding protein
  misc_feature (188)..(310): Homolog of NCBI NO: 20330773 NR Description: Putative nucleotide binding protein
  misc_feature (92)..(310): Homolog of NCBI NO: 25306612 NR Description: probable nucleotide-binding protein
  misc_feature (35)..(310): Homolog of NCBI NO: 18400109 NR Description: putative nucleotide-binding protein
  misc_feature (16)..(313): Homolog of NCBI NO: 21592799 NR Description: putative GTP-binding protein [Arabidopsis
  misc_feature (16)..(313): Homolog of NCBI NO: 15239069 NR Description: putative GTP-binding protein
  misc_feature (1)..(313): Homolog of NCBI NO: 34910170 NR Description: putative GTP-binding protein
MLLHHRLLPRLLLVPSTHTSTLLCPSRLPRRLSLSPRFYALPHLAAPQTVDHSDDEGAPQGEGQIKLPLDHLFVPPGATMDAGDQEAVSARVLKGSNIVLGPYARGDAQVVNADFVKSSVRPDDCPRDGLPEFALVGRSNVGKSSLLNSLVRRKRLALTSKKPGKTQCINHFKVNDSWYLVDLPGYGYASAPQEARTNWDEFTRNYFLSRENLVSVFLLIDASIPAKKIDLDYASWLGQNKVPMTLVFTKCDKRKKKKNGGRKPEENVETFQGLIREYFEAAPPWIMTSSVTNQGRDEILLHMSQLRNYWLKH

SEQ ID NO: 2452 - protein, 234 aa, Zea mays subsp. mays
  peptide (1)..(234): Ceres Seq. ID no. 12407877
  misc_feature (53)..(180): Pfam Name: GTPase of unknown function Pfam Description: GTPase of unknown function
  misc_feature (13)..(108): Homolog of NCBI NO: 20330773 NR Description: Putative nucleotide binding protein
  misc_feature (109)..(231): Homolog of NCBI NO: 20330773 NR Description: Putative nucleotide binding protein
  misc_feature (13)..(231): Homolog of NCBI NO: 25306612 NR Description: probable nucleotide-binding protein
  misc_feature (1)..(231): Homolog of NCBI NO: 18400109 NR Description: putative nucleotide-binding protein
  misc_feature (32)..(227): Homolog of NCBI NO: 23137475 NR Description: hypothetical protein [Cytophaga hutchinsonii]
  misc_feature (30)..(227): Homolog of NCBI NO: 29346493 NR Description: putative GTP-binding protein
  misc_feature (30)..(229): Homolog of NCBI NO: 19705309 NR Description: GTP-binding protein
  misc_feature (1)..(234): Homolog of NCBI NO: 21592799 NR Description: putative GTP-binding protein [Arabidopsis
  misc_feature (1)..(234): Homolog of NCBI NO: 15239069 NR Description: putative GTP-binding protein
  misc_feature (1)..(234): Homolog of NCBI NO: 34910170 NR Description: putative GTP-binding protein
MDAGDQEAVSARVLKGSNIVLGPYARGDAQVVNADFVKSSVRPDDCPRDGLPEFALVGRSNVGKSSLLNSLVRRKRLALTSKKPGKTQCINHFKVNDSWYLVDLPGYGYASAPQEARTNWDEFTRNYFLSRENLVSVFLLIDASIPAKKIDLDYASWLGQNKVPMTLVFTKCDKRKKKKNGGRKPEENVETFQGLIREYFEAAPPWIMTSSVTNQGRDEILLHMSQLRNYWLKH

SEQ ID NO: 2453 - DNA, 1282 bp, Zea mays subsp. mays
  misc_feature (1)..(1282): Ceres Seq. ID no. 12353623
  misc_feature: MA Experiment ID: 108535 Result: Down-regulated in Transcription
  misc_feature: MA Experiment 108535 PARAMETER Experiment Name: Zm_Meristem_P Parameter: Age (day) Value: 8
  misc_feature: MA Experiment 108535 PARAMETER Experiment Name: Zm_Meristem_P Parameter: Organism Value: Zea mays
  misc_feature: MA Experiment 108535 PARAMETER Experiment Name: Zm_Meristem_P Parameter: Plant Line Value: 35A19
  misc_feature: MA Experiment 108535 PARAMETER Experiment Name: Zm_Meristem_P Parameter: Tissue Value: Root Meristem vs. Above Root Meristem
  misc_feature: MA Experiment ID: 20000488 Result: Down-regulated in Transcription
  misc_feature: MA Experiment 20000488 PARAMETER Experiment Name: Zm_50mM_NH4NO3_L_to_H_P Parameter: Organism Value: Zea mays
  misc_feature: MA Experiment 20000488 PARAMETER Experiment Name: Zm_50mM_NH4NO3_L_to_H_P Parameter: Timepoint (hr) Value: 8
  misc_feature: MA Experiment 20000488 PARAMETER Experiment Name: Zm_50mM_NH4NO3_L_to_H_P Parameter: Tissue Value: Leaves
  misc_feature: MA Experiment 20000488 PARAMETER Experiment Name: Zm_50mM_NH4NO3_L_to_H_P Parameter: Treatment Value: 50mM NH4NO3 vs. 100mM Mannitol
  misc_feature: MA Experiment ID: 20000492 Result: Down-regulated in Transcription
  misc_feature: MA Experiment 20000492 PARAMETER Experiment Name: Zm_Hybrid_Seed_Dev_P Parameter: DAP Value: 12
  misc_feature: MA Experiment 20000492 PARAMETER Experiment Name: Zm_Hybrid_Seed_Dev_P Parameter: Organism Value: Zea mays
  misc_feature: MA Experiment 20000492 PARAMETER Experiment Name: Zm_Hybrid_Seed_Dev_P Parameter: Plant Line Value: 35A19
  misc_feature: MA Experiment 20000492 PARAMETER Experiment Name: Zm_Hybrid_Seed_Dev_P Parameter: Tissue Value: Fert Kernel vs. Unfert Floret
  misc_feature: MA Experiment ID: 20000535 Result: Down-regulated in Transcription
  misc_feature: MA Experiment 20000535 PARAMETER Experiment Name: Zm_Hybrid_Seed_Dev_P Parameter: DAP Value: 30 vs. 12
  misc_feature: MA Experiment 20000535 PARAMETER Experiment Name: Zm_Hybrid_Seed_Dev_P Parameter: Organism Value: Zea mays
  misc_feature: MA Experiment 20000535 PARAMETER Experiment Name: Zm_Hybrid_Seed_Dev_P Parameter: Plant Line Value: 35A19
  misc_feature: MA Experiment 20000535 PARAMETER Experiment Name: Zm_Hybrid_Seed_Dev_P Parameter: Tissue Value: Embryo vs. Unfert Floret
acctgggactgggaggctgggaatcccggcaggcaaagcgaaagcatccgcgcgagaggcgtcgcgtgttccttgcttcgtcctcacgtgccgtggcccttccgcttcccccgtatccgcccgtcctgttcccgccccgagcgaaccggcggcggcggaggcgatgcagcacgagccgtggcggcctggcgctgagcccgccgccggggctggggcgggccctgctcccaccaccgtcgacgaggcatccatggagcggagcatgagcttcgtcaaggcgcttcaggagctcaagaacctgcgcccgcagctctactcggcctccgagtactgcgagaagtcctacctccgcagcgaacagaagcaagtggtgctggacaacatgaaagattacgctgtcagggccctggtcaacgctgtcgaccatcttggcacagtggcctacaagctgacagacctatacgaagagcaggcttcagaaataacaaccctcgagttgaaagtagcatgcttgaaccagcaagtccgtacctgccagacatacacggacaaagaaggccttaggcaacagcagatgatgggggctgccagaagacaccataaccattacatcgtaccatatgcgggaaacaaaagaatgcaggccttctctgttacgcaagccgatgctgatttcgacccaacgccaaggcctttctcttcagcaaggacccttgagtggcatttggtttccgagaagaattccaaaaccagtagaccagatcagtctgaaactgccttaggagaaacaaaaaccactaaggcttcgtcaagtggtttccgccttctcggcaaggaatcatctgcatctcccttgtccaggaatgtgcagtccaacataaccagtttggatattgtcagcgtcggcatgaaggatcagcccacgaccaggcacttgtcatcgttcagttctttggacaaccccagggggcgccaaatccagaaggccccgcttcgcacaaaaagtatgctagccgctttcttcgtcaaacacagatcagcaaagatgaaaaacgtctctgtgcgttgatcaactgcaagccaagcctgtagtttgctccagccaaaccaacgtggaagtgttaagggcatgagatgtatacatgtttgtatatggtatttgggtcttgtatgctagtgctctagagataaacctttacggatgcgctttcaatctagagtctttggcattttgctcatgaccttaatgtaatgatttatatggatatatattactagtttt

SEQ ID NO: 2454 - protein, 355 aa, Zea mays subsp. mays
  peptide (1)..(355): Ceres Seq. ID no. 12353624
  misc_feature (80)..(217): Homolog of NCBI NO: 15238265 NR Description: putative protein
  misc_feature (69)..(213): Homolog of NCBI NO: 34913914 NR Description: OSJNBa0066C06.8 [Oryza sativa (japonica
  misc_feature (68)..(212): Homolog of NCBI NO: 30689382 NR Description: expressed protein [Arabidopsis thaliana]
  misc_feature (68)..(212): Homolog of NCBI NO: 10177091 NR Description: emb|CAB66408.1~gene_id:MOP9.13~strong similarity
  misc_feature (80)..(224): Homolog of NCBI NO: 15229112 NR Description: putative protein; protein id: At3g49290.1
  misc_feature (234)..(350): Homolog of NCBI NO: 25408977 NR Description: hypothetical protein At2g46220 [imported] -
  misc_feature (95)..(222): Homolog of NCBI NO: 25408977 NR Description: hypothetical protein At2g46220 [imported] -
  misc_feature (74)..(350): Homolog of NCBI NO: 26452761 NR Description: unknown protein [Arabidopsis thaliana]
  misc_feature (74)..(350): Homolog of NCBI NO: 18407012 NR Description: expressed protein
  misc_feature (69)..(355): Homolog of NCBI NO: 34912804 NR Description: P0501G01.11 [Oryza sativa (japonica
PGTGRLGIPAGKAKASAREASRVPCFVLTCRGPSASPVSARPVPAPSEPAAAEAMQHEPWRPGAEPAAGAGAGPAPTTVDEASMERSMSFVKALQELKNLRPQLYSASEYCEKSYLRSEQKQVVLDNMKDYAVRALVNAVDHLGTVAYKLTDLYEEQASEITTLELKVACLNQQVRTCQTYTDKEGLRQQQMMGAARRHHNHYIVPYAGNKRMQAFSVTQADADFDPTPRPFSSARTLEWHLVSEKNSKTSRPDQSETALGETKTTKASSSGFRLLGKESSASPLSRNVQSNITSLDIVSVGMKDQPTTRHLSSFSSLDNPRGRQIQKAPLRTKSMLAAFFVKHRSAKMKNVSVR

SEQ ID NO: 2455 - protein, 301 aa, Zea mays subsp. mays
  peptide (1)..(301): Ceres Seq. ID no. 12353625
  misc_feature (26)..(163): Homolog of NCBI NO: 15238265 NR Description: putative protein
  misc_feature (15)..(159): Homolog of NCBI NO: 34913914 NR Description: OSJNBa0066C06.8 [Oryza sativa (japonica
  misc_feature (14)..(158): Homolog of NCBI NO: 30689382 NR Description: expressed protein [Arabidopsis thaliana]
  misc_feature (14)..(158): Homolog of NCBI NO: 10177091 NR Description: emb|CAB66408.1~gene_id:MOP9.13~strong similarity
  misc_feature (26)..(170): Homolog of NCBI NO: 15229112 NR Description: putative protein; protein id: At3g49290.1
  misc_feature (180)..(296): Homolog of NCBI NO: 25408977 NR Description: hypothetical protein At2g46220 [imported] -
  misc_feature (41)..(168): Homolog of NCBI NO: 25408977 NR Description: hypothetical protein At2g46220 [imported] -
  misc_feature (20)..(296): Homolog of NCBI NO: 26452761 NR Description: unknown protein [Arabidopsis thaliana]
  misc_feature (20)..(296): Homolog of NCBI NO: 18407012 NR Description: expressed protein
  misc_feature (15)..(301): Homolog of NCBI NO: 34912804 NR Description: P0501G01.11 [Oryza sativa (japonica
MQHEPWRPGAEPAAGAGAGPAPTTVDEASMERSMSFVKALQELKNLRPQLYSASEYCEKSYLRSEQKQVVLDNMKDYAVRALVNAVDHLGTVAYKLTDLYEEQASEITTLELKVACLNQQVRTCQTYTDKEGLRQQQMMGAARRHHNHYIVPYAGNKRMQAFSVTQADADFDPTPRPFSSARTLEWHLVSEKNSKTSRPDQSETALGETKTTKASSSGFRLLGKESSASPLSRNVQSNITSLDIVSVGMKDQPTTRHLSSFSSLDNPRGRQIQKAPLRTKSMLAAFFVKHRSAKMKNVSVR

SEQ ID NO: 2456 - protein, 272 aa, Zea mays subsp. mays
  peptide (1)..(272): Ceres Seq. ID no. 12353626
  misc_feature (1)..(134): Homolog of NCBI NO: 15238265 NR Description: putative protein
  misc_feature (1)..(130): Homolog of NCBI NO: 34913914 NR Description: OSJNBa0066C06.8 [Oryza sativa (japonica
  misc_feature (1)..(129): Homolog of NCBI NO: 30689382 NR Description: expressed protein [Arabidopsis thaliana]
  misc_feature (1)..(129): Homolog of NCBI NO: 10177091 NR Description: emb|CAB66408.1~gene_id:MOP9.13~strong similarity
  misc_feature (1)..(141): Homolog of NCBI NO: 15229112 NR Description: putative protein; protein id: At3g49290.1
  misc_feature (151)..(267): Homolog of NCBI NO: 25408977 NR Description: hypothetical protein At2g46220 [imported] -
  misc_feature (12)..(139): Homolog of NCBI NO: 25408977 NR Description: hypothetical protein At2g46220 [imported] -
  misc_feature (1)..(267): Homolog of NCBI NO: 26452761 NR Description: unknown protein [Arabidopsis thaliana]
  misc_feature (1)..(267): Homolog of NCBI NO: 18407012 NR Description: expressed protein
  misc_feature (1)..(272): Homolog of NCBI NO: 34912804 NR Description: P0501G01.11 [Oryza sativa (japonica
MERSMSFVKALQELKNLRPQLYSASEYCEKSYLRSEQKQVVLDNMKDYAVRALVNAVDHLGTVAYKLTDLYEEQASEITTLELKVACLNQQVRTCQTYTDKEGLRQQQMMGAARRHHNHYIVPYAGNKRMQAFSVTQADADFDPTPRPFSSARTLEWHLVSEKNSKTSRPDQSETALGETKTTKASSSGFRLLGKESSASPLSRNVQSNITSLDIVSVGMKDQPTTRHLSSFSSLDNPRGRQIQKAPLRTKSMLAAFFVKHRSAKMKNVSVR

SEQ ID NO: 2457 - DNA, 1067 bp, Zea mays subsp. mays
  misc_feature (1)..(1067): Ceres Seq. ID no. 12336665
  misc_feature: MA Experiment ID: 108523 Result: Down-regulated in Transcription
  misc_feature: MA Experiment 108523 PARAMETER Experiment Name: Zm_42deg_Heat_P Parameter: Age (day) Value: 8
  misc_feature: MA Experiment 108523 PARAMETER Experiment Name: Zm_42deg_Heat_P Parameter: Organism Value: Zea mays
  misc_feature: MA Experiment 108523 PARAMETER Experiment Name: Zm_42deg_Heat_P Parameter: Plant Line Value: 35A19
  misc_feature: MA Experiment 108523 PARAMETER Experiment Name: Zm_42deg_Heat_P Parameter: Temperature (deg C) Value: 42 vs. 22
  misc_feature: MA Experiment 108523 PARAMETER Experiment Name: Zm_42deg_Heat_P Parameter: Timepoint (hr) Value: 6
  misc_feature: MA Experiment 108523 PARAMETER Experiment Name: Zm_42deg_Heat_P Parameter: Tissue Value: Aerial
  misc_feature: MA Experiment ID: 108529 Result: Down-regulated in Transcription
  misc_feature: MA Experiment 108529 PARAMETER Experiment Name: Zm_Imbibed_Seeds_P Parameter: Age (day) Value: 5 vs. 2
  misc_feature: MA Experiment 108529 PARAMETER Experiment Name: Zm_Imbibed_Seeds_P Parameter: Organism Value: Zea mays
  misc_feature: MA Experiment 108529 PARAMETER Experiment Name: Zm_Imbibed_Seeds_P Parameter: Plant Line Value: 35A19
  misc_feature: MA Experiment 108529 PARAMETER Experiment Name: Zm_Imbibed_Seeds_P Parameter: Tissue Value: Roots vs. Embryo
  misc_feature: MA Experiment ID: 20000477 Result: Down-regulated in Transcription
  misc_feature: MA Experiment 20000477 PARAMETER Experiment Name: Zm_5mM_SA_P Parameter: Age (day) Value: 10
  misc_feature: MA Experiment 20000477 PARAMETER Experiment Name: Zm_5mM_SA_P Parameter: Organism Value: Zea mays
  misc_feature: MA Experiment 20000477 PARAMETER Experiment Name: Zm_5mM_SA_P Parameter: Plant Line Value: 35A19
  misc_feature: MA Experiment 20000477 PARAMETER Experiment Name: Zm_5mM_SA_P Parameter: Timepoint (hr) Value: 48
  misc_feature: MA Experiment 20000477 PARAMETER Experiment Name: Zm_5mM_SA_P Parameter: Tissue Value: Aerial
  misc_feature: MA Experiment 20000477 PARAMETER Experiment Name: Zm_5mM_SA_P Parameter: Treatment Value: 5mM SA vs. No Treatment
  misc_feature: MA Experiment ID: 20000478 Result: Down-regulated in Transcription
  misc_feature: MA Experiment 20000478 PARAMETER Experiment Name: Zm_5mM_SA_P Parameter: Age (day) Value: 11
  misc_feature: MA Experiment 20000478 PARAMETER Experiment Name: Zm_5mM_SA_P Parameter: Organism Value: Zea mays
  misc_feature: MA Experiment 20000478 PARAMETER Experiment Name: Zm_5mM_SA_P Parameter: Plant Line Value: 35A19
  misc_feature: MA Experiment 20000478 PARAMETER Experiment Name: Zm_5mM_SA_P Parameter: Timepoint (hr) Value: 72
  misc_feature: MA Experiment 20000478 PARAMETER Experiment Name: Zm_5mM_SA_P Parameter: Tissue Value: Aerial
  misc_feature: MA Experiment 20000478 PARAMETER Experiment Name: Zm_5mM_SA_P Parameter: Treatment Value: 5mM SA vs. No Treatment
  misc_feature: MA Experiment ID: 20000479 Result: Down-regulated in Transcription
  misc_feature: MA Experiment 20000479 PARAMETER Experiment Name: Zm_Drought_P Parameter: Age (day) Value: 10
  misc_feature: MA Experiment 20000479 PARAMETER Experiment Name: Zm_Drought_P Parameter: Organism Value: Zea mays
  misc_feature: MA Experiment 20000479 PARAMETER Experiment Name: Zm_Drought_P Parameter: Plant Line Value: 35A19
  misc_feature: MA Experiment 20000479 PARAMETER Experiment Name: Zm_Drought_P Parameter: Timepoint (hr) Value: 48
  misc_feature: MA Experiment 20000479 PARAMETER Experiment Name: Zm_Drought_P Parameter: Tissue Value: Aerial
  misc_feature: MA Experiment 20000479 PARAMETER Experiment Name: Zm_Drought_P Parameter: Treatment Value: Drought vs. No Drought
agcccctcctaaatttttttctagatccgtccctgtttgccgctgtgtttagctctcttccccgcaagatccatcgatcggtcggacaggataagacatgggtcagattttgggtttagttcaggttgatcagtcaactgtagccatcaaagaaaattttggcaagttcagcgaggtcctggagcctggttgccacttcctgccctggtgcatagggcagcagattgctggttacctctccttgcgtgtgcgccagctggatgtccgctgcgaaacaaagacaaaggacaatgtctttgtcactgttgttgcatctgttcaatatcgcgctcttgctgataaggcatctgacgccttctacaagctgagcaacaccagggaacaaatccagtcatacgtatttgatgtcatcagagctactgttccgaagctgggcttggacgatgcatttgagcagaagaatgagatcgcaaaagcagtggaagaggagcttgaaaaggcaatgtctacttatggctatcagatcgtgcaaacgctaattgttgatattgagcctgacgaccgcgtcaagagagcaatgaacgagatcaatgcagctgctaggatgagggtggcagccagtgagaaagctgaggctgagaagatactccagatcaagaaagccgagggagaggcggaatccaagtacctggctggcgtgggtattgcaaggcagcgccaggccattgtggatgggctgagggacagtgtgctcgccttctcagagaacgttccaggcaccactgccaaggacatcatggacatggtcctggtcacccagtactttgacaccatgagggagattggggcctcctccaagtcctcttcggtgttcatcccccacggtcctggagctgtcaaggatgtctcggcgcagataagagatggcctcctgcaggctaatctgcactgagggtaccctgagaaaacgaaggattcagagggatgagggcatcggtcctatgatgctataaaattgtcaattatagactatatatgatatatagaggcaggcttgattgatttgt

SEQ ID NO: 2458 - protein, 284 aa, Zea mays subsp. mays
  peptide (1)..(284): Ceres Seq. ID no. 12336666
  misc_feature (1)..(282): Homolog of NCBI NO: 15222481 NR Description: unknown protein
  misc_feature (1)..(282): Homolog of NCBI NO: 3928150 NR Description: hypothetical protein [Cicer arietinum]
  misc_feature (1)..(282): Homolog of NCBI NO: 15241939 NR Description: putative protein
  misc_feature (1)..(283): Homolog of NCBI NO: 23345042 NR Description: hypersensitive-induced reaction protein 1
  misc_feature (1)..(283): Homolog of NCBI NO: 9998903 NR Description: putative membrane protein [Zea mays]
  misc_feature (1)..(282): Homolog of NCBI NO: 28476864 NR Description: hypersensitive-induced reaction protein 2
  misc_feature (1)..(283): Homolog of NCBI NO: 7716466 NR Description: hypersensitive-induced response protein [Zea mays]
  misc_feature (1)..(283): Homolog of NCBI NO: 14150732 NR Description: hypersensitive-induced response protein [Oryza
  misc_feature (1)..(282): Homolog of NCBI NO: 13194676 NR Description: hypersensitivity-induced response-like protein
  misc_feature (1)..(284): Homolog of NCBI NO: 7716468 NR Description: hypersensitive-induced response protein [Zea mays]
MGQILGLVQVDQSTVAIKENFGKFSEVLEPGCHFLPWCIGQQIAGYLSLRVRQLDVRCETKTKDNVFVTVVASVQYRALADKASDAFYKLSNTREQIQSYVFDVIRATVPKLGLDDAFEQKNEIAKAVEEELEKAMSTYGYQIVQTLIVDIEPDDRVKRAMNEINAAARMRVAASEKAEAEKILQIKKAEGEAESKYLAGVGIARQRQAIVDGLRDSVLAFSENVPGTTAKDIMDMVLVTQYFDTMREIGASSKSSSVFIPHGPGAVKDVSAQIRDGLLQANLH

SEQ ID NO: 2459 - protein, 149 aa, Zea mays subsp. mays
  peptide (1)..(149): Ceres Seq. ID no. 12336667
  misc_feature (1)..(147): Homolog of NCBI NO: 15222481 NR Description: unknown protein
  misc_feature (1)..(147): Homolog of NCBI NO: 3928150 NR Description: hypothetical protein [Cicer arietinum]
  misc_feature (1)..(147): Homolog of NCBI NO: 15241939 NR Description: putative protein
  misc_feature (1)..(148): Homolog of NCBI NO: 23345042 NR Description: hypersensitive-induced reaction protein 1
  misc_feature (1)..(148): Homolog of NCBI NO: 9998903 NR Description: putative membrane protein [Zea mays]
  misc_feature (1)..(147): Homolog of NCBI NO: 28476864 NR Description: hypersensitive-induced reaction protein 2
  misc_feature (1)..(148): Homolog of NCBI NO: 7716466 NR Description: hypersensitive-induced response protein [Zea mays]
  misc_feature (1)..(148): Homolog of NCBI NO: 14150732 NR Description: hypersensitive-induced response protein [Oryza
  misc_feature (1)..(147): Homolog of NCBI NO: 13194676 NR Description: hypersensitivity-induced response-like protein
  misc_feature (1)..(149): Homolog of NCBI NO: 7716468 NR Description: hypersensitive-induced response protein [Zea mays]
MSTYGYQIVQTLIVDIEPDDRVKRAMNEINAAARMRVAASEKAEAEKILQIKKAEGEAESKYLAGVGIARQRQAIVDGLRDSVLAFSENVPGTTAKDIMDMVLVTQYFDTMREIGASSKSSSVFIPHGPGAVKDVSAQIRDGLLQANLH

SEQ ID NO: 2460 - DNA, 1520 bp, Zea mays subsp. mays
  misc_feature (1)..(1520): Ceres Seq. ID no. 12349893
  misc_feature: MA Experiment ID: 20000534 Result: Up-regulated in Transcription
  misc_feature: MA Experiment 20000534 PARAMETER Experiment Name: Zm_Hybrid_Pollen_P Parameter: Age (day) Value: 8
  misc_feature: MA Experiment 20000534 PARAMETER Experiment Name: Zm_Hybrid_Pollen_P Parameter: Organism Value: Zea mays
  misc_feature: MA Experiment 20000534 PARAMETER Experiment Name: Zm_Hybrid_Pollen_P Parameter: Plant Line Value: 35A19
  misc_feature: MA Experiment 20000534 PARAMETER Experiment Name: Zm_Hybrid_Pollen_P Parameter: Tissue Value: Pollen vs. Aerial
atttttcctccgcctgcccaccctcgccgatgtagggcgcgccgccaccacctgcgcctccttccgccgcgtcgtcgccgacagcaccttcctgcgccgcctccgctccgtccacccggcgcccctcctcggcttactgctcttctcatcagtccacccggcggagccgccccacccctccgcgccctatgcgcgagctctgcagagggccgcagacctctccttctccttcgtcccctgcgccggccgctggatcccgatcgacgcccgcgacggccgcgtcctcctggagagcgagaccatgggcggcgactttgcggtgtgcgaccctgtgtcccggcgatacctctttctgccccgtatccccggacacccagccgctcagcgctgccgccgtctggagccgttcctcgttcccgccagtaacgaggagccggagacgtcgctgagggtggtctgcgtggcagagcgcaaacctggacagctggtcgccttcgtcttctcttcggacaccgggcgatggggaagtctgaccgtggatgtcagcgtgcctccctcttgcaaattttcgtggtcctcctacggtttcggcagctgctactggaaggtgactgggagtaacaaactccttgggctcgacacgcgttccatggtgttctcctctttcgatatcccgtctggttacggccagcaagattctgtcgttgtggaggcagcggaaggcagattcagaatgttcactctccacaacagcatgatttctgctgcatcttacctggttcatgctgttcgggtaatccgcgaagaaggcaacaacctttggcaggttaagaggagagtcaggttgccgtcccaatatattttcagctttgcagatgcaacggataagcacttactccttcgtgggattccatggaatttgcacctggagccttctactcctggcgctgatataggatacttctctgttgagttcgagtctatgcaggttgagaaaatttgtggcatcaggaatcttctatacgccaaactgtacactggttttccaccgtcattgtccctaccaagcatatgaaatggtggcttcacaacgtgaatgaactatgctggctattgacttcaatctggtggtttggaaaggaagcaaaggattcatgtatgaactacttccagggcagggtcactaaggagtaaaaggacttgaggactgatgagcagttggatgatctgtttttcagtcttttaggacatgtttggatgcagccctggcctggaccgcctgctggcttaggcagctttcccgtgccgccatccaaacatgcccgcccttattttgtcgtcgtaccaatatttcgatgtgattctgcatccgcatctgccagagtgctgttgcaacgttgcatcctatcctggaaggctggaatgtttatttggtgctcggcatctctctgaacttcatgtttccccggcgtaccatgctagtgtttttcaatggagccattattgcacttcgctgtgcc

SEQ ID NO: 2461 - protein, 357 aa, Zea mays subsp. mays
  peptide (1)..(357): Ceres Seq. ID no. 12349894
  misc_feature (3)..(111): Homolog of NCBI NO: 37530888 NR Description: hypothetical protein [Oryza sativa (japonica
  misc_feature (3)..(241): Homolog of NCBI NO: 34914942 NR Description: B1096D03.38 [Oryza sativa (japonica
  misc_feature (2)..(127): Homolog of NCBI NO: 37530886 NR Description: hypothetical protein [Oryza sativa (japonica
  misc_feature (2)..(127): Homolog of NCBI NO: 34393351 NR Description: hypothetical protein [Oryza sativa (japonica
  misc_feature (3)..(127): Homolog of NCBI NO: 32480316 NR Description: OSJNBa0042D13.1 [Oryza sativa (japonica
  misc_feature (3)..(132): Homolog of NCBI NO: 34393352 NR Description: hypothetical protein [Oryza sativa (japonica
  misc_feature (3)..(132): Homolog of NCBI NO: 34393354 NR Description: hypothetical protein [Oryza sativa (japonica
  misc_feature (132)..(357): Homolog of NCBI NO: 34393354 NR Description: hypothetical protein [Oryza sativa (japonica
FFLRLPTLADVGRAATTCASFRRVVADSTFLRRLRSVHPAPLLGLLLFSSVHPAEPPHPSAPYARALQRAADLSFSFVPCAGRWIPIDARDGRVLLESETMGGDFAVCDPVSRRYLFLPRIPGHPAAQRCRRLEPFLVPASNEEPETSLRVVCVAERKPGQLVAFVFSSDTGRWGSLTVDVSVPPSCKFSWSSYGFGSCYWKVTGSNKLLGLDTRSMVFSSFDIPSGYGQQDSVVVEAAEGRFRMFTLHNSMISAASYLVHAVRVIREEGNNLWQVKRRVRLPSQYIFSFADATDKHLLLRGIPWNLHLEPSTPGADIGYFSVEFESMQVEKICGIRNLLYAKLYTGFPPSLSLPSI

SEQ ID NO: 2462 - protein, 257 aa, Zea mays subsp. mays
  peptide (1)..(257): Ceres Seq. ID no. 12349895
  misc_feature (1)..(11): Homolog of NCBI NO: 37530888 NR Description: hypothetical protein [Oryza sativa (japonica
  misc_feature (1)..(141): Homolog of NCBI NO: 34914942 NR Description: B1096D03.38 [Oryza sativa (japonica
  misc_feature (1)..(27): Homolog of NCBI NO: 37530886 NR Description: hypothetical protein [Oryza sativa (japonica
  misc_feature (1)..(27): Homolog of NCBI NO: 34393351 NR Description: hypothetical protein [Oryza sativa (japonica
  misc_feature (1)..(27): Homolog of NCBI NO: 32480316 NR Description: OSJNBa0042D13.1 [Oryza sativa (japonica
  misc_feature (1)..(32): Homolog of NCBI NO: 34393352 NR Description: hypothetical protein [Oryza sativa (japonica
  misc_feature (1)..(32): Homolog of NCBI NO: 34393354 NR Description: hypothetical protein [Oryza sativa (japonica
  misc_feature (32)..(257): Homolog of NCBI NO: 34393354 NR Description: hypothetical protein [Oryza sativa (japonica
MGGDFAVCDPVSRRYLFLPRIPGHPAAQRCRRLEPFLVPASNEEPETSLRVVCVAERKPGQLVAFVFSSDTGRWGSLTVDVSVPPSCKFSWSSYGFGSCYWKVTGSNKLLGLDTRSMVFSSFDIPSGYGQQDSVVVEAAEGRFRMFTLHNSMISAASYLVHAVRVIREEGNNLWQVKRRVRLPSQYIFSFADATDKHLLLRGIPWNLHLEPSTPGADIGYFSVEFESMQVEKICGIRNLLYAKLYTGFPPSLSLPSI

SEQ ID NO: 2463 - DNA, 1468 bp, Zea mays subsp. mays
  misc_feature (1)..(1468): Ceres Seq. ID no. 12372661
  misc_feature: MA Experiment ID: 108528 Result: Up-regulated in Transcription
  misc_feature: MA Experiment 108528 PARAMETER Experiment Name: Zm_Imbibed_Seeds_P Parameter: Age (day) Value: 5 vs. 2
  misc_feature: MA Experiment 108528 PARAMETER Experiment Name: Zm_Imbibed_Seeds_P Parameter: Organism Value: Zea mays
  misc_feature: MA Experiment 108528 PARAMETER Experiment Name: Zm_Imbibed_Seeds_P Parameter: Plant Line Value: 35A19
  misc_feature: MA Experiment 108528 PARAMETER Experiment Name: Zm_Imbibed_Seeds_P Parameter: Tissue Value: Aerial vs. Embryo
  misc_feature: MA Experiment ID: 108530 Result: Up-regulated in Transcription
  misc_feature: MA Experiment 108530 PARAMETER Experiment Name: Zm_Imbibed_Seeds_P Parameter: Age (day) Value: 6 vs. 2
  misc_feature: MA Experiment 108530 PARAMETER Experiment Name: Zm_Imbibed_Seeds_P Parameter: Organism Value: Zea mays
  misc_feature: MA Experiment 108530 PARAMETER Experiment Name: Zm_Imbibed_Seeds_P Parameter: Plant Line Value: 35A19
  misc_feature: MA Experiment 108530 PARAMETER Experiment Name: Zm_Imbibed_Seeds_P Parameter: Tissue Value: Aerial vs. Embryo
  misc_feature: MA Experiment ID: 108545 Result: Up-regulated in Transcription
  misc_feature: MA Experiment 108545 PARAMETER Experiment Name: Zm_Imbibed_Seeds_P Parameter: Age (day) Value: 3 vs. 2
  misc_feature: MA Experiment 108545 PARAMETER Experiment Name: Zm_Imbibed_Seeds_P Parameter: Organism Value: Zea mays
  misc_feature: MA Experiment 108545 PARAMETER Experiment Name: Zm_Imbibed_Seeds_P Parameter: Plant Line Value: 35A19
  misc_feature: MA Experiment 108545 PARAMETER Experiment Name: Zm_Imbibed_Seeds_P Parameter: Tissue Value: Aerial vs. Embryo
  misc_feature: MA Experiment ID: 108547 Result: Up-regulated in Transcription
  misc_feature: MA Experiment 108547 PARAMETER Experiment Name: Zm_Imbibed_Seeds_P Parameter: Age (day) Value: 4 vs. 2
  misc_feature: MA Experiment 108547 PARAMETER Experiment Name: Zm_Imbibed_Seeds_P Parameter: Organism Value: Zea mays
  misc_feature: MA Experiment 108547 PARAMETER Experiment Name: Zm_Imbibed_Seeds_P Parameter: Plant Line Value: 35A19
  misc_feature: MA Experiment 108547 PARAMETER Experiment Name: Zm_Imbibed_Seeds_P Parameter: Tissue Value: Aerial vs. Embryo
  misc_feature: MA Experiment ID: 20000535 Result: Down-regulated in Transcription
  misc_feature: MA Experiment 20000535 PARAMETER Experiment Name: Zm_Hybrid_Seed_Dev_P Parameter: DAP Value: 30 vs. 12
  misc_feature: MA Experiment 20000535 PARAMETER Experiment Name: Zm_Hybrid_Seed_Dev_P Parameter: Organism Value: Zea mays
  misc_feature: MA Experiment 20000535 PARAMETER Experiment Name: Zm_Hybrid_Seed_Dev_P Parameter: Plant Line Value: 35A19
  misc_feature: MA Experiment 20000535 PARAMETER Experiment Name: Zm_Hybrid_Seed_Dev_P Parameter: Tissue Value: Embryo vs. Unfert Floret
gcacgagaccattacctagaacatcctaatcgaaaaatctcccaagttcccatcccagtccgtcagtcaagcgagcgaaatcgaatggctcccctcttcgccgcggcgtcccacgcgtccctcctccccctctcctccctcgaccgccccgccgccggccacctagtccgtggcaccctcaggccccgcacctcgagcctccgcctgcgccgccccccgggggcaaccgggcgcggccgcgggcgtggccgagggggcatcccagacgagtggggcgagcgctcgccgccggccaaccccgagccccccgcgcagcccgatcctcccatcgacgaagacgagtggggccgcgacgactctgccgacggcaactcacgccctatcgtcgtcgacgagtggggcgagcccggggtgcctgagcccgagccgccctccgccgcggacccgcctagcccctccgcagacgacgactggggaaaggagccggaggcgccggcgccggcccctgctccggcggcggaggaggacgagcaggaggtgaagagggaggagctcaagcggtgcctggtggacacggtgtacggctccgacctcggcttccgggcgtccacggaggtcagaggtgaggtcgtcgagctagtcacccagctcgaggcggttaaccctactactgctcccgtcgactcgccggatctcctcgacggcaactggatcctcatatatacagcatattccgagcttctgcctattctagctgctggggcaacacctttggtcaaagtaaagcagatatcccaagaaattgactccaaaatcatgacgatagtcaatgcttcgacccttacgactccattcgcttcattttcattcagcgcaaccgcctctttcgaggttcaaagcccatcaaggatagaggtccaatttaaggaggggagctttcagcctccggcaatatcatcatccgtggatctacctcaacaagttgatatatttgggcagaagatcagcctggggccagtccagcaggcactgaatccattgcagcaagcatttgctagcattgctgggtccatttctgggcagccacccctcaaggtaccaattcctggcaacaacagagctcgatcctggctcttgactacctacctggacaaagacttaaggatctcgagaggcgatggaggcttgtttattcttgccaaagaggggagccctttgctagatcaattgtaaatctgtaattggttgctaccggaaaggatatccagaactccacaggtaacctaacagaggacgcctcacattgtatttatcaatcaatattgttgttggcggcactgttacatgtatggggccatgaaatcttagaaatgaatatttagtcgataagaatcgagagctgaactgagactgatacaaacaaaacacttcaatgttcatctgaaaaaaaaaaaaaaaaaaaaaaaaa

SEQ ID NO: 2464 - protein, 410 aa, Zea mays subsp. mays
  peptide (1)..(410): Ceres Seq. ID no. 12372662
  misc_feature (183)..(399): Pfam Name: PAP_fibrillin Pfam Description: PAP_fibrillin
  misc_feature (141)..(407): Homolog of NCBI NO: 1076575 NR Description: plant fibrillin precursor - pepper
  misc_feature (155)..(407): Homolog of NCBI NO: 3928760 NR Description: homolog to plastid-lipid-associated protein
  misc_feature (155)..(407): Homolog of NCBI NO: 7489179 NR Description: plastid-lipid-associated protein pap - common
  misc_feature (141)..(407): Homolog of NCBI NO: 22261807 NR Description: Light-induced protein, chloroplast precursor
  misc_feature (113)..(409): Homolog of NCBI NO: 4105180 NR Description: plastoglobule associated protein PG1 precursor
  misc_feature (29)..(408): Homolog of NCBI NO: 14596235 NR Description: putative fibrillin [Arabidopsis thaliana]
  misc_feature (113)..(408): Homolog of NCBI NO: 14248558 NR Description: plastid-lipid associated protein PAP3 [Brassica
  misc_feature (113)..(408): Homolog of NCBI NO: 14248552 NR Description: plastid-lipid associated protein PAP3 [Brassica
  misc_feature (29)..(408): Homolog of NCBI NO: 15227428 NR Description: putative fibrillin
  misc_feature (31)..(410): Homolog of NCBI NO: 37537108 NR Description: putative plastid-lipid associated protein
ARDHYLEHPNRKISQVPIPVRQSSERNRMAPLFAAASHASLLPLSSLDRPAAGHLVRGTLRPRTSSLRLRRPPGATGRGRGRGRGGIPDEWGERSPPANPEPPAQPDPPIDEDEWGRDDSADGNSRPIVVDEWGEPGVPEPEPPSAADPPSPSADDDWGKEPEAPAPAPAPAAEEDEQEVKREELKRCLVDTVYGSDLGFRASTEVRGEVVELVTQLEAVNPTTAPVDSPDLLDGNWILIYTAYSELLPILAAGATPLVKVKQISQEIDSKIMTIVNASTLTTPFASFSFSATASFEVQSPSRIEVQFKEGSFQPPAISSSVDLPQQVDIFGQKISLGPVQQALNPLQQAFASIAGSISGQPPLKVPIPGNNRARSWLLTTYLDKDLRISRGDGGLFILAKEGSPLLDQL

SEQ ID NO: 2465 - protein, 382 aa, Zea mays subsp. mays
  peptide (1)..(382): Ceres Seq. ID no. 12372663
  misc_feature (155)..(371): Pfam Name: PAP_fibrillin Pfam Description: PAP_fibrillin
  misc_feature (113)..(379): Homolog of NCBI NO: 1076575 NR Description: plant fibrillin precursor - pepper
  misc_feature (127)..(379): Homolog of NCBI NO: 3928760 NR Description: homolog to plastid-lipid-associated protein
  misc_feature (127)..(379): Homolog of NCBI NO: 7489179 NR Description: plastid-lipid-associated protein pap - common
  misc_feature (113)..(379): Homolog of NCBI NO: 22261807 NR Description: Light-induced protein, chloroplast precursor
  misc_feature (85)..(381): Homolog of NCBI NO: 4105180 NR Description: plastoglobule associated protein PG1 precursor
  misc_feature (1)..(380): Homolog of NCBI NO: 14596235 NR Description: putative fibrillin [Arabidopsis thaliana]
  misc_feature (85)..(380): Homolog of NCBI NO: 14248558 NR Description: plastid-lipid associated protein PAP3 [Brassica
  misc_feature (85)..(380): Homolog of NCBI NO: 14248552 NR Description: plastid-lipid associated protein PAP3 [Brassica
  misc_feature (1)..(380): Homolog of NCBI NO: 15227428 NR Description: putative fibrillin
  misc_feature (3)..(382): Homolog of NCBI NO: 37537108 NR Description: putative plastid-lipid associated protein
MAPLFAAASHASLLPLSSLDRPAAGHLVRGTLRPRTSSLRLRRPPGATGRGRGRGRGGIPDEWGERSPPANPEPPAQPDPPIDEDEWGRDDSADGNSRPIVVDEWGEPGVPEPEPPSAADPPSPSADDDWGKEPEAPAPAPAPAAEEDEQEVKREELKRCLVDTVYGSDLGFRASTEVRGEVVELVTQLEAVNPTTAPVDSPDLLDGNWILIYTAYSELLPILAAGATPLVKVKQISQEIDSKIMTIVNASTLTTPFASFSFSATASFEVQSPSRIEVQFKEGSFQPPAISSSVDLPQQVDIFGQKISLGPVQQALNPLQQAFASIAGSISGQPPLKVPIPGNNRARSWLLTTYLDKDLRISRGDGGLFILAKEGSPLLDQL

SEQ ID NO: 2466 - DNA, 482 bp, Zea mays subsp. mays
  misc_feature (1)..(482): Ceres Seq. ID no. 1348034
  misc_feature: MA Experiment ID: 108523 Result: Down-regulated in Transcription
  misc_feature: MA Experiment 108523 PARAMETER Experiment Name: Zm_42deg_Heat_P Parameter: Age (day) Value: 8
  misc_feature: MA Experiment 108523 PARAMETER Experiment Name: Zm_42deg_Heat_P Parameter: Organism Value: Zea mays
  misc_feature: MA Experiment 108523 PARAMETER Experiment Name: Zm_42deg_Heat_P Parameter: Plant Line Value: 35A19
  misc_feature: MA Experiment 108523 PARAMETER Experiment Name: Zm_42deg_Heat_P Parameter: Temperature (deg C) Value: 42 vs. 22
  misc_feature: MA Experiment 108523 PARAMETER Experiment Name: Zm_42deg_Heat_P Parameter: Timepoint (hr) Value: 6
  misc_feature: MA Experiment 108523 PARAMETER Experiment Name: Zm_42deg_Heat_P Parameter: Tissue Value: Aerial
  misc_feature: MA Experiment ID: 108535 Result: Up-regulated in Transcription
  misc_feature: MA Experiment 108535 PARAMETER Experiment Name: Zm_Meristem_P Parameter: Age (day) Value: 8
  misc_feature: MA Experiment 108535 PARAMETER Experiment Name: Zm_Meristem_P Parameter: Organism Value: Zea mays
  misc_feature: MA Experiment 108535 PARAMETER Experiment Name: Zm_Meristem_P Parameter: Plant Line Value: 35A19
  misc_feature: MA Experiment 108535 PARAMETER Experiment Name: Zm_Meristem_P Parameter: Tissue Value: Root Meristem vs. Above Root Meristem
  misc_feature: MA Experiment ID: 108543 Result: Up-regulated in Transcription
  misc_feature: MA Experiment ID: 20000478 Result: Down-regulated in Transcription
  misc_feature: MA Experiment 20000478 PARAMETER Experiment Name: Zm_5mM_SA_P Parameter: Age (day) Value: 11
  misc_feature: MA Experiment 20000478 PARAMETER Experiment Name: Zm_5mM_SA_P Parameter: Organism Value: Zea mays
  misc_feature: MA Experiment 20000478 PARAMETER Experiment Name: Zm_5mM_SA_P Parameter: Plant Line Value: 35A19
  misc_feature: MA Experiment 20000478 PARAMETER Experiment Name: Zm_5mM_SA_P Parameter: Timepoint (hr) Value: 72
  misc_feature: MA Experiment 20000478 PARAMETER Experiment Name: Zm_5mM_SA_P Parameter: Tissue Value: Aerial
  misc_feature: MA Experiment 20000478 PARAMETER Experiment Name: Zm_5mM_SA_P Parameter: Treatment Value: 5mM SA vs. No Treatment
  misc_feature: MA Experiment ID: 20000626 Result: Down-regulated in Transcription
  misc_feature: MA Experiment 20000626 PARAMETER Experiment Name: Zm_Herbicide-Treatments_P Parameter: Timepoint (hr) Value: 12
  misc_feature: MA Experiment 20000626 PARAMETER Experiment Name: Zm_Herbicide-Treatments_P Parameter: Tissue Value: Aerial
  misc_feature: MA Experiment 20000626 PARAMETER Experiment Name: Zm_Herbicide-Treatments_P Parameter: Treatment Value: Roundup vs. No Treatment
ctcaggttcgtgcgcttcacccaccctcccgtgcttccgctgcatttctttctcgtgatcttggggggttctaggacagggacggccggacgggccttgatgtttttgttgtgccgccgcaggtggaagaagcgtgacaatggaggctccacccgtggcgctgttcgacaccctcaaggcagccaaaccgttcttcttgttggctggtcccaacgtgattgaatcggaggagcacgtcctgaagatggccaaacacatcaaagcaattacgaccaagcttggaattccactcgtgttcaagtccagctttgataaagcaaaccgtacatcatcaaaatcgttccgtggtcctggtcttgaagaaggtctaaagatccttcaaaaggtgaaagcaacatatgaccttccgatagtcactgatgtgcacgaaagccaccagtgtgaagctgttggaagagttgctgacatcatacagattccag

SEQ ID NO: 2467 - protein, 73 aa, Zea mays subsp. mays
  peptide (1)..(73): Ceres Seq. ID no. 1348035
LRFVRFTHPPVLPLHFFLVILGGSRTGTAGRALMFLLCRRRWKKRDNGGSTRGAVRHPQGSQTVLLVGWSQRD

SEQ ID NO: 2468 - protein, 114 aa, Zea mays subsp. mays
  peptide (1)..(114): Ceres Seq. ID no. 1348036
  misc_feature (16)..(113): Homolog of NCBI NO: 24375317 NR Description: 2-dehydro-3-deoxyphosphooctonate aldolase
  misc_feature (4)..(78): Homolog of NCBI NO: 9971145 NR Description: Kdo-8-phosphate synthase [Pisum sativum]
  misc_feature (1)..(113): Homolog of NCBI NO: 25291179 NR Description: hypothetical protein F3O9.14 [imported] -
  misc_feature (1)..(113): Homolog of NCBI NO: 13509333 NR Description: 3-desoxy-D-manno octulosonic acid-8-phosphate
  misc_feature (8)..(113): Homolog of NCBI NO: 15219214 NR Description: putative
  misc_feature (4)..(113): Homolog of NCBI NO: 6647535 NR Description: 2-dehydro-3-deoxyphosphooctonate aldolase aldolase) (3-deoxy-D-manno-octulosonic acid 8-phosphate
  misc_feature (8)..(113): Homolog of NCBI NO: 21360537 NR Description: AT5g09730/F17I14_80 [Arabidopsis thaliana]
  misc_feature (8)..(113): Homolog of NCBI NO: 15219400 NR Description: 2-dehydro-3-deoxyphosphooctonate aldolase,
  misc_feature (8)..(113): Homolog of NCBI NO: 13620976 NR Description: 2-dehydro-3-deoxyphosphooctonate aldolase
  misc_feature (1)..(113): Homolog of NCBI NO: 29367487 NR Description: putative 2-dehydro-3-deoxyphosphooctonate
MEAPPVALFDTLKAAKPFFLLAGPNVIESEEHVLKMAKHIKAITTKLGIPLVFKSSFDKANRTSSKSFRGPGLEEGLKILQKVKATYDLPIVTDVHESHQCEAVGRVADIIQIP

SEQ ID NO: 2469 - protein, 79 aa, Zea mays subsp. mays
  peptide (1)..(79): Ceres Seq. ID no. 1348037
  misc_feature (1)..(78): Homolog of NCBI NO: 24375317 NR Description: 2-dehydro-3-deoxyphosphooctonate aldolase
  misc_feature (1)..(43): Homolog of NCBI NO: 9971145 NR Description: Kdo-8-phosphate synthase [Pisum sativum]
  misc_feature (1)..(78): Homolog of NCBI NO: 25291179 NR Description: hypothetical protein F3O9.14 [imported] -
  misc_feature (1)..(78): Homolog of NCBI NO: 13509333 NR Description: 3-desoxy-D-manno octulosonic acid-8-phosphate
  misc_feature (1)..(78): Homolog of NCBI NO: 15219214 NR Description: putative
  misc_feature (1)..(78): Homolog of NCBI NO: 6647535 NR Description: 2-dehydro-3-deoxyphosphooctonate aldolase aldolase) (3-deoxy-D-manno-octulosonic acid 8-phosphate
  misc_feature (1)..(78): Homolog of NCBI NO: 15219400 NR Description: 2-dehydro-3-deoxyphosphooctonate aldolase,
  misc_feature (1)..(78): Homolog of NCBI NO: 21360537 NR Description: AT5g09730/F17I14_80 [Arabidopsis thaliana]
  misc_feature (1)..(78): Homolog of NCBI NO: 13620976 NR Description: 2-dehydro-3-deoxyphosphooctonate aldolase
  misc_feature (1)..(78): Homolog of NCBI NO: 29367487 NR Description: putative 2-dehydro-3-deoxyphosphooctonate
MAKHIKAITTKLGIPLVFKSSFDKANRTSSKSFRGPGLEEGLKILQKVKATYDLPIVTDVHESHQCEAVGRVADIIQIP

SEQ ID NO: 2470 - DNA, 1877 bp, Zea mays subsp. mays
  misc_feature (1)..(1877): Ceres Seq. ID no. 12408017
  misc_feature: MA Experiment ID: 108504 Result: Down-regulated in Transcription
  misc_feature: MA Experiment 108504 PARAMETER Experiment Name: Zm_Drought_P Parameter: Age (day) Value: 8
  misc_feature: MA Experiment 108504 PARAMETER Experiment Name: Zm_Drought_P Parameter: Organism Value: Zea mays
  misc_feature: MA Experiment 108504 PARAMETER Experiment Name: Zm_Drought_P Parameter: Plant Line Value: 35A19
  misc_feature: MA Experiment 108504 PARAMETER Experiment Name: Zm_Drought_P Parameter: Timepoint (hr) Value: 12
  misc_feature: MA Experiment 108504 PARAMETER Experiment Name: Zm_Drought_P Parameter: Tissue Value: Aerial
  misc_feature: MA Experiment 108504 PARAMETER Experiment Name: Zm_Drought_P Parameter: Treatment Value: Drought vs. No Drought
  misc_feature: MA Experiment ID: 108523 Result: Down-regulated in Transcription
  misc_feature: MA Experiment 108523 PARAMETER Experiment Name: Zm_42deg_Heat_P Parameter: Age (day) Value: 8
  misc_feature: MA Experiment 108523 PARAMETER Experiment Name: Zm_42deg_Heat_P Parameter: Organism Value: Zea mays
  misc_feature: MA Experiment 108523 PARAMETER Experiment Name: Zm_42deg_Heat_P Parameter: Plant Line Value: 35A19
  misc_feature: MA Experiment 108523 PARAMETER Experiment Name: Zm_42deg_Heat_P Parameter: Temperature (deg C) Value: 42 vs. 22
  misc_feature: MA Experiment 108523 PARAMETER Experiment Name: Zm_42deg_Heat_P Parameter: Timepoint (hr) Value: 6
  misc_feature: MA Experiment 108523 PARAMETER Experiment Name: Zm_42deg_Heat_P Parameter: Tissue Value: Aerial
  misc_feature: MA Experiment ID: 108528 Result: Up-regulated in Transcription
  misc_feature: MA Experiment 108528 PARAMETER Experiment Name: Zm_Imbibed_Seeds_P Parameter: Age (day) Value: 5 vs. 2
  misc_feature: MA Experiment 108528 PARAMETER Experiment Name: Zm_Imbibed_Seeds_P Parameter: Organism Value: Zea mays
  misc_feature: MA Experiment 108528 PARAMETER Experiment Name: Zm_Imbibed_Seeds_P Parameter: Plant Line Value: 35A19
  misc_feature: MA Experiment 108528 PARAMETER Experiment Name: Zm_Imbibed_Seeds_P Parameter: Tissue Value: Aerial vs. Embryo
  misc_feature: MA Experiment ID: 108529 Result: Down-regulated in Transcription
  misc_feature: MA Experiment 108529 PARAMETER Experiment Name: Zm_Imbibed_Seeds_P Parameter: Age (day) Value: 5 vs. 2
  misc_feature: MA Experiment 108529 PARAMETER Experiment Name: Zm_Imbibed_Seeds_P Parameter: Organism Value: Zea mays
  misc_feature: MA Experiment 108529 PARAMETER Experiment Name: Zm_Imbibed_Seeds_P Parameter: Plant Line Value: 35A19
  misc_feature: MA Experiment 108529 PARAMETER Experiment Name: Zm_Imbibed_Seeds_P Parameter: Tissue Value: Roots vs. Embryo
  misc_feature: MA Experiment ID: 108530 Result: Up-regulated in Transcription
  misc_feature: MA Experiment 108530 PARAMETER Experiment Name: Zm_Imbibed_Seeds_P Parameter: Age (day) Value: 6 vs. 2
  misc_feature: MA Experiment 108530 PARAMETER Experiment Name: Zm_Imbibed_Seeds_P Parameter: Organism Value: Zea mays
  misc_feature: MA Experiment 108530 PARAMETER Experiment Name: Zm_Imbibed_Seeds_P Parameter: Plant Line Value: 35A19
  misc_feature: MA Experiment 108530 PARAMETER Experiment Name: Zm_Imbibed_Seeds_P Parameter: Tissue Value: Aerial vs. Embryo
  misc_feature: MA Experiment ID: 108536 Result: Down-regulated in Transcription
  misc_feature: MA Experiment 108536 PARAMETER Experiment Name: Zm_Meristem_P Parameter: Age (day) Value: 8
  misc_feature: MA Experiment 108536 PARAMETER Experiment Name: Zm_Meristem_P Parameter: Organism Value: Zea mays
  misc_feature: MA Experiment 108536 PARAMETER Experiment Name: Zm_Meristem_P Parameter: Plant Line Value: 35A19
  misc_feature: MA Experiment 108536 PARAMETER Experiment Name: Zm_Meristem_P Parameter: Tissue Value: Shoot Meristem vs. Above Shoot Meristem
  misc_feature: MA Experiment ID: 108543 Result: Up-regulated in Transcription
  misc_feature: MA Experiment ID: 108544 Result: Down-regulated in Transcription
  misc_feature: MA Experiment ID: 108545 Result: Up-regulated in Transcription
  misc_feature: MA Experiment 108545 PARAMETER Experiment Name: Zm_Imbibed_Seeds_P Parameter: Age (day) Value: 3 vs. 2
  misc_feature: MA Experiment 108545 PARAMETER Experiment Name: Zm_Imbibed_Seeds_P Parameter: Organism Value: Zea mays
  misc_feature: MA Experiment 108545 PARAMETER Experiment Name: Zm_Imbibed_Seeds_P Parameter: Plant Line Value: 35A19
  misc_feature: MA Experiment 108545 PARAMETER Experiment Name: Zm_Imbibed_Seeds_P Parameter: Tissue Value: Aerial vs. Embryo
  misc_feature: MA Experiment ID: 108546 Result: Down-regulated in Transcription
  misc_feature: MA Experiment 108546 PARAMETER Experiment Name: Zm_Imbibed_Seeds_P Parameter: Age (day) Value: 3 vs. 2
  misc_feature: MA Experiment 108546 PARAMETER Experiment Name: Zm_Imbibed_Seeds_P Parameter: Organism Value: Zea mays
  misc_feature: MA Experiment 108546 PARAMETER Experiment Name: Zm_Imbibed_Seeds_P Parameter: Plant Line Value: 35A19
  misc_feature: MA Experiment 108546 PARAMETER Experiment Name: Zm_Imbibed_Seeds_P Parameter: Tissue Value: Roots vs. Embryo
  misc_feature: MA Experiment ID: 108547 Result: Up-regulated in Transcription
  misc_feature: MA Experiment 108547 PARAMETER Experiment Name: Zm_Imbibed_Seeds_P Parameter: Age (day) Value: 4 vs. 2
  misc_feature: MA Experiment 108547 PARAMETER Experiment Name: Zm_Imbibed_Seeds_P Parameter: Organism Value: Zea mays
  misc_feature: MA Experiment 108547 PARAMETER Experiment Name: Zm_Imbibed_Seeds_P Parameter: Plant Line Value: 35A19
  misc_feature: MA Experiment 108547 PARAMETER Experiment Name: Zm_Imbibed_Seeds_P Parameter: Tissue Value: Aerial vs. Embryo
  misc_feature: MA Experiment ID: 108556 Result: Down-regulated in Transcription
  misc_feature: MA Experiment 108556 PARAMETER Experiment Name: Zm_Drought_P Parameter: Age (day) Value: 9
  misc_feature: MA Experiment 108556 PARAMETER Experiment Name: Zm_Drought_P Parameter: Organism Value: Zea mays
  misc_feature: MA Experiment 108556 PARAMETER Experiment Name: Zm_Drought_P Parameter: Plant Line Value: 35A19
  misc_feature: MA Experiment 108556 PARAMETER Experiment Name: Zm_Drought_P Parameter: Timepoint (hr) Value: 24
  misc_feature: MA Experiment 108556 PARAMETER Experiment Name: Zm_Drought_P Parameter: Tissue Value: Aerial
  misc_feature: MA Experiment 108556 PARAMETER Experiment Name: Zm_Drought_P Parameter: Treatment Value: Drought vs. No Drought
  misc_feature: MA Experiment ID: 108597 Result: Down-regulated in Transcription
  misc_feature: MA Experiment 108597 PARAMETER Experiment Name: Zm_100uM_ABA_P Parameter: Age (day) Value: 9
  misc_feature: MA Experiment 108597 PARAMETER Experiment Name: Zm_100uM_ABA_P Parameter: Organism Value: Zea mays
  misc_feature: MA Experiment 108597 PARAMETER Experiment Name: Zm_100uM_ABA_P Parameter: Plant Line Value: 35A19
  misc_feature: MA Experiment 108597 PARAMETER Experiment Name: Zm_100uM_ABA_P Parameter: Timepoint (hr) Value: 24
  misc_feature: MA Experiment 108597 PARAMETER Experiment Name: Zm_100uM_ABA_P Parameter: Tissue Value: Aerial
  misc_feature: MA Experiment 108597 PARAMETER Experiment Name: Zm_100uM_ABA_P Parameter: Treatment Value: 100uM ABA vs. No Treatment
  misc_feature: MA Experiment ID: 20000477 Result: Down-regulated in Transcription
  misc_feature: MA Experiment 20000477 PARAMETER Experiment Name: Zm_5mM_SA_P Parameter: Age (day) Value: 10
  misc_feature: MA Experiment 20000477 PARAMETER Experiment Name: Zm_5mM_SA_P Parameter: Organism Value: Zea mays
  misc_feature: MA Experiment 20000477 PARAMETER Experiment Name: Zm_5mM_SA_P Parameter: Plant Line Value: 35A19
  misc_feature: MA Experiment 20000477 PARAMETER Experiment Name: Zm_5mM_SA_P Parameter: Timepoint (hr) Value: 48
  misc_feature: MA Experiment 20000477 PARAMETER Experiment Name: Zm_5mM_SA_P Parameter: Tissue Value: Aerial
  misc_feature: MA Experiment 20000477 PARAMETER Experiment Name: Zm_5mM_SA_P Parameter: Treatment Value: 5mM SA vs. No Treatment
  misc_feature: MA Experiment ID: 20000478 Result: Down-regulated in Transcription
  misc_feature: MA Experiment 20000478 PARAMETER Experiment Name: Zm_5mM_SA_P Parameter: Age (day) Value: 11
  misc_feature: MA Experiment 20000478 PARAMETER Experiment Name: Zm_5mM_SA_P Parameter: Organism Value: Zea mays
  misc_feature: MA Experiment 20000478 PARAMETER Experiment Name: Zm_5mM_SA_P Parameter: Plant Line Value: 35A19
  misc_feature: MA Experiment 20000478 PARAMETER Experiment Name: Zm_5mM_SA_P Parameter: Timepoint (hr) Value: 72
  misc_feature: MA Experiment 20000478 PARAMETER Experiment Name: Zm_5mM_SA_P Parameter: Tissue Value: Aerial
  misc_feature: MA Experiment 20000478 PARAMETER Experiment Name: Zm_5mM_SA_P Parameter: Treatment Value: 5mM SA vs. No Treatment
  misc_feature: MA Experiment ID: 20000479 Result: Down-regulated in Transcription
  misc_feature: MA Experiment 20000479 PARAMETER Experiment Name: Zm_Drought_P Parameter: Age (day) Value: 10
  misc_feature: MA Experiment 20000479 PARAMETER Experiment Name: Zm_Drought_P Parameter: Organism Value: Zea mays
  misc_feature: MA Experiment 20000479 PARAMETER Experiment Name: Zm_Drought_P Parameter: Plant Line Value: 35A19
  misc_feature: MA Experiment 20000479 PARAMETER Experiment Name: Zm_Drought_P Parameter: Timepoint (hr) Value: 48
  misc_feature: MA Experiment 20000479 PARAMETER Experiment Name: Zm_Drought_P Parameter: Tissue Value: Aerial
  misc_feature: MA Experiment 20000479 PARAMETER Experiment Name: Zm_Drought_P Parameter: Treatment Value: Drought vs. No Drought
  misc_feature: MA Experiment ID: 20000480 Result: Down-regulated in Transcription
  misc_feature: MA Experiment 20000480 PARAMETER Experiment Name: Zm_Drought_P Parameter: Age (day) Value: 11
  misc_feature: MA Experiment 20000480 PARAMETER Experiment Name: Zm_Drought_P Parameter: Organism Value: Zea mays
  misc_feature: MA Experiment 20000480 PARAMETER Experiment Name: Zm_Drought_P Parameter: Plant Line Value: 35A19
  misc_feature: MA Experiment 20000480 PARAMETER Experiment Name: Zm_Drought_P Parameter: Timepoint (hr) Value: 72
  misc_feature: MA Experiment 20000480 PARAMETER Experiment Name: Zm_Drought_P Parameter: Tissue Value: Aerial
  misc_feature: MA Experiment 20000480 PARAMETER Experiment Name: Zm_Drought_P Parameter: Treatment Value: Drought vs. No Drought
  misc_feature: MA Experiment ID: 20000626 Result: Down-regulated in Transcription
  misc_feature: MA Experiment 20000626 PARAMETER Experiment Name: Zm_Herbicide-Treatments_P Parameter: Timepoint (hr) Value: 12
  misc_feature: MA Experiment 20000626 PARAMETER Experiment Name: Zm_Herbicide-Treatments_P Parameter: Tissue Value: Aerial
  misc_feature: MA Experiment 20000626 PARAMETER Experiment Name: Zm_Herbicide-Treatments_P Parameter: Treatment Value: Roundup vs. No Treatment
  misc_feature: MA Experiment ID: 20000630 Result: Down-regulated in Transcription
  misc_feature: MA Experiment 20000630 PARAMETER Experiment Name: Zm_Herbicide-Treatments_P Parameter: Timepoint (hr) Value: 4
  misc_feature: MA Experiment 20000630 PARAMETER Experiment Name: Zm_Herbicide-Treatments_P Parameter: Tissue Value: Aerial
  misc_feature: MA Experiment 20000630 PARAMETER Experiment Name: Zm_Herbicide-Treatments_P Parameter: Treatment Value: Roundup vs. No Treatment
accctcccccaccgccattgctcagcagcagtagtaaagccacgcctgacagacagctggttcatttctggttgctgccttgctggtggtagccctcggcgcaggcagccaagaacagagagagcgagatggatgtgaacgacgtgctgctagtggtgctggcggcggcgctggctgccatgtggtggcgtcggtgctccaagaccggcggtgtcgacggccctcccgccggggcctccgggttggccggtggtggggaacctgttccaggtgatcctgcagcgacggcccttcatgtacgtggtgcgcgacctccgggagaagtacgggcccatcttcaccatgcggatggggcagcgcaccctcatcgtggtcacctcggcggagctcatccacgaggcgctggtgaagcagggccccatgttcgcgagccggcccgaggacagccccacccgcctcctcttcagcgtcggcaagtgcaccgtcaactcggcgccctacggccccctgtggcgtgctctgcgccgcaacttcgtcgccgagatcgtgtccccgcaccgcgtcaagggcttctcctggatccgggagtgggccgtggacgcgcacttgcgccgcctctgcgccgagctcgcggcggacggtgccgtgcgggtcatggccagctgccgcctcaccatctgcagcatcctcatctgcatctgcttcggcgccaagatccccgacgagctcatccgggagatcgaggaggtgctcaaggacgtgatgatgatgaccatgcccaagctcccggacttcctgcccctcctcacaccgctcttcaggaagcagctcaccgaggcccgcgccctgcgccgccgccagctcaactgcctcgtgccgctcgtccgcgcgcggagggacttcctccgcgacggcaccgcggcagcggcggacggcgtggagatgatgagcgggcctggggaagcgtacgtggactcgctcttcgacctggagccgcccggccgcgggaagcgcctcggcgaggaggagctcgtcacgctctgctccgaggtcatgagcgccggcacagacaccagcgccacagcgctggaatgggccatgatgcacctcgtcctcgaccccgccgcgcagtagcgcctctacgacgaggtcgtcgccaaggtgggcaagaccgcccggatcaccgaagccgacgtcgaggccatgccctacctccaggcggtggtgaaggagacgttccggcggcacccgccgagccacttcgtgctgtcgcacgcggcgacgcgggacacggagctgggcgggtaccgcgtgccggcggacgccagcgtggagttctacacggcgtgggtgacggagaacccggcgacgtggccggacccggacgcgtggcggccggagcgcttcctggaaggcggcgagggcttcgacaccgacatcaccggcacccgcgcgctgcgcatgatgcccttcggcgccggccgccgcatctgccccgccgccacgctcggcgtgctccacatccagctcatgctcgccaacatggtgcgcgagttccgctggctgccgcccgccggtgagggcccgccggaccccaccgagaccttcgcattcaccgtcgtcatgaagaacccgctccgggcagccttcgtcgagcgggccacgacggagacggcgacaaccgcgtgacgagtgacgacggaaagtaaaaaaaaagggagagagagagaagttactagtacaagttactctttcactgggctctggctgggtgggtaagttgctgcaacgtgcgtgtcgtgcggggttaattcggtcccgcactctgcggtataaattacagttattaattaattagtccacggggaaggtgcgtg

SEQ ID NO: 2471 - protein, 483 aa, Zea mays subsp. mays
  peptide (1)..(483): Ceres Seq. ID no. 12408018
MDVNDVLLVVLAAALAAMWWRRCSKTGGVDGPPAGASGLAGGGEPVPGDPAATALHVRGARPPGEVRAHLHHADGAAHPHRGHLGGAHPRGAGEAGPHVREPARGQPHPPPLQRRQVHRQLGALRPPVACSAPQLRRRDRVPAPRQGLLLDPGVGRGRALAPPLRRARGGRCRAGHGQLPPHHLQHPHLHLLRRQDPRRAHPGDRGGAQGRDDDDHAQAPGLPAPPHTALQEAAHRGPRPAPPPAQLPRAARPRAEGLPPRRHRGSGGRRGDDERAWGSVRGLALRPGAARPREAPRRGGARHALLRGHERRHRHQRHSAGMGHDAPRPRPRRAVAPLRRGRRQGGQDRPDHRSRRRGHALPPGGGEGDVPAAPAEPLRAVARGDAGHGAGRVPRAGGRQRGVLHGVGDGEPGDVAGPGRVAAGALPGRRRGLRHRHHRHPRAAHDALRRRPPHLPRRHARRAPHPAHARQHGARVPLAAARR

SEQ ID NO: 2472 - protein, 466 aa, Zea mays subsp. mays
  peptide (1)..(466): Ceres Seq. ID no. 12408019
MWWRRCSKTGGVDGPPAGASGLAGGGEPVPGDPAATALHVRGARPPGEVRAHLHHADGAAHPHRGHLGGAHPRGAGEAGPHVREPARGQPHPPPLQRRQVHRQLGALRPPVACSAPQLRRRDRVPAPRQGLLLDPGVGRGRALAPPLRRARGGRCRAGHGQLPPHHLQHPHLHLLRRQDPRRAHPGDRGGAQGRDDDDHAQAPGLPAPPHTALQEAAHRGPRPAPPPAQLPRAARPRAEGLPPRRHRGSGGRRGDDERAWGSVRGLALRPGAARPREAPRRGGARHALLRGHERRHRHQRHSAGMGHDAPRPRPRRAVAPLRRGRRQGGQDRPDHRSRRRGHALPPGGGEGDVPAAPAEPLRAVARGDAGHGAGRVPRAGGRQRGVLHGVGDGEPGDVAGPGRVAAGALPGRRRGLRHRHHRHPRAAHDALRRRPPHLPRRHARRAPHPAHARQHGARVPLAAARR

SEQ ID NO: 2473 - protein, 279 aa, Zea mays subsp. mays
  peptide (1)..(279): Ceres Seq. ID no. 12408020
  misc_feature (1)..(279): Pfam Name: Cytochrome P450 Pfam Description: Cytochrome P450
  misc_feature (1)..(279): Homolog of NCBI NO: 15221065 NR Description: cytochrome p450, putative
MYVVRDLREKYGPIFTMRMGQRTLIVVTSAELIHEALVKQGPMFASRPEDSPTRLLFSVGKCTVNSAPYGPLWRALRRNFVAEIVSPHRVKGFSWIREWAVDAHLRRLCAELAADGAVRVMASCRLTICSILICICFGAKIPDELIREIEEVLKDVMMMTMPKLPDFLPLLTPLFRKQLTEARALRRRQLNCLVPLVRARRDFLRDGTAAAADGVEMMSGPGEAYVDSLFDLEPPGRGKRLGEEELVTLCSEVMSAGTDTSATALEWAMMHLVLDPAAQ

SEQ ID NO: 2474 - DNA, 1591 bp, Zea mays subsp. mays
  misc_feature (1)..(1591): Ceres Seq. ID no. 12357866
  misc_feature: MA Experiment ID: 108543 Result: Up-regulated in Transcription
  misc_feature: MA Experiment ID: 20000478 Result: Down-regulated in Transcription
  misc_feature: MA Experiment 20000478 PARAMETER Experiment Name: Zm_5mM_SA_P Parameter: Age (day) Value: 11
  misc_feature: MA Experiment 20000478 PARAMETER Experiment Name: Zm_5mM_SA_P Parameter: Organism Value: Zea mays
  misc_feature: MA Experiment 20000478 PARAMETER Experiment Name: Zm_5mM_SA_P Parameter: Plant Line Value: 35A19
  misc_feature: MA Experiment 20000478 PARAMETER Experiment Name: Zm_5mM_SA_P Parameter: Timepoint (hr) Value: 72
  misc_feature: MA Experiment 20000478 PARAMETER Experiment Name: Zm_5mM_SA_P Parameter: Tissue Value: Aerial
  misc_feature: MA Experiment 20000478 PARAMETER Experiment Name: Zm_5mM_SA_P Parameter: Treatment Value: 5mM SA vs. No Treatment
  misc_feature: MA Experiment ID: 20000480 Result: Down-regulated in Transcription
  misc_feature: MA Experiment 20000480 PARAMETER Experiment Name: Zm_Drought_P Parameter: Age (day) Value: 11
  misc_feature: MA Experiment 20000480 PARAMETER Experiment Name: Zm_Drought_P Parameter: Organism Value: Zea mays
  misc_feature: MA Experiment 20000480 PARAMETER Experiment Name: Zm_Drought_P Parameter: Plant Line Value: 35A19
  misc_feature: MA Experiment 20000480 PARAMETER Experiment Name: Zm_Drought_P Parameter: Timepoint (hr) Value: 72
  misc_feature: MA Experiment 20000480 PARAMETER Experiment Name: Zm_Drought_P Parameter: Tissue Value: Aerial
  misc_feature: MA Experiment 20000480 PARAMETER Experiment Name: Zm_Drought_P Parameter: Treatment Value: Drought vs. No Drought
  misc_feature: MA Experiment ID: 20000535 Result: Down-regulated in Transcription
  misc_feature: MA Experiment 20000535 PARAMETER Experiment Name: Zm_Hybrid_Seed_Dev_P Parameter: DAP Value: 30 vs. 12
  misc_feature: MA Experiment 20000535 PARAMETER Experiment Name: Zm_Hybrid_Seed_Dev_P Parameter: Organism Value: Zea mays
  misc_feature: MA Experiment 20000535 PARAMETER Experiment Name: Zm_Hybrid_Seed_Dev_P Parameter: Plant Line Value: 35A19
  misc_feature: MA Experiment 20000535 PARAMETER Experiment Name: Zm_Hybrid_Seed_Dev_P Parameter: Tissue Value: Embryo vs. Unfert Floret
aggcagagctctcacgcggacggcggacctggccacctggggggcgcggacggagccttcgcttttcccccctcccctccctttcgaacgactaccgaggaggcatccgaggtggccagccacgatgatggccgcggcggcgctgaggccgcacaagtcttcgccggcgcgcgtgcccacgcggtgcgtggccgcgctctgcgccgcctgcttcctcgtcggcgtcggcgtcgtcaacaggtactggcctgttcctgagcctcatcccggttgcccagacaaggctggccctgaccactcgagggccgtgttgaaccaagcgtcacagactcgcgaagtcgtcatggcgttggacaagacgatatccgacatcgagatgcgcctggctgcggctagagccgcccaggcgatgagccagggcatgtcaccgggcgactcggactcggagggcgaccagggaaccgcgcggcgtaggatgtcttttgtcatgggcgttttcaccactcttgctaaccggaagcggagagattcaataaggcagacgtggatgccacagggtgatcagttgcgaagattggaagacaagggcgttgttatccgttttgttgttggacgcagtgcaaatccaaacctggaaaatgaggtcgaccatgcaattgatatggaggatgaagaatacagtgatatcttgagaattaatcatgtggaaggctatggagggctccctatgaaggttcagatgttcctttcgactgctcttacaatgtgggacgctgatttctatgtaaaagccgacgataatgtccatgtcaacattggtatcaccagatcgattttggcgcgacacaggatgaaacctcgggtgtacattggctgcatgaaatctggacctgttgttgctaagaatgactccaagtattatgagccagaccattggaagtttgggactgagggtaacaactactttaggcatgcaacacgtcagttgtatgctgtaaccagggatttagcaacttacatatcagcaaaccggcatatcctgcacaagtattcaaatgaagatgtatcatttggctcttggttgatcgggttggaagttgagcatgttgatgagagaagcctttgctgtggtactcccccagactgcgaatggaaagggcaggccgggaacccatgtgcggcgtccttcgactggaactgcactggcatctgcaatccggtggagaggatgacagaggtacaccgacgatgttgggaaggccttggagccgaagggcacgcacagtctttgacttttgacagccaatagttggcgcttggcggatcattgtcgcaccattttcttcctcttctttagggccctgtaattaatatgcggagatgaacttgtatgcaatggctcggtttttcagatgtgcagcaatggcatcgtttcctggccagttcgcgtgcggaaactggggtagagaattaggagttcaatctgcaagtgagtctctaataactggagatgcctcactggacgtccgatgaaactggggtagactgtttgattctctgatgaaagaattagctgtctgtctgagttctc

SEQ ID NO: 2475 - protein, 435 aa, Zea mays subsp. mays
  peptide (1)..(435): Ceres Seq. ID no. 12357867
  misc_feature (173)..(372): Pfam Name: Galactosyltransferase Pfam Description: Galactosyltransferase
  misc_feature (51)..(423): Homolog of NCBI NO: 12323294 NR Description: putative (Avr9) elicitor response protein;
  misc_feature (100)..(420): Homolog of NCBI NO: 18416895 NR Description: Avr9 elicitor response like protein
  misc_feature (91)..(420): Homolog of NCBI NO: 7485336 NR Description: hypothetical protein F10M23.280 - Arabidopsis
  misc_feature (51)..(423): Homolog of NCBI NO: 30699558 NR Description: Avr9 elicitor response protein -related
  misc_feature (101)..(419): Homolog of NCBI NO: 15225684 NR Description: unknown protein; protein id: At2g32430.1
  misc_feature (100)..(420): Homolog of NCBI NO: 15217544 NR Description: elicitor response protein, putative; protein id:
  misc_feature (94)..(420): Homolog of NCBI NO: 4138265 NR Description: Avr9 elicitor response protein [Nicotiana tabacum]
  misc_feature (90)..(420): Homolog of NCBI NO: 15220440 NR Description: putative AVR9 elicitor response protein
  misc_feature (49)..(423): Homolog of NCBI NO: 34907342 NR Description: putative elicitor response protein
  misc_feature (49)..(427): Homolog of NCBI NO: 15223337 NR Description: Avr9 elicitor response protein, putative; protein
GRALTRTADLATWGARTEPSLFPPPLPFERLPRRHPRWPATMMAAAALRPHKSSPARVPTRCVAALCAACFLVGVGVVNRYWPVPEPHPGCPDKAGPDHSRAVLNQASQTREVVMALDKTISDIEMRLAAARAAQAMSQGMSPGDSDSEGDQGTARRRMSFVMGVFTTLANRKRRDSIRQTWMPQGDQLRRLEDKGVVIRFVVGRSANPNLENEVDHAIDMEDEEYSDILRINHVEGYGGLPMKVQMFLSTALTMWDADFYVKADDNVHVNIGITRSILARHRMKPRVYIGCMKSGPVVAKNDSKYYEPDHWKFGTEGNNYFRHATRQLYAVTRDLATYISANRHILHKYSNEDVSFGSWLIGLEVEHVDERSLCCGTPPDCEWKGQAGNPCAASFDWNCTGICNPVERMTEVHRRCWEGLGAEGHAQSLTFDSQ

SEQ ID NO: 2476 - protein, 394 aa, Zea mays subsp. mays
  peptide (1)..(394): Ceres Seq. ID no. 12357868
  misc_feature (132)..(331): Pfam Name: Galactosyltransferase Pfam Description: Galactosyltransferase
  misc_feature (10)..(382): Homolog of NCBI NO: 12323294 NR Description: putative (Avr9) elicitor response protein;
  misc_feature (59)..(379): Homolog of NCBI NO: 18416895 NR Description: Avr9 elicitor response like protein
  misc_feature (50)..(379): Homolog of NCBI NO: 7485336 NR Description: hypothetical protein F10M23.280 - Arabidopsis
  misc_feature (10)..(382): Homolog of NCBI NO: 30699558 NR Description: Avr9 elicitor response protein -related
  misc_feature (60)..(378): Homolog of NCBI NO: 15225684 NR Description: unknown protein; protein id: At2g32430.1
  misc_feature (59)..(379): Homolog of NCBI NO: 15217544 NR Description: elicitor response protein, putative; protein id:
  misc_feature (53)..(379): Homolog of NCBI NO: 4138265 NR Description: Avr9 elicitor response protein [Nicotiana tabacum]
  misc_feature (49)..(379): Homolog of NCBI NO: 15220440 NR Description: putative AVR9 elicitor response protein
  misc_feature (8)..(382): Homolog of NCBI NO: 34907342 NR Description: putative elicitor response protein
  misc_feature (8)..(386): Homolog of NCBI NO: 15223337 NR Description: Avr9 elicitor response protein, putative; protein
MMAAAALRPHKSSPARVPTRCVAALCAACFLVGVGVVNRYWPVPEPHPGCPDKAGPDHSRAVLNQASQTREVVMALDKTISDIEMRLAAARAAQAMSQGMSPGDSDSEGDQGTARRRMSFVMGVFTTLANRKRRDSIRQTWMPQGDQLRRLEDKGVVIRFVVGRSANPNLENEVDHAIDMEDEEYSDILRINHVEGYGGLPMKVQMFLSTALTMWDADFYVKADDNVHVNIGITRSILARHRMKPRVYIGCMKSGPVVAKNDSKYYEPDHWKFGTEGNNYFRHATRQLYAVTRDLATYISANRHILHKYSNEDVSFGSWLIGLEVEHVDERSLCCGTPPDCEWKGQAGNPCAASFDWNCTGICNPVERMTEVHRRCWEGLGAEGHAQSLTFDSQ

SEQ ID NO: 2477 - protein, 393 aa, Zea mays subsp. mays
  peptide (1)..(393): Ceres Seq. ID no. 12357869
  misc_feature (131)..(330): Pfam Name: Galactosyltransferase Pfam Description: Galactosyltransferase
  misc_feature (9)..(381): Homolog of NCBI NO: 12323294 NR Description: putative (Avr9) elicitor response protein;
  misc_feature (58)..(378): Homolog of NCBI NO: 18416895 NR Description: Avr9 elicitor response like protein
  misc_feature (49)..(378): Homolog of NCBI NO: 7485336 NR Description: hypothetical protein F10M23.280 - Arabidopsis
  misc_feature (9)..(381): Homolog of NCBI NO: 30699558 NR Description: Avr9 elicitor response protein -related
  misc_feature (59)..(377): Homolog of NCBI NO: 15225684 NR Description: unknown protein; protein id: At2g32430.1
  misc_feature (58)..(378): Homolog of NCBI NO: 15217544 NR Description: elicitor response protein, putative; protein id:
  misc_feature (52)..(378): Homolog of NCBI NO: 4138265 NR Description: Avr9 elicitor response protein [Nicotiana tabacum]
  misc_feature (48)..(378): Homolog of NCBI NO: 15220440 NR Description: putative AVR9 elicitor response protein
  misc_feature (7)..(381): Homolog of NCBI NO: 34907342 NR Description: putative elicitor response protein
  misc_feature (7)..(385): Homolog of NCBI NO: 15223337 NR Description: Avr9 elicitor response protein, putative; protein
MAAAALRPHKSSPARVPTRCVAALCAACFLVGVGVVNRYWPVPEPHPGCPDKAGPDHSRAVLNQASQTREVVMALDKTISDIEMRLAAARAAQAMSQGMSPGDSDSEGDQGTARRRMSFVMGVFTTLANRKRRDSIRQTWMPQGDQLRRLEDKGVVIRFVVGRSANPNLENEVDHAIDMEDEEYSDILRINHVEGYGGLPMKVQMFLSTALTMWDADFYVKADDNVHVNIGITRSILARHRMKPRVYIGCMKSGPVVAKNDSKYYEPDHWKFGTEGNNYFRHATRQLYAVTRDLATYISANRHILHKYSNEDVSFGSWLIGLEVEHVDERSLCCGTPPDCEWKGQAGNPCAASFDWNCTGICNPVERMTEVHRRCWEGLGAEGHAQSLTFDSQ

SEQ ID NO: 2478 - DNA, 1777 bp, Zea mays subsp. mays
  misc_feature (1)..(1777): Ceres Seq. ID no. 12423983
  misc_feature: MA Experiment ID: 108535 Result: Down-regulated in Transcription
  misc_feature: MA Experiment 108535 PARAMETER Experiment Name: Zm_Meristem_P Parameter: Age (day) Value: 8
  misc_feature: MA Experiment 108535 PARAMETER Experiment Name: Zm_Meristem_P Parameter: Organism Value: Zea mays
  misc_feature: MA Experiment 108535 PARAMETER Experiment Name: Zm_Meristem_P Parameter: Plant Line Value: 35A19
  misc_feature: MA Experiment 108535 PARAMETER Experiment Name: Zm_Meristem_P Parameter: Tissue Value: Root Meristem vs. Above Root Meristem
  misc_feature: MA Experiment ID: 20000108 Result: Down-regulated in Transcription
  misc_feature: MA Experiment 20000108 PARAMETER Experiment Name: Zm_Root-Tips_P Parameter: Age (day) Value: 12
  misc_feature: MA Experiment 20000108 PARAMETER Experiment Name: Zm_Root-Tips_P Parameter: Organism Value: Zea mays
  misc_feature: MA Experiment 20000108 PARAMETER Experiment Name: Zm_Root-Tips_P Parameter: Tissue Value: Root tips vs. Root mid region    35
  misc_feature: MA Experiment 20000108 PARAMETER Experiment Name: Zm_Root-Tips_P Parameter: Tissue Value: Root tips vs. Root mid region   Sequence Listing-Misc Features (4)
  misc_feature: MA Experiment ID: 20000477 Result: Up-regulated in Transcription
  misc_feature: MA Experiment 20000477 PARAMETER Experiment Name: Zm_5mM_SA_P Parameter: Age (day) Value: 10
  misc_feature: MA Experiment 20000477 PARAMETER Experiment Name: Zm_5mM_SA_P Parameter: Organism Value: Zea mays
  misc_feature: MA Experiment 20000477 PARAMETER Experiment Name: Zm_5mM_SA_P Parameter: Plant Line Value: 35A19
  misc_feature: MA Experiment 20000477 PARAMETER Experiment Name: Zm_5mM_SA_P Parameter: Timepoint (hr) Value: 48
  misc_feature: MA Experiment 20000477 PARAMETER Experiment Name: Zm_5mM_SA_P Parameter: Tissue Value: Aerial
  misc_feature: MA Experiment 20000477 PARAMETER Experiment Name: Zm_5mM_SA_P Parameter: Treatment Value: 5mM SA vs. No Treatment
  misc_feature: MA Experiment ID: 20000488 Result: Down-regulated in Transcription
  misc_feature: MA Experiment 20000488 PARAMETER Experiment Name: Zm_50mM_NH4NO3_L_to_H_P Parameter: Organism Value: Zea mays
  misc_feature: MA Experiment 20000488 PARAMETER Experiment Name: Zm_50mM_NH4NO3_L_to_H_P Parameter: Timepoint (hr) Value: 8
  misc_feature: MA Experiment 20000488 PARAMETER Experiment Name: Zm_50mM_NH4NO3_L_to_H_P Parameter: Tissue Value: Leaves
  misc_feature: MA Experiment 20000488 PARAMETER Experiment Name: Zm_50mM_NH4NO3_L_to_H_P Parameter: Treatment Value: 50mM NH4NO3 vs. 100mM Mannitol
  misc_feature: MA Experiment ID: 20000532 Result: Up-regulated in Transcription
  misc_feature: MA Experiment 20000532 PARAMETER Experiment Name: Zm_0.001percent_MeJA_P Parameter: Age (day) Value: 10
  misc_feature: MA Experiment 20000532 PARAMETER Experiment Name: Zm_0.001percent_MeJA_P Parameter: Organism Value: Zea mays
  misc_feature: MA Experiment 20000532 PARAMETER Experiment Name: Zm_0.001percent_MeJA_P Parameter: Plant Line Value: 35A19
  misc_feature: MA Experiment 20000532 PARAMETER Experiment Name: Zm_0.001percent_MeJA_P Parameter: Timepoint (hr) Value: 48
  misc_feature: MA Experiment 20000532 PARAMETER Experiment Name: Zm_0.001percent_MeJA_P Parameter: Tissue Value: Aerial
  misc_feature: MA Experiment 20000532 PARAMETER Experiment Name: Zm_0.001percent_MeJA_P Parameter: Treatment Value: 0.001percent MeJA vs. No Treatment
gcacgagaccattacctagaacatcctaatcgaaaaattgctgttagctccacacaaaagagagaaccggcggcgagctaggagctagccatggacggacacggcgcggtctcgccgtggagcgtgctaggcggggcggcggctgtgctgttcctgtggttggcgtcgcaggtgctggagtgggcctggtgggcgccccggcgcgtgaaccgtgcgctgagggcgcagggcctgaggggcacccggtaccgcctcctctgcggcgacctcatcgaggagcagcgtctccgcgcggcggccctggcaaggcccgtccccgtggatcgaccacacgacttcctccctcgcgtcgcgcctttccttcaccgcgtcctccaagagcacggcaagctctcgtttacatggtttgggccgaccccaagagttctaatcaccgatcccgagcttgcccgggaagtgctgtcgaataagtgtggcgacttcgtgaagtcgctgctctctcccctgtcaacgctgctggttgctgggctcgtcgtccttgacggtgaaaagtgggtcaaacatcgaaggattctgaatccggcattccacgcggagaagctgaagggaatgctgccggcattcttagcatgttgcaacgaactggttgacagatgggagaaacagatctcctgcttccgctgaaccaactgagctggatgtctggccagagttccaaaacttatcgggagatgtgatttcaagagctgcattcggtgttagctatgaagaaggcagaagaattttcctacttcaggcggagcaagctgaacgccttgttcaatctttcaagacaaattacatccctggcttctctctcctgccaacagaaaacaacagaaggatgaatgaaatcgacagggaggtgaagacggtcntgaggggcataatagagaagagacagaaggcagccaagaacggtgaagcaaccaaggacgacctgctgggcttgctactggagtcgaacatgaattacagcgactcggacggcaaatccagcaaggggattacggtggaggaggtgatcggcgagtgcaaggtgttctacttcgcagggatggagaccaccgccgtgctgctcacatggacagtggccgtgctaagcatgcacccggagtggcaggaccgtgccagggaggaggtcctgcaggtctttggtgaaaacaagccggacttcaatggtgtggcacgcctaaaagtggtgaccatggtgctctacgaggtgctgcgtctgtaccctccggtggcggccatcaaccgccggacacgccagccgacaaagctcggaggcgtcacgtacccggcgggggtcatgcttatgacgcccgtcatgttcatccaccgggaccctgccctgtggggctccgacgccgacgagttcaacccggggaggttcgccgacggcgtgtccaaggcgtgcagggaccccggcgccttcgcccccttcagctggggcccgcgcgtctgcatcggccagaactttgcgctcctggaggccaagctggccgtcagcatgatcctgcagcgcttcgcgttcgaggtgtcgccggcgtacgtccacgcgccctacaccgtgctgacactgcacccgcagcacggcgctccggtcaggctgcgcaggctatgaatacacgatcggtgcttccgttaagcaatttctctccaatacccgaagactcttgtttattcatttcaaagttacgattacaaaacataatgcaaaatctcaaacttatat

SEQ ID NO: 2479 - protein, 260 aa, Zea mays subsp. mays
  peptide (1)..(260): Ceres Seq. ID no. 12423984
  misc_feature (1)..(260): Homolog of NCBI NO: 19909879 NR Description: cytochrome P450 [Oryza sativa]
  misc_feature (1)..(260): Homolog of NCBI NO: 34912894 NR Description: putative cytochrome P450 [Oryza sativa (japonica
  misc_feature (1)..(260): Homolog of NCBI NO: 13661768 NR Description: putative cytochrome P450 [Lolium rigidum]
  misc_feature (1)..(260): Homolog of NCBI NO: 13661770 NR Description: putative cytochrome P450 [Lolium rigidum]
  misc_feature (1)..(260): Homolog of NCBI NO: 34912882 NR Description: putative cytochrome P450 [Oryza sativa (japonica
  misc_feature (1)..(260): Homolog of NCBI NO: 13661766 NR Description: putative cytochrome P450 [Lolium rigidum]
  misc_feature (1)..(260): Homolog of NCBI NO: 13661774 NR Description: putative cytochrome P450 [Lolium rigidum]
  misc_feature (1)..(260): Homolog of NCBI NO: 13661772 NR Description: putative cytochrome P450 [Lolium rigidum]
  misc_feature (1)..(260): Homolog of NCBI NO: 21842133 NR Description: cytochrome P450 monooxygenase CYP72A16 [Zea mays
  misc_feature (1)..(260): Homolog of NCBI NO: 34912880 NR Description: putative cytochrome P450 [Oryza sativa (japonica
  misc_feature (12)..(12): Xaa is any aa, unknown or other
MNEIDREVKTVXRGIIEKRQKAAKNGEATKDDLLGLLLESNMNYSDSDGKSSKGITVEEVIGECKVFYFAGMETTAVLLTWTVAVLSMHPEWQDRAREEVLQVFGENKPDFNGVARLKVVTMVLYEVLRLYPPVAAINRRTRQPTKLGGVTYPAGVMLMTPVMFIHRDPALWGSDADEFNPGRFADGVSKACRDPGAFAPFSWGPRVCIGQNFALLEAKLAVSMILQRFAFEVSPAYVHAPYTVLTLHPQHGAPVRLRRL

SEQ ID NO: 2480 - protein, 219 aa, Zea mays subsp. mays
  peptide (1)..(219): Ceres Seq. ID no. 12423985
  misc_feature (1)..(219): Homolog of NCBI NO: 19909879 NR Description: cytochrome P450 [Oryza sativa]
  misc_feature (1)..(219): Homolog of NCBI NO: 34912894 NR Description: putative cytochrome P450 [Oryza sativa (japonica
  misc_feature (1)..(219): Homolog of NCBI NO: 13661768 NR Description: putative cytochrome P450 [Lolium rigidum]
  misc_feature (1)..(219): Homolog of NCBI NO: 13661770 NR Description: putative cytochrome P450 [Lolium rigidum]
  misc_feature (1)..(219): Homolog of NCBI NO: 34912882 NR Description: putative cytochrome P450 [Oryza sativa (japonica
  misc_feature (1)..(219): Homolog of NCBI NO: 13661766 NR Description: putative cytochrome P450 [Lolium rigidum]
  misc_feature (1)..(219): Homolog of NCBI NO: 13661774 NR Description: putative cytochrome P450 [Lolium rigidum]
  misc_feature (1)..(219): Homolog of NCBI NO: 13661772 NR Description: putative cytochrome P450 [Lolium rigidum]
  misc_feature (1)..(219): Homolog of NCBI NO: 21842133 NR Description: cytochrome P450 monooxygenase CYP72A16 [Zea mays
  misc_feature (1)..(219): Homolog of NCBI NO: 34912880 NR Description: putative cytochrome P450 [Oryza sativa (japonica
MNYSDSDGKSSKGITVEEVIGECKVFYFAGMETTAVLLTWTVAVLSMHPEWQDRAREEVLQVFGENKPDFNGVARLKVVTMVLYEVLRLYPPVAAINRRTRQPTKLGGVTYPAGVMLMTPVMFIHRDPALWGSDADEFNPGRFADGVSKACRDPGAFAPFSWGPRVCIGQNFALLEAKLAVSMILQRFAFEVSPAYVHAPYTVLTLHPQHGAPVRLRRL

SEQ ID NO: 2481 - protein, 197 aa, Zea mays subsp. mays
  peptide (1)..(197): Ceres Seq. ID no. 12423986
  misc_feature (9)..(193): Homolog of NCBI NO: 19909879 NR Description: cytochrome P450 [Oryza sativa]
  misc_feature (9)..(193): Homolog of NCBI NO: 34912894 NR Description: putative cytochrome P450 [Oryza sativa (japonica
  misc_feature (8)..(194): Homolog of NCBI NO: 13661768 NR Description: putative cytochrome P450 [Lolium rigidum]
  misc_feature (8)..(194): Homolog of NCBI NO: 13661770 NR Description: putative cytochrome P450 [Lolium rigidum]
  misc_feature (5)..(194): Homolog of NCBI NO: 34912882 NR Description: putative cytochrome P450 [Oryza sativa (japonica
  misc_feature (5)..(194): Homolog of NCBI NO: 13661766 NR Description: putative cytochrome P450 [Lolium rigidum]
  misc_feature (5)..(194): Homolog of NCBI NO: 13661774 NR Description: putative cytochrome P450 [Lolium rigidum]
  misc_feature (5)..(194): Homolog of NCBI NO: 13661772 NR Description: putative cytochrome P450 [Lolium rigidum]
  misc_feature (8)..(194): Homolog of NCBI NO: 21842133 NR Description: cytochrome P450 monooxygenase CYP72A16 [Zea mays
  misc_feature (5)..(194): Homolog of NCBI NO: 34912880 NR Description: putative cytochrome P450 [Oryza sativa (japonica
MDGHGAVSPWSVLGGAAAVLFLWLASQVLEWAWWAPRRVNRALRAQGLRGTRYRLLCGDLIEEQRLRAAALARPVPVDRPHDFLPRVAPFLHRVLQEHGKLSFTWFGPTPRVLITDPELAREVLSNKCGDFVKSLLSPLSTLLVAGLVVLDGEKWVKHRRILNPAFHAEKLKGMLPAFLACCNELVDRWEKQISCFR

SEQ ID NO: 2482 - DNA, 1163 bp, Zea mays subsp. mays
  misc_feature (1)..(1163): Ceres Seq. ID no. 12343976
  misc_feature: MA Experiment ID: 108689 Result: Up-regulated in Transcription
  misc_feature: MA Experiment 108689 PARAMETER Experiment Name: Zm_Drought_Roots_P Parameter: Age (day) Value: 9
  misc_feature: MA Experiment 108689 PARAMETER Experiment Name: Zm_Drought_Roots_P Parameter: Organism Value: Zea mays
  misc_feature: MA Experiment 108689 PARAMETER Experiment Name: Zm_Drought_Roots_P Parameter: Plant Line Value: 35A19
  misc_feature: MA Experiment 108689 PARAMETER Experiment Name: Zm_Drought_Roots_P Parameter: Timepoint (hr) Value: 24
  misc_feature: MA Experiment 108689 PARAMETER Experiment Name: Zm_Drought_Roots_P Parameter: Tissue Value: Roots
  misc_feature: MA Experiment 108689 PARAMETER Experiment Name: Zm_Drought_Roots_P Parameter: Treatment Value: Drought vs. No Drought
agcttgtggtcgcgatgccgtacaccggatatcctctagcgccttcccacaatcgcgcttctgcggttctgccgccgacgtccgcgccgccgacgtccgcgcccgcgtccctcgctgctttgccctctccaccctccgccatcaccgccgcggcgtccttctgtaccggatccgtcgcagccaccactccgcagatccgctgggttgacgtccacggagctgctccggggatgtcgtcctccgcttccagcgtccagggcgacgccgccggagagttcacggaggtcgtaatcgtgcgtcacggcgagacgtcatggaacgcctcgcgcatcatacagggacacttggatgcagagcttaatgatattggaaggcagcaagctgttgcggttgctcatcgtctttctaaagaagtgaaaccagttgccatatactcttctgatctgaagcgagcagcagagactgcgcaaacaattgcaagaatttgcaatgtgccaaatgtcgtgttcgatccagcactgagagaaagacacattggagatctgcaaggcatgacgcttcaagatgctgctacagagaggccagaggcatacaaagcttttatgtcccacaagagaaatcaacaagttcctggtggtggagagagtcttgatcaactgtcggagcgatgtgtgtcttttctgtacgacattgttggtaaacacaaaggggagcgagttatcctggtttcacatggcggcaccatcagagagctctacagacacgtgagtcccacgaagccgctccacggcaaaatacacaacacgtcggtgagcgtcatcctcgtgtccgacgccaccggccggtgcatcgtcaagatgtgcggggacgtcagccacctccaggagacgggcgtcctggagaacgccttcggtggcgacaagacctccgcctgagattccaacattcatcacgcgccgagagctctcggcaattatcacgcgccgagtgagcgctcgtttcggccgtctttttttccactgtaccaatcatcctgttgctaccagtagtggtctagcggagaatgatgcacacttccccccgctgggaacgcggcgatttttgctggaacagttgaaggccgagccggggcgaatccttttggcctggccgtgcactgcttg

SEQ ID NO: 2483 - protein, 310 aa, Zea mays subsp. mays
  peptide (1)..(310): Ceres Seq. ID no. 12343977
  misc_feature (94)..(277): Pfam Name: Phosphoglycerate mutase family Pfam Description: Phosphoglycerate mutase family
  misc_feature (91)..(309): Homolog of NCBI NO: 15229783 NR Description: putative protein
  misc_feature (93)..(294): Homolog of NCBI NO: 23021451 NR Description: hypothetical protein [Clostridium thermocellum
  misc_feature (93)..(294): Homolog of NCBI NO: 15806410 NR Description: phosphoglycerate mutase, putative [Deinococcus
  misc_feature (93)..(297): Homolog of NCBI NO: 33596671 NR Description: probable phosphoglycerate mutase 2 [Bordetella
  misc_feature (93)..(297): Homolog of NCBI NO: 33592552 NR Description: probable phosphoglycerate mutase 2 [Bordetella
  misc_feature (82)..(294): Homolog of NCBI NO: 22976134 NR Description: hypothetical protein [Ralstonia metallidurans]
  misc_feature (158)..(306): Homolog of NCBI NO: 26450240 NR Description: putative phosphoglycerate mutase [Arabidopsis
  misc_feature (91)..(293): Homolog of NCBI NO: 17545218 NR Description: PUTATIVE PHOSPHOGLYCERATE MUTASE 2 PROTEIN
  misc_feature (91)..(306): Homolog of NCBI NO: 15237633 NR Description: phosphoglycerate mutase - like protein; protein
  misc_feature (91)..(306): Homolog of NCBI NO: 9955567 NR Description: phosphoglycerate mutase-like protein [Arabidopsis
LVVAMPYTGYPLAPSHNRASAVLPPTSAPPTSAPASLAALPSPPSAITAAASFCTGSVAATTPQIRWVDVHGAAPGMSSSASSVQGDAAGEFTEVVIVRHGETSWNASRIIQGHLDAELNDIGRQQAVAVAHRLSKEVKPVAIYSSDLKRAAETAQTIARICNVPNVVFDPALRERHIGDLQGMTLQDAATERPEAYKAFMSHKRNQQVPGGGESLDQLSERCVSFLYDIVGKHKGERVILVSHGGTIRELYRHVSPTKPLHGKIHNTSVSVILVSDATGRCIVKMCGDVSHLQETGVLENAFGGDKTSA

SEQ ID NO: 2484 - protein, 306 aa, Zea mays subsp. mays
  peptide (1)..(306): Ceres Seq. ID no. 12343978
  misc_feature (90)..(273): Pfam Name: Phosphoglycerate mutase family Pfam Description: Phosphoglycerate mutase family
  misc_feature (89)..(290): Homolog of NCBI NO: 23021451 NR Description: hypothetical protein [Clostridium thermocellum
  misc_feature (89)..(290): Homolog of NCBI NO: 15806410 NR Description: phosphoglycerate mutase, putative [Deinococcus
  misc_feature (89)..(293): Homolog of NCBI NO: 33596671 NR Description: probable phosphoglycerate mutase 2 [Bordetella
  misc_feature (89)..(293): Homolog of NCBI NO: 33592552 NR Description: probable phosphoglycerate mutase 2 [Bordetella
  misc_feature (78)..(290): Homolog of NCBI NO: 22976134 NR Description: hypothetical protein [Ralstonia metallidurans]
  misc_feature (154)..(302): Homolog of NCBI NO: 26450240 NR Description: putative phosphoglycerate mutase [Arabidopsis
  misc_feature (87)..(289): Homolog of NCBI NO: 17545218 NR Description: PUTATIVE PHOSPHOGLYCERATE MUTASE 2 PROTEIN
  misc_feature (87)..(302): Homolog of NCBI NO: 15237633 NR Description: phosphoglycerate mutase - like protein; protein
  misc_feature (87)..(302): Homolog of NCBI NO: 9955567 NR Description: phosphoglycerate mutase-like protein [Arabidopsis
  misc_feature (87)..(305): Homolog of NCBI NO: 15229783 NR Description: putative protein
MPYTGYPLAPSHNRASAVLPPTSAPPTSAPASLAALPSPPSAITAAASFCTGSVAATTPQIRWVDVHGAAPGMSSSASSVQGDAAGEFTEVVIVRHGETSWNASRIIQGHLDAELNDIGRQQAVAVAHRLSKEVKPVAIYSSDLKRAAETAQTIARICNVPNVVFDPALRERHIGDLQGMTLQDAATERPEAYKAFMSHKRNQQVPGGGESLDQLSERCVSFLYDIVGKHKGERVILVSHGGTIRELYRHVSPTKPLHGKIHNTSVSVILVSDATGRCIVKMCGDVSHLQETGVLENAFGGDKTSA

SEQ ID NO: 2485 - protein, 234 aa, Zea mays subsp. mays
  peptide (1)..(234): Ceres Seq. ID no. 12343979
  misc_feature (18)..(201): Pfam Name: Phosphoglycerate mutase family Pfam Description: Phosphoglycerate mutase family
  misc_feature (17)..(218): Homolog of NCBI NO: 23021451 NR Description: hypothetical protein [Clostridium thermocellum
  misc_feature (17)..(218): Homolog of NCBI NO: 15806410 NR Description: phosphoglycerate mutase, putative [Deinococcus
  misc_feature (17)..(221): Homolog of NCBI NO: 33596671 NR Description: probable phosphoglycerate mutase 2 [Bordetella
  misc_feature (17)..(221): Homolog of NCBI NO: 33592552 NR Description: probable phosphoglycerate mutase 2 [Bordetella
  misc_feature (6)..(218): Homolog of NCBI NO: 22976134 NR Description: hypothetical protein [Ralstonia metallidurans]
  misc_feature (82)..(230): Homolog of NCBI NO: 26450240 NR Description: putative phosphoglycerate mutase [Arabidopsis
  misc_feature (15)..(217): Homolog of NCBI NO: 17545218 NR Description: PUTATIVE PHOSPHOGLYCERATE MUTASE 2 PROTEIN
  misc_feature (15)..(230): Homolog of NCBI NO: 15237633 NR Description: phosphoglycerate mutase - like protein; protein
  misc_feature (15)..(230): Homolog of NCBI NO: 9955567 NR Description: phosphoglycerate mutase-like protein [Arabidopsis
  misc_feature (15)..(233): Homolog of NCBI NO: 15229783 NR Description: putative protein
MSSSASSVQGDAAGEFTEVVIVRHGETSWNASRIIQGHLDAELNDIGRQQAVAVAHRLSKEVKPVAIYSSDLKRAAETAQTIARICNVPNVVFDPALRERHIGDLQGMTLQDAATERPEAYKAFMSHKRNQQVPGGGESLDQLSERCVSFLYDIVGKHKGERVILVSHGGTIRELYRHVSPTKPLHGKIHNTSVSVILVSDATGRCIVKMCGDVSHLQETGVLENAFGGDKTSA

SEQ ID NO: 2486 - DNA, 1415 bp, Zea mays subsp. mays
  misc_feature (1)..(1415): Ceres Seq. ID no. 12410718
  misc_feature: MA Experiment ID: 108523 Result: Down-regulated in Transcription
  misc_feature: MA Experiment 108523 PARAMETER Experiment Name: Zm_42deg_Heat_P Parameter: Age (day) Value: 8
  misc_feature: MA Experiment 108523 PARAMETER Experiment Name: Zm_42deg_Heat_P Parameter: Organism Value: Zea mays
  misc_feature: MA Experiment 108523 PARAMETER Experiment Name: Zm_42deg_Heat_P Parameter: Plant Line Value: 35A19
  misc_feature: MA Experiment 108523 PARAMETER Experiment Name: Zm_42deg_Heat_P Parameter: Temperature (deg C) Value: 42 vs. 22
  misc_feature: MA Experiment 108523 PARAMETER Experiment Name: Zm_42deg_Heat_P Parameter: Timepoint (hr) Value: 6
  misc_feature: MA Experiment 108523 PARAMETER Experiment Name: Zm_42deg_Heat_P Parameter: Tissue Value: Aerial
  misc_feature: MA Experiment ID: 108559 Result: Down-regulated in Transcription
  misc_feature: MA Experiment 108559 PARAMETER Experiment Name: Zm_5mM_NO_P Parameter: Age (day) Value: 8
  misc_feature: MA Experiment 108559 PARAMETER Experiment Name: Zm_5mM_NO_P Parameter: Organism Value: Zea mays
  misc_feature: MA Experiment 108559 PARAMETER Experiment Name: Zm_5mM_NO_P Parameter: Plant Line Value: 35A19
  misc_feature: MA Experiment 108559 PARAMETER Experiment Name: Zm_5mM_NO_P Parameter: Timepoint (hr) Value: 12
  misc_feature: MA Experiment 108559 PARAMETER Experiment Name: Zm_5mM_NO_P Parameter: Tissue Value: Aerial
  misc_feature: MA Experiment 108559 PARAMETER Experiment Name: Zm_5mM_NO_P Parameter: Treatment Value: 5mM NO vs. No Treatment
  misc_feature: MA Experiment ID: 20000477 Result: Up-regulated in Transcription
  misc_feature: MA Experiment 20000477 PARAMETER Experiment Name: Zm_5mM_SA_P Parameter: Age (day) Value: 10
  misc_feature: MA Experiment 20000477 PARAMETER Experiment Name: Zm_5mM_SA_P Parameter: Organism Value: Zea mays
  misc_feature: MA Experiment 20000477 PARAMETER Experiment Name: Zm_5mM_SA_P Parameter: Plant Line Value: 35A19
  misc_feature: MA Experiment 20000477 PARAMETER Experiment Name: Zm_5mM_SA_P Parameter: Timepoint (hr) Value: 48
  misc_feature: MA Experiment 20000477 PARAMETER Experiment Name: Zm_5mM_SA_P Parameter: Tissue Value: Aerial
  misc_feature: MA Experiment 20000477 PARAMETER Experiment Name: Zm_5mM_SA_P Parameter: Treatment Value: 5mM SA vs. No Treatment
  misc_feature: MA Experiment ID: 20000479 Result: Up-regulated in Transcription
  misc_feature: MA Experiment 20000479 PARAMETER Experiment Name: Zm_Drought_P Parameter: Age (day) Value: 10
  misc_feature: MA Experiment 20000479 PARAMETER Experiment Name: Zm_Drought_P Parameter: Organism Value: Zea mays
  misc_feature: MA Experiment 20000479 PARAMETER Experiment Name: Zm_Drought_P Parameter: Plant Line Value: 35A19
  misc_feature: MA Experiment 20000479 PARAMETER Experiment Name: Zm_Drought_P Parameter: Timepoint (hr) Value: 48
  misc_feature: MA Experiment 20000479 PARAMETER Experiment Name: Zm_Drought_P Parameter: Tissue Value: Aerial
  misc_feature: MA Experiment 20000479 PARAMETER Experiment Name: Zm_Drought_P Parameter: Treatment Value: Drought vs. No Drought
  misc_feature: MA Experiment ID: 20000480 Result: Up-regulated in Transcription
  misc_feature: MA Experiment 20000480 PARAMETER Experiment Name: Zm_Drought_P Parameter: Age (day) Value: 11
  misc_feature: MA Experiment 20000480 PARAMETER Experiment Name: Zm_Drought_P Parameter: Organism Value: Zea mays
  misc_feature: MA Experiment 20000480 PARAMETER Experiment Name: Zm_Drought_P Parameter: Plant Line Value: 35A19
  misc_feature: MA Experiment 20000480 PARAMETER Experiment Name: Zm_Drought_P Parameter: Timepoint (hr) Value: 72
  misc_feature: MA Experiment 20000480 PARAMETER Experiment Name: Zm_Drought_P Parameter: Tissue Value: Aerial
  misc_feature: MA Experiment 20000480 PARAMETER Experiment Name: Zm_Drought_P Parameter: Treatment Value: Drought vs. No Drought
  misc_feature: MA Experiment ID: 20000488 Result: Down-regulated in Transcription
  misc_feature: MA Experiment 20000488 PARAMETER Experiment Name: Zm_50mM_NH4NO3_L_to_H_P Parameter: Organism Value: Zea mays
  misc_feature: MA Experiment 20000488 PARAMETER Experiment Name: Zm_50mM_NH4NO3_L_to_H_P Parameter: Timepoint (hr) Value: 8
  misc_feature: MA Experiment 20000488 PARAMETER Experiment Name: Zm_50mM_NH4NO3_L_to_H_P Parameter: Tissue Value: Leaves
  misc_feature: MA Experiment 20000488 PARAMETER Experiment Name: Zm_50mM_NH4NO3_L_to_H_P Parameter: Treatment Value: 50mM NH4NO3 vs. 100mM Mannitol
  misc_feature: MA Experiment ID: 20000534 Result: Down-regulated in Transcription
  misc_feature: MA Experiment 20000534 PARAMETER Experiment Name: Zm_Hybrid_Pollen_P Parameter: Age (day) Value: 8
  misc_feature: MA Experiment 20000534 PARAMETER Experiment Name: Zm_Hybrid_Pollen_P Parameter: Organism Value: Zea mays
  misc_feature: MA Experiment 20000534 PARAMETER Experiment Name: Zm_Hybrid_Pollen_P Parameter: Plant Line Value: 35A19
  misc_feature: MA Experiment 20000534 PARAMETER Experiment Name: Zm_Hybrid_Pollen_P Parameter: Tissue Value: Pollen vs. Aerial
  misc_feature: MA Experiment ID: 20000535 Result: Down-regulated in Transcription
  misc_feature: MA Experiment 20000535 PARAMETER Experiment Name: Zm_Hybrid_Seed_Dev_P Parameter: DAP Value: 30 vs. 12
  misc_feature: MA Experiment 20000535 PARAMETER Experiment Name: Zm_Hybrid_Seed_Dev_P Parameter: Organism Value: Zea mays
  misc_feature: MA Experiment 20000535 PARAMETER Experiment Name: Zm_Hybrid_Seed_Dev_P Parameter: Plant Line Value: 35A19
  misc_feature: MA Experiment 20000535 PARAMETER Experiment Name: Zm_Hybrid_Seed_Dev_P Parameter: Tissue Value: Embryo vs. Unfert Floret
  misc_feature: MA Experiment ID: 20000626 Result: Up-regulated in Transcription
  misc_feature: MA Experiment 20000626 PARAMETER Experiment Name: Zm_Herbicide-Treatments_P Parameter: Timepoint (hr) Value: 12
  misc_feature: MA Experiment 20000626 PARAMETER Experiment Name: Zm_Herbicide-Treatments_P Parameter: Tissue Value: Aerial
  misc_feature: MA Experiment 20000626 PARAMETER Experiment Name: Zm_Herbicide-Treatments_P Parameter: Treatment Value: Roundup vs. No Treatment
gatcgatggatttctacggttcctgcctgtcaagtgtttgtcctcgtctcgtcttcggaaaacaccaaacgacaagtccaaggcagagcagatttagaccgaaatatacaaaaactggatcgaaaattgcatatcggactggaccgagaacgaaaaaagaaaccgagggaaagttcaagtgttcaaccttgaatggccatggccttcttttcgttttcggccctataaaactgatgatctgctgatgagacatcccactcgccggccgtccttgaagagcgagcagcaatggcgcaggagatcgagcacacccacctccccatccgcggcctcaacctccacgtcgcacaagtaggcacaggtgaactgggcacggtggtgttcctgcacggcttcccggagatatggtactcgtggcgccaccagatgcgggcccgtggccgcggcggggtaccgcgccatcgcgccggactgccgcgggtacggcctgtcggagcagccgccggagcacgaggaggtctctcctgacgacctcatcgccgacgtgctgggcatcctcgacgccctcagcgtcccgaaggcgttcttggtgggcaaggacttcggcgccatgccggcgtacgagttcgcgctgcagcacccgggccgcacctgcggcgtggtgtgcctgggcatccccttcaacccggcccccatatccttcgacgccatcatgcccgaaggattctacatcctgcgctggcgcgagccgggcagggcggaggccgacttcggccggttcgacgtgaggcgcgtggtgcgcaccatctacgtgctcttcgccggcgccgagatcccgattgccaaggaagggcaggagatcatggacctggccgacctgtccacgcccctcccggagtggttcaccgaggaggacctggacgcctacgccaagctctacgagaagtccggcttcgggtacccgctcaagatgccgtacagatctatgcacaagctcccgaaccggctggacgccaagttccaggtgccggtgttcatggtgatgggggagaaggactacgcgttcaagttcccggggttcgagaccgccatgcgcggcggggtcatggacaacttcatgccggacctcaagatcacctacatccctgaggggagccacttcgtgcaggagcagctcccagagcaggtcaacgacctgctcctcggcttcctcagggaccatccctccgccgcataagcagtgggtgagaccgtcagaataatggaatgcttcctgagcaacggtttctctactctattgccgttgcctggatccatgaccgtgttaattaattaattagtgcatatacttcctactcaaatcagatgtacgttttttttatctgcaataaaaatcatcgtcgctgcattactcg

SEQ ID NO: 2487 - protein, 208 aa, Zea mays subsp. mays
  peptide (1)..(208): Ceres Seq. ID no. 12410719
  misc_feature (1)..(199): Pfam Name: alpha/beta hydrolase fold Pfam Description: alpha/beta hydrolase fold
  misc_feature (1)..(201): Homolog of NCBI NO: 10197684 NR Description: soluble epoxide hydrolase [Homo sapiens]
  misc_feature (1)..(138): Homolog of NCBI NO: 29826681 NR Description: putative epoxide hydrolase [Streptomyces
  misc_feature (1)..(202): Homolog of NCBI NO: 18411917 NR Description: coded for by A. thaliana cDNA T04215
  misc_feature (1)..(201): Homolog of NCBI NO: 15230367 NR Description: epoxide hydrolase-like protein
  misc_feature (46)..(207): Homolog of NCBI NO: 37535730 NR Description: putative epoxide hydrolase
  misc_feature (1)..(202): Homolog of NCBI NO: 1354849 NR Description: epoxide hydrolase [Nicotiana tabacum]
  misc_feature (1)..(204): Homolog of NCBI NO: 37535722 NR Description: putative epoxide hydrolase
  misc_feature (1)..(205): Homolog of NCBI NO: 37535732 NR Description: putative epoxide hydrolase
  misc_feature (1)..(205): Homolog of NCBI NO: 37535728 NR Description: putative epoxide hydrolase
  misc_feature (1)..(208): Homolog of NCBI NO: 37535724 NR Description: putative epoxide hydrolase
MPAYEFALQHPGRTCGVVCLGIPFNPAPISFDAIMPEGFYILRWREPGRAEADFGRFDVRRVVRTIYVLFAGAEIPIAKEGQEIMDLADLSTPLPEWFTEEDLDAYAKLYEKSGFGYPLKMPYRSMHKLPNRLDAKFQVPVFMVMGEKDYAFKFPGFETAMRGGVMDNFMPDLKITYIPEGSHFVQEQLPEQVNDLLLGFLRDHPSAA

SEQ ID NO: 2488 - protein, 174 aa, Zea mays subsp. mays
  peptide (1)..(174): Ceres Seq. ID no. 12410720
  misc_feature (1)..(165): Pfam Name: alpha/beta hydrolase fold Pfam Description: alpha/beta hydrolase fold
  misc_feature (1)..(167): Homolog of NCBI NO: 10197684 NR Description: soluble epoxide hydrolase [Homo sapiens]
  misc_feature (1)..(104): Homolog of NCBI NO: 29826681 NR Description: putative epoxide hydrolase [Streptomyces
  misc_feature (1)..(168): Homolog of NCBI NO: 18411917 NR Description: coded for by A. thaliana cDNA T04215
  misc_feature (1)..(167): Homolog of NCBI NO: 15230367 NR Description: epoxide hydrolase-like protein
  misc_feature (12)..(173): Homolog of NCBI NO: 37535730 NR Description: putative epoxide hydrolase
  misc_feature (1)..(168): Homolog of NCBI NO: 1354849 NR Description: epoxide hydrolase [Nicotiana tabacum]
  misc_feature (1)..(170): Homolog of NCBI NO: 37535722 NR Description: putative epoxide hydrolase
  misc_feature (1)..(171): Homolog of NCBI NO: 37535732 NR Description: putative epoxide hydrolase
  misc_feature (1)..(171): Homolog of NCBI NO: 37535728 NR Description: putative epoxide hydrolase
  misc_feature (1)..(174): Homolog of NCBI NO: 37535724 NR Description: putative epoxide hydrolase
MPEGFYILRWREPGRAEADFGRFDVRRVVRTIYVLFAGAEIPIAKEGQEIMDLADLSTPLPEWFTEEDLDAYAKLYEKSGFGYPLKMPYRSMHKLPNRLDAKFQVPVFMVMGEKDYAFKFPGFETAMRGGVMDNFMPDLKITYIPEGSHFVQEQLPEQVNDLLLGFLRDHPSAA

SEQ ID NO: 2489 - protein, 127 aa, Zea mays subsp. mays
  peptide (1)..(127): Ceres Seq. ID no. 12410721
  misc_feature (7)..(127): Pfam Name: Equine herpesvirus glycoprotein gp2 Pfam Description: Equine herpesvirus glycoprotein gp2
  misc_feature (9)..(127): Homolog of NCBI NO: 13592175 NR Description: ppg3 [Leishmania major]
  misc_feature (7)..(127): Homolog of NCBI NO: 13592175 NR Description: ppg3 [Leishmania major]
  misc_feature (9)..(127): Homolog of NCBI NO: 13592175 NR Description: ppg3 [Leishmania major]
  misc_feature (9)..(127): Homolog of NCBI NO: 13592175 NR Description: ppg3 [Leishmania major]
  misc_feature (23)..(127): Homolog of NCBI NO: 17384256 NR Description: mucin 5 [Homo sapiens]
  misc_feature (7)..(127): Homolog of NCBI NO: 13592175 NR Description: ppg3 [Leishmania major]
  misc_feature (7)..(127): Homolog of NCBI NO: 13592175 NR Description: ppg3 [Leishmania major]
  misc_feature (9)..(127): Homolog of NCBI NO: 13592175 NR Description: ppg3 [Leishmania major]
  misc_feature (1)..(127): Homolog of NCBI NO: 13592175 NR Description: ppg3 [Leishmania major]
  misc_feature (11)..(71): Homolog of NCBI NO: 37535730 NR Description: putative epoxide hydrolase
MVLVAPPDAGPWPRRGTAPSRRTAAGTACRSSRRSTRRSLLTTSSPTCWASSTPSASRRRSWWARTSAPCRRTSSRCSTRAAPAAWCAWASPSTRPPYPSTPSCPKDSTSCAGASRAGRRPTSAGST

SEQ ID NO: 2490 - DNA, 1239 bp, Zea mays subsp. mays
  misc_feature (1)..(1239): Ceres Seq. ID no. 12410710
  misc_feature: MA Experiment ID: 108527 Result: Down-regulated in Transcription
  misc_feature: MA Experiment 108527 PARAMETER Experiment Name: Zm_5mM_NO_P Parameter: Age (day) Value: 8
  misc_feature: MA Experiment 108527 PARAMETER Experiment Name: Zm_5mM_NO_P Parameter: Organism Value: Zea mays
  misc_feature: MA Experiment 108527 PARAMETER Experiment Name: Zm_5mM_NO_P Parameter: Plant Line Value: 35A19
  misc_feature: MA Experiment 108527 PARAMETER Experiment Name: Zm_5mM_NO_P Parameter: Timepoint (hr) Value: 6
  misc_feature: MA Experiment 108527 PARAMETER Experiment Name: Zm_5mM_NO_P Parameter: Tissue Value: Aerial
  misc_feature: MA Experiment 108527 PARAMETER Experiment Name: Zm_5mM_NO_P Parameter: Treatment Value: 5mM NO vs. No Treatment
  misc_feature: MA Experiment ID: 108528 Result: Up-regulated in Transcription
  misc_feature: MA Experiment 108528 PARAMETER Experiment Name: Zm_Imbibed_Seeds_P Parameter: Age (day) Value: 5 vs. 2
  misc_feature: MA Experiment 108528 PARAMETER Experiment Name: Zm_Imbibed_Seeds_P Parameter: Organism Value: Zea mays
  misc_feature: MA Experiment 108528 PARAMETER Experiment Name: Zm_Imbibed_Seeds_P Parameter: Plant Line Value: 35A19
  misc_feature: MA Experiment 108528 PARAMETER Experiment Name: Zm_Imbibed_Seeds_P Parameter: Tissue Value: Aerial vs. Embryo
  misc_feature: MA Experiment ID: 108529 Result: Down-regulated in Transcription
  misc_feature: MA Experiment 108529 PARAMETER Experiment Name: Zm_Imbibed_Seeds_P Parameter: Age (day) Value: 5 vs. 2
  misc_feature: MA Experiment 108529 PARAMETER Experiment Name: Zm_Imbibed_Seeds_P Parameter: Organism Value: Zea mays
  misc_feature: MA Experiment 108529 PARAMETER Experiment Name: Zm_Imbibed_Seeds_P Parameter: Plant Line Value: 35A19
  misc_feature: MA Experiment 108529 PARAMETER Experiment Name: Zm_Imbibed_Seeds_P Parameter: Tissue Value: Roots vs. Embryo
  misc_feature: MA Experiment ID: 108530 Result: Up-regulated in Transcription
  misc_feature: MA Experiment 108530 PARAMETER Experiment Name: Zm_Imbibed_Seeds_P Parameter: Age (day) Value: 6 vs. 2
  misc_feature: MA Experiment 108530 PARAMETER Experiment Name: Zm_Imbibed_Seeds_P Parameter: Organism Value: Zea mays
  misc_feature: MA Experiment 108530 PARAMETER Experiment Name: Zm_Imbibed_Seeds_P Parameter: Plant Line Value: 35A19
  misc_feature: MA Experiment 108530 PARAMETER Experiment Name: Zm_Imbibed_Seeds_P Parameter: Tissue Value: Aerial vs. Embryo
  misc_feature: MA Experiment ID: 108545 Result: Up-regulated in Transcription
  misc_feature: MA Experiment 108545 PARAMETER Experiment Name: Zm_Imbibed_Seeds_P Parameter: Age (day) Value: 3 vs. 2
  misc_feature: MA Experiment 108545 PARAMETER Experiment Name: Zm_Imbibed_Seeds_P Parameter: Organism Value: Zea mays
  misc_feature: MA Experiment 108545 PARAMETER Experiment Name: Zm_Imbibed_Seeds_P Parameter: Plant Line Value: 35A19
  misc_feature: MA Experiment 108545 PARAMETER Experiment Name: Zm_Imbibed_Seeds_P Parameter: Tissue Value: Aerial vs. Embryo
  misc_feature: MA Experiment ID: 108547 Result: Up-regulated in Transcription
  misc_feature: MA Experiment 108547 PARAMETER Experiment Name: Zm_Imbibed_Seeds_P Parameter: Age (day) Value: 4 vs. 2
  misc_feature: MA Experiment 108547 PARAMETER Experiment Name: Zm_Imbibed_Seeds_P Parameter: Organism Value: Zea mays
  misc_feature: MA Experiment 108547 PARAMETER Experiment Name: Zm_Imbibed_Seeds_P Parameter: Plant Line Value: 35A19
  misc_feature: MA Experiment 108547 PARAMETER Experiment Name: Zm_Imbibed_Seeds_P Parameter: Tissue Value: Aerial vs. Embryo
  misc_feature: MA Experiment ID: 108556 Result: Down-regulated in Transcription
  misc_feature: MA Experiment 108556 PARAMETER Experiment Name: Zm_Drought_P Parameter: Age (day) Value: 9
  misc_feature: MA Experiment 108556 PARAMETER Experiment Name: Zm_Drought_P Parameter: Organism Value: Zea mays
  misc_feature: MA Experiment 108556 PARAMETER Experiment Name: Zm_Drought_P Parameter: Plant Line Value: 35A19
  misc_feature: MA Experiment 108556 PARAMETER Experiment Name: Zm_Drought_P Parameter: Timepoint (hr) Value: 24
  misc_feature: MA Experiment 108556 PARAMETER Experiment Name: Zm_Drought_P Parameter: Tissue Value: Aerial
  misc_feature: MA Experiment 108556 PARAMETER Experiment Name: Zm_Drought_P Parameter: Treatment Value: Drought vs. No Drought
  misc_feature: MA Experiment ID: 108559 Result: Down-regulated in Transcription
  misc_feature: MA Experiment 108559 PARAMETER Experiment Name: Zm_5mM_NO_P Parameter: Age (day) Value: 8
  misc_feature: MA Experiment 108559 PARAMETER Experiment Name: Zm_5mM_NO_P Parameter: Organism Value: Zea mays
  misc_feature: MA Experiment 108559 PARAMETER Experiment Name: Zm_5mM_NO_P Parameter: Plant Line Value: 35A19
  misc_feature: MA Experiment 108559 PARAMETER Experiment Name: Zm_5mM_NO_P Parameter: Timepoint (hr) Value: 12
  misc_feature: MA Experiment 108559 PARAMETER Experiment Name: Zm_5mM_NO_P Parameter: Tissue Value: Aerial
  misc_feature: MA Experiment 108559 PARAMETER Experiment Name: Zm_5mM_NO_P Parameter: Treatment Value: 5mM NO vs. No Treatment
  misc_feature: MA Experiment ID: 108687 Result: Down-regulated in Transcription
  misc_feature: MA Experiment 108687 PARAMETER Experiment Name: Zm_Embryos-Flowers__P Parameter: Tissue Value: Embryo vs. Aerial+
  misc_feature: MA Experiment ID: 108688 Result: Down-regulated in Transcription
  misc_feature: MA Experiment 108688 PARAMETER Experiment Name: Zm_Embryos-Flowers__P Parameter: Tissue Value: Immature Flowers vs. Aerial+
  misc_feature: MA Experiment ID: 20000479 Result: Down-regulated in Transcription
  misc_feature: MA Experiment 20000479 PARAMETER Experiment Name: Zm_Drought_P Parameter: Age (day) Value: 10
  misc_feature: MA Experiment 20000479 PARAMETER Experiment Name: Zm_Drought_P Parameter: Organism Value: Zea mays
  misc_feature: MA Experiment 20000479 PARAMETER Experiment Name: Zm_Drought_P Parameter: Plant Line Value: 35A19
  misc_feature: MA Experiment 20000479 PARAMETER Experiment Name: Zm_Drought_P Parameter: Timepoint (hr) Value: 48
  misc_feature: MA Experiment 20000479 PARAMETER Experiment Name: Zm_Drought_P Parameter: Tissue Value: Aerial
  misc_feature: MA Experiment 20000479 PARAMETER Experiment Name: Zm_Drought_P Parameter: Treatment Value: Drought vs. No Drought
  misc_feature: MA Experiment ID: 20000480 Result: Down-regulated in Transcription
  misc_feature: MA Experiment 20000480 PARAMETER Experiment Name: Zm_Drought_P Parameter: Age (day) Value: 11
  misc_feature: MA Experiment 20000480 PARAMETER Experiment Name: Zm_Drought_P Parameter: Organism Value: Zea mays
  misc_feature: MA Experiment 20000480 PARAMETER Experiment Name: Zm_Drought_P Parameter: Plant Line Value: 35A19
  misc_feature: MA Experiment 20000480 PARAMETER Experiment Name: Zm_Drought_P Parameter: Timepoint (hr) Value: 72
  misc_feature: MA Experiment 20000480 PARAMETER Experiment Name: Zm_Drought_P Parameter: Tissue Value: Aerial
  misc_feature: MA Experiment 20000480 PARAMETER Experiment Name: Zm_Drought_P Parameter: Treatment Value: Drought vs. No Drought
atcatccagaccaccattaccagagtgctctgctctcgctggaggccgtggttcattcacgttcatggaggccgccgccattcccaccagtgccccggaaaccaggattgccgttgtcaccggcggcaacaaagggatcgggctagaggtgtgccggcagctggccggcgccggcgccaccgtcgtcgtcttaacagccagggacgagacgaggggtgcagccgctgcacaagagctcagagaatctgggctctccgatgtcatcttccatcagctggacatcaccgacgctgcgagcgtcagtcggctggctgagttcctcaaggctcgttttggaaagctagatatcctggtaaataatgccgcagttggtgctgttgagtacgtccaagatcctgctgacagttcaacgagcgaggaagagctgagtggcatggatatggtccaaaggcttcagtgcatgcttaagagagtccgggagacctacgacgctgcgacagaaggcatcaagacaaactactatggcataaagcatgtgatcgaagccttgctgcctctgcttcaagcttcctccgatgggaggatcgttaacgtctcctctgacttcggactgctaaggctgatcaacaacgaggaagctaaggcaggagctaaacgacgtggagaagctcaccgaggagaggctggacgaggtgctggccgcgtacctgagagacttcgacgccggcgaggtgggggcgcgcgggtggccggtggacttctcggcctacaaggtggccaaggtggccatgaacgcgtacacgaggatcctagcgaggagccacccggggctgcgcgtcaactgcgcgcaccccggctacgtgagcaccgacatgaccgtccacaccgggcctctcacgcccgagcaaggcgcggccaacgtcgtgaaggtggcgctgctgccggagggcggcccgaccggcgcgtacttcgcgttgggagaggaggcgtcctttatgtgacgaaagcaccgtcgtcgttaagttcgtcgttgttcgccaactccctgttagtcgatttctaaatcgacgtacaatgaaatacatcatcgctgcaaactcacaaatgaaaacaagggaaccttgtagcaaaaaaaaaaaagaagtggacagaataatgaataagcatgtcaaatatctcttgagtatctatttgttcaagtatcaatgactttgtacaaatatcaaagattgtgagtgg

SEQ ID NO: 2491 - protein, 353 aa, Zea mays subsp. mays
  peptide (1)..(353): Ceres Seq. ID no. 12410711
  misc_feature (31)..(214): Homolog of NCBI NO: 15233062 NR Description: putative protein
  misc_feature (35)..(214): Homolog of NCBI NO: 34559416 NR Description: (-)-isopiperitenone reductase [Mentha x piperita]
  misc_feature (34)..(214): Homolog of NCBI NO: 25518668 NR Description: hypothetical protein T1N6.22 - Arabidopsis
  misc_feature (33)..(214): Homolog of NCBI NO: 18378884 NR Description: carbonyl reductase, putative; protein id:
  misc_feature (32)..(214): Homolog of NCBI NO: 33146492 NR Description: carbonyl reductase -like protein
  misc_feature (22)..(214): Homolog of NCBI NO: 38346767 NR Description: OSJNBa0081C01.18 [Oryza sativa (japonica
  misc_feature (29)..(214): Homolog of NCBI NO: 38346768 NR Description: OSJNBa0081C01.19 [Oryza sativa (japonica
  misc_feature (30)..(214): Homolog of NCBI NO: 38346772 NR Description: OSJNBa0081C01.23 [Oryza sativa (japonica
  misc_feature (22)..(214): Homolog of NCBI NO: 38346774 NR Description: OSJNBa0081C01.25 [Oryza sativa (japonica
  misc_feature (29)..(214): Homolog of NCBI NO: 38346769 NR Description: OSJNBa0081C01.20 [Oryza sativa (japonica
SSRPPLPECSALAGGRGSFTFMEAAAIPTSAPETRIAVVTGGNKGIGLEVCRQLAGAGATVVVLTARDETRGAAAAQELRESGLSDVIFHQLDITDAASVSRLAEFLKARFGKLDILVNNAAVGAVEYVQDPADSSTSEEELSGMDMVQRLQCMLKRVRETYDAATEGIKTNYYGIKHVIEALLPLLQASSDGRIVNVSSDFGLLRLINNEEAKAGAKRRGEAHRGEAGRGAGRVPERLRRRRGGGARVAGGLLGLQGGQGGHERVHEDPSEEPPGAARQLRAPRLREHRHDRPHRASHARARRGQRREGGAAAGGRPDRRVLRVGRGGVLYVTKAPSSLSSSLFANSLLVDF

SEQ ID NO: 2492 - protein, 332 aa, Zea mays subsp. mays
  peptide (1)..(332): Ceres Seq. ID no. 12410712
  misc_feature (10)..(193): Homolog of NCBI NO: 15233062 NR Description: putative protein
  misc_feature (14)..(193): Homolog of NCBI NO: 34559416 NR Description: (-)-isopiperitenone reductase [Mentha x piperita]
  misc_feature (13)..(193): Homolog of NCBI NO: 25518668 NR Description: hypothetical protein T1N6.22 - Arabidopsis
  misc_feature (12)..(193): Homolog of NCBI NO: 18378884 NR Description: carbonyl reductase, putative; protein id:
  misc_feature (11)..(193): Homolog of NCBI NO: 33146492 NR Description: carbonyl reductase -like protein
  misc_feature (1)..(193): Homolog of NCBI NO: 38346767 NR Description: OSJNBa0081C01.18 [Oryza sativa (japonica
  misc_feature (8)..(193): Homolog of NCBI NO: 38346768 NR Description: OSJNBa0081C01.19 [Oryza sativa (japonica
  misc_feature (9)..(193): Homolog of NCBI NO: 38346772 NR Description: OSJNBa0081C01.23 [Oryza sativa (japonica
  misc_feature (1)..(193): Homolog of NCBI NO: 38346774 NR Description: OSJNBa0081C01.25 [Oryza sativa (japonica
  misc_feature (8)..(193): Homolog of NCBI NO: 38346769 NR Description: OSJNBa0081C01.20 [Oryza sativa (japonica
MEAAAIPTSAPETRIAVVTGGNKGIGLEVCRQLAGAGATVVVLTARDETRGAAAAQELRESGLSDVIFHQLDITDAASVSRLAEFLKARFGKLDILVNNAAVGAVEYVQDPADSSTSEEELSGMDMVQRLQCMLKRVRETYDAATEGIKTNYYGIKHVIEALLPLLQASSDGRIVNVSSDFGLLRLINNEEAKAGAKRRGEAHRGEAGRGAGRVPERLRRRRGGGARVAGGLLGLQGGQGGHERVHEDPSEEPPGAARQLRAPRLREHRHDRPHRASHARARRGQRREGGAAAGGRPDRRVLRVGRGGVLYVTKAPSSLSSSLFANSLLVDF

SEQ ID NO: 2493 - protein, 209 aa, Zea mays subsp. mays
  peptide (1)..(209): Ceres Seq. ID no. 12410713
  misc_feature (1)..(70): Homolog of NCBI NO: 38346767 NR Description: OSJNBa0081C01.18 [Oryza sativa (japonica
  misc_feature (1)..(70): Homolog of NCBI NO: 38346768 NR Description: OSJNBa0081C01.19 [Oryza sativa (japonica
  misc_feature (1)..(70): Homolog of NCBI NO: 38346772 NR Description: OSJNBa0081C01.23 [Oryza sativa (japonica
  misc_feature (1)..(70): Homolog of NCBI NO: 38346774 NR Description: OSJNBa0081C01.25 [Oryza sativa (japonica
  misc_feature (1)..(70): Homolog of NCBI NO: 38346769 NR Description: OSJNBa0081C01.20 [Oryza sativa (japonica
  misc_feature (1)..(70): Homolog of NCBI NO: 18378884 NR Description: carbonyl reductase, putative; protein id:
  misc_feature (1)..(70): Homolog of NCBI NO: 33146492 NR Description: carbonyl reductase -like protein
  misc_feature (1)..(70): Homolog of NCBI NO: 15233062 NR Description: putative protein
  misc_feature (1)..(70): Homolog of NCBI NO: 34559416 NR Description: (-)-isopiperitenone reductase [Mentha x piperita]
  misc_feature (1)..(70): Homolog of NCBI NO: 25518668 NR Description: hypothetical protein T1N6.22 - Arabidopsis
MDMVQRLQCMLKRVRETYDAATEGIKTNYYGIKHVIEALLPLLQASSDGRIVNVSSDFGLLRLINNEEAKAGAKRRGEAHRGEAGRGAGRVPERLRRRRGGGARVAGGLLGLQGGQGGHERVHEDPSEEPPGAARQLRAPRLREHRHDRPHRASHARARRGQRREGGAAAGGRPDRRVLRVGRGGVLYVTKAPSSLSSSLFANSLLVDF

SEQ ID NO: 2494 - DNA, 1175 bp, Zea mays subsp. mays
  misc_feature (1)..(1175): Ceres Seq. ID no. 13499108
  misc_feature: MA Experiment ID: 108522 Result: Up-regulated in Transcription
  misc_feature: MA Experiment 108522 PARAMETER Experiment Name: Zm_42deg_Heat_P Parameter: Age (day) Value: 8
  misc_feature: MA Experiment 108522 PARAMETER Experiment Name: Zm_42deg_Heat_P Parameter: Organism Value: Zea mays
  misc_feature: MA Experiment 108522 PARAMETER Experiment Name: Zm_42deg_Heat_P Parameter: Plant Line Value: 35A19
  misc_feature: MA Experiment 108522 PARAMETER Experiment Name: Zm_42deg_Heat_P Parameter: Temperature (deg C) Value: 42 vs. 22
  misc_feature: MA Experiment 108522 PARAMETER Experiment Name: Zm_42deg_Heat_P Parameter: Timepoint (hr) Value: 1
  misc_feature: MA Experiment 108522 PARAMETER Experiment Name: Zm_42deg_Heat_P Parameter: Tissue Value: Aerial
acacccatctcctgagtcctgcctgcgctcgcctcagctcctttcttccccgccccttggcttttgcttggttgcatcgggccggtcgagccggagaggaaaagctagctactagctaccagctctcggccggcggtggtagtctgcctgcagctggggttagctgcaagggttgggagctagccatggggaggggtcgggtggagctcaagcggatcgagaacaagatcaaccgccaggtcaccttcgccaagcgccgcaacggcctgctcaagaaggcgtacgagctctccgtgctctgcgacgccgaagtcgcgctcatcatcttctccaaccgcggcaagctctacgagttctgcagcggacagagcatcaccaaaacacttgagaggtatgaaaaaaacagttatggaggaccagatactgctgtacagaacaaggagaacgagttagtccagagcagtcgtaatgagtacctcaagctgaaagcgagggtggataatttacagaggactcagaggaatttgcttggtgaagatctggggtcacttggtgtcaaagagcttgagcagcttgagaagcaacttgattcatccttaaggcacataagatccacaaggacacaacatatgcttgatcagctcactgatcttcagaggagggagcaaatgctgtgtgaagcaaataagtgccttagaagaaagctggaggagaccagcaaccaggtgcatggccaagtgtgggagcacggtgccaacttactcggctacgagaggcactctcctcaacagcaggccccatcacatgttggcaatggtttgttctttcatcccctggaagctgcagcagagccaaccctgcagatcgggttcgctcctgagcatatgaataacttcatgccaacatggctaccctgaagatggatcttgaggcaaaggaaataaataaagatgcggtggcagcatcatactctatgcaagctaagagtgacagctgtgtttcagtcacatatatgatctagtctgtgtgtcaatgtgtcgaaaaacatgtctgtgattttgttatatgaatgtaacgcgcaatgaaacatacatgactagctgcttgcttgacgatgcgtttgcgtgtatccgtataaattaaaggctataagccacatcgtatatgcgtactgc

SEQ ID NO: 2495 - protein, 304 aa, Zea mays subsp. mays
  peptide (1)..(304): Ceres Seq. ID no. 13499109
  misc_feature (136)..(237): Pfam Name: K-box region Pfam Description: K-box region
  misc_feature (62)..(304): Homolog of NCBI NO: 7446518 NR Description: M79 protein - rice
  misc_feature (58)..(304): Homolog of NCBI NO: 7446543 NR Description: MADS box protein - rice
  misc_feature (62)..(304): Homolog of NCBI NO: 9367315 NR Description: MADS-box protein 9 [Hordeum vulgare subsp.
  misc_feature (62)..(304): Homolog of NCBI NO: 7446519 NR Description: MADS box protein - rice
  misc_feature (53)..(304): Homolog of NCBI NO: 33304376 NR Description: MADS box protein [Oryza sativa]
  misc_feature (73)..(304): Homolog of NCBI NO: 2055376 NR Description: MADS box protein
  misc_feature (62)..(304): Homolog of NCBI NO: 33333045 NR Description: MADS box protein [Triticum aestivum]
  misc_feature (62)..(304): Homolog of NCBI NO: 7446544 NR Description: MADS box protein - rice
  misc_feature (75)..(304): Homolog of NCBI NO: 3851333 NR Description: putative MADS-domain transcription factor [Zea
  misc_feature (62)..(304): Homolog of NCBI NO: 29372772 NR Description: putative MADS-domain transcription factor [Zea
THLLSPACARLSSFLPRPLAFAWLHRAGRAGEEKLATSYQLSAGGGSLPAAGVSCKGWELAMGRGRVELKRIENKINRQVTFAKRRNGLLKKAYELSVLCDAEVALIIFSNRGKLYEFCSGQSITKTLERYEKNSYGGPDTAVQNKENELVQSSRNEYLKLKARVDNLQRTQRNLLGEDLGSLGVKELEQLEKQLDSSLRHIRSTRTQHMLDQLTDLQRREQMLCEANKCLRRKLEETSNQVHGQVWEHGANLLGYERHSPQQQAPSHVGNGLFFHPLEAAAEPTLQIGFAPEHMNNFMPTWLP

SEQ ID NO: 2496 - protein, 243 aa, Zea mays subsp. mays
  peptide (1)..(243): Ceres Seq. ID no. 13499110
  misc_feature (75)..(176): Pfam Name: K-box region Pfam Description: K-box region
  misc_feature (1)..(243): Homolog of NCBI NO: 7446518 NR Description: M79 protein - rice
  misc_feature (1)..(243): Homolog of NCBI NO: 7446543 NR Description: MADS box protein - rice
  misc_feature (1)..(243): Homolog of NCBI NO: 9367315 NR Description: MADS-box protein 9 [Hordeum vulgare subsp.
  misc_feature (1)..(243): Homolog of NCBI NO: 7446519 NR Description: MADS box protein - rice
  misc_feature (1)..(243): Homolog of NCBI NO: 33304376 NR Description: MADS box protein [Oryza sativa]
  misc_feature (12)..(243): Homolog of NCBI NO: 2055376 NR Description: MADS box protein
  misc_feature (1)..(243): Homolog of NCBI NO: 33333045 NR Description: MADS box protein [Triticum aestivum]
  misc_feature (1)..(243): Homolog of NCBI NO: 7446544 NR Description: MADS box protein - rice
  misc_feature (14)..(243): Homolog of NCBI NO: 3851333 NR Description: putative MADS-domain transcription factor [Zea
  misc_feature (1)..(243): Homolog of NCBI NO: 29372772 NR Description: putative MADS-domain transcription factor [Zea
MGRGRVELKRIENKINRQVTFAKRRNGLLKKAYELSVLCDAEVALIIFSNRGKLYEFCSGQSITKTLERYEKNSYGGPDTAVQNKENELVQSSRNEYLKLKARVDNLQRTQRNLLGEDLGSLGVKELEQLEKQLDSSLRHIRSTRTQHMLDQLTDLQRREQMLCEANKCLRRKLEETSNQVHGQVWEHGANLLGYERHSPQQQAPSHVGNGLFFHPLEAAAEPTLQIGFAPEHMNNFMPTWLP

SEQ ID NO: 2497 - DNA, 1168 bp, Zea mays subsp. mays
  misc_feature (1)..(1168): Ceres Seq. ID no. 12352064
  misc_feature: MA Experiment ID: 108534 Result: Up-regulated in Transcription
  misc_feature: MA Experiment 108534 PARAMETER Experiment Name: Zm_4deg_Cold_P Parameter: Age (hr) Value: 8
  misc_feature: MA Experiment 108534 PARAMETER Experiment Name: Zm_4deg_Cold_P Parameter: Organism Value: Zea mays
  misc_feature: MA Experiment 108534 PARAMETER Experiment Name: Zm_4deg_Cold_P Parameter: Plant Line Value: 35A19
  misc_feature: MA Experiment 108534 PARAMETER Experiment Name: Zm_4deg_Cold_P Parameter: Temperature (deg C) Value: 4 vs. 22
  misc_feature: MA Experiment 108534 PARAMETER Experiment Name: Zm_4deg_Cold_P Parameter: Timepoint (hr) Value: 6
  misc_feature: MA Experiment 108534 PARAMETER Experiment Name: Zm_4deg_Cold_P Parameter: Tissue Value: Aerial
atgcgcatatatctttctctcttttttttctgtccaagggaaagaaggaaggcttgtgtgtatctgccagttttcggtctgcgattctgtagcctaacctatggtcatgcgactatgcgagttagattaatcagcgatctgcagtgctacttggtttgcattatcatgatcccctaggcgttttcttcttatcttttgactgaaatgctagcagcacaatagtttattagatgcttgagcagctactctgcactttcatttcctctgtatgtatttcctagtgtggaatttggtacttactttgcaattgtagcagacttgggattgagggtatccatggagatgcttgtggatttgagcaatctaatttggggaaaaggggtagagatgaaccatgttcatctggcccaacatccaaagcttgtcgtgaaaaaatgaggagagacaagctgaatgacaggttcctggaattaagttcagttatgagtcatggtaaggaagcaaagttagataaagcaaatatattgagtgatgcagcccgtatggtggcacaacttagaggtgaggcagaaaagcttaaggaatcaaatgagaagctgcgggagaatatcaaggatctgaaggaggagaagaacgagctccgtgaagagaaagtgagactaaaggtagaaaaggataggctggagcagcaagtcaaagctatgagtgtagctcctacaggatatgtaccccatctccctcatccagcttcataccatcctgctgcgttcactccatttgcgccgcctccagccaacaaaagtgctccaatcccagcaccgttccctgggatggcgatgtggcagtggttgcctccgaccatcgtggacacaactcaagatccaaagctctggcccccaaatgcttaggggcagctaccttggaatgttgtctcattgtgccttttcatgcatctggtgggcaaatcagtgtcagttaggtccctggagactggagaggaatcaagttcgcaattcgcgccatgtttatgctgtaacagctggtttccagcactagttatgaacttactatgttctactgaagggtggtgcctgtaattaatatatggatctcaaccctctagttggcatgtatatcatttgttctattcgagagctgcattttaagg

SEQ ID NO: 2498 - protein, 157 aa, Zea mays subsp. mays
  peptide (1)..(157): Ceres Seq. ID no. 12352065
  misc_feature (1)..(42): Pfam Name: Helix-loop-helix DNA-binding domain Pfam Description: Helix-loop-helix DNA-binding domain
  misc_feature (1)..(156): Homolog of NCBI NO: 15230975 NR Description: bHLH protein
  misc_feature (1)..(157): Homolog of NCBI NO: 30682847 NR Description: bHLH protein [Arabidopsis thaliana]
  misc_feature (1)..(157): Homolog of NCBI NO: 18414212 NR Description: bHLH protein
  misc_feature (1)..(157): Homolog of NCBI NO: 22331274 NR Description: bHLH protein
  misc_feature (1)..(157): Homolog of NCBI NO: 20127030 NR Description: putative bHLH transcription factor [Arabidopsis
  misc_feature (1)..(157): Homolog of NCBI NO: 15223710 NR Description: bHLH protein
  misc_feature (1)..(157): Homolog of NCBI NO: 29367409 NR Description: helix-loop-helix-like protein
  misc_feature (1)..(157): Homolog of NCBI NO: 38636768 NR Description: helix-loop-helix-like protein
  misc_feature (1)..(157): Homolog of NCBI NO: 21592325 NR Description: bHLH transcription factor, putative [Arabidopsis
  misc_feature (1)..(157): Homolog of NCBI NO: 15239706 NR Description: bHLH protein
MRRDKLNDRFLELSSVMSHGKEAKLDKANILSDAARMVAQLRGEAEKLKESNEKLRENIKDLKEEKNELREEKVRLKVEKDRLEQQVKAMSVAPTGYVPHLPHPASYHPAAFTPFAPPPANKSAPIPAPFPGMAMWQWLPPTIVDTTQDPKLWPPNA

SEQ ID NO: 2499 - protein, 141 aa, Zea mays subsp. mays
  peptide (1)..(141): Ceres Seq. ID no. 12352066
  misc_feature (1)..(140): Homolog of NCBI NO: 15230975 NR Description: bHLH protein
  misc_feature (1)..(141): Homolog of NCBI NO: 30682847 NR Description: bHLH protein [Arabidopsis thaliana]
  misc_feature (1)..(141): Homolog of NCBI NO: 18414212 NR Description: bHLH protein
  misc_feature (1)..(141): Homolog of NCBI NO: 22331274 NR Description: bHLH protein
  misc_feature (1)..(141): Homolog of NCBI NO: 20127030 NR Description: putative bHLH transcription factor [Arabidopsis
  misc_feature (1)..(141): Homolog of NCBI NO: 15223710 NR Description: bHLH protein
  misc_feature (1)..(141): Homolog of NCBI NO: 29367409 NR Description: helix-loop-helix-like protein
  misc_feature (1)..(141): Homolog of NCBI NO: 38636768 NR Description: helix-loop-helix-like protein
  misc_feature (1)..(141): Homolog of NCBI NO: 21592325 NR Description: bHLH transcription factor, putative [Arabidopsis
  misc_feature (1)..(141): Homolog of NCBI NO: 15239706 NR Description: bHLH protein
MSHGKEAKLDKANILSDAARMVAQLRGEAEKLKESNEKLRENIKDLKEEKNELREEKVRLKVEKDRLEQQVKAMSVAPTGYVPHLPHPASYHPAAFTPFAPPPANKSAPIPAPFPGMAMWQWLPPTIVDTTQDPKLWPPNA

SEQ ID NO: 2500 - protein, 121 aa, Zea mays subsp. mays
  peptide (1)..(121): Ceres Seq. ID no. 12352067
  misc_feature (1)..(120): Homolog of NCBI NO: 15230975 NR Description: bHLH protein
  misc_feature (1)..(121): Homolog of NCBI NO: 30682847 NR Description: bHLH protein [Arabidopsis thaliana]
  misc_feature (1)..(121): Homolog of NCBI NO: 18414212 NR Description: bHLH protein
  misc_feature (1)..(121): Homolog of NCBI NO: 22331274 NR Description: bHLH protein
  misc_feature (1)..(121): Homolog of NCBI NO: 20127030 NR Description: putative bHLH transcription factor [Arabidopsis
  misc_feature (1)..(121): Homolog of NCBI NO: 15223710 NR Description: bHLH protein
  misc_feature (1)..(121): Homolog of NCBI NO: 29367409 NR Description: helix-loop-helix-like protein
  misc_feature (1)..(121): Homolog of NCBI NO: 38636768 NR Description: helix-loop-helix-like protein
  misc_feature (1)..(121): Homolog of NCBI NO: 21592325 NR Description: bHLH transcription factor, putative [Arabidopsis
  misc_feature (1)..(121): Homolog of NCBI NO: 15239706 NR Description: bHLH protein
MVAQLRGEAEKLKESNEKLRENIKDLKEEKNELREEKVRLKVEKDRLEQQVKAMSVAPTGYVPHLPHPASYHPAAFTPFAPPPANKSAPIPAPFPGMAMWQWLPPTIVDTTQDPKLWPPNA

SEQ ID NO: 2501 - DNA, 1421 bp, Zea mays subsp. mays
  misc_feature (1)..(1421): Ceres Seq. ID no. 12414261
  misc_feature: MA Experiment ID: 108535 Result: Up-regulated in Transcription
  misc_feature: MA Experiment 108535 PARAMETER Experiment Name: Zm_Meristem_P Parameter: Age (day) Value: 8
  misc_feature: MA Experiment 108535 PARAMETER Experiment Name: Zm_Meristem_P Parameter: Organism Value: Zea mays
  misc_feature: MA Experiment 108535 PARAMETER Experiment Name: Zm_Meristem_P Parameter: Plant Line Value: 35A19
  misc_feature: MA Experiment 108535 PARAMETER Experiment Name: Zm_Meristem_P Parameter: Tissue Value: Root Meristem vs. Above Root Meristem
  misc_feature: MA Experiment ID: 108556 Result: Down-regulated in Transcription
  misc_feature: MA Experiment 108556 PARAMETER Experiment Name: Zm_Drought_P Parameter: Age (day) Value: 9
  misc_feature: MA Experiment 108556 PARAMETER Experiment Name: Zm_Drought_P Parameter: Organism Value: Zea mays
  misc_feature: MA Experiment 108556 PARAMETER Experiment Name: Zm_Drought_P Parameter: Plant Line Value: 35A19
  misc_feature: MA Experiment 108556 PARAMETER Experiment Name: Zm_Drought_P Parameter: Timepoint (hr) Value: 24
  misc_feature: MA Experiment 108556 PARAMETER Experiment Name: Zm_Drought_P Parameter: Tissue Value: Aerial
  misc_feature: MA Experiment 108556 PARAMETER Experiment Name: Zm_Drought_P Parameter: Treatment Value: Drought vs. No Drought
  misc_feature: MA Experiment ID: 20000479 Result: Down-regulated in Transcription
  misc_feature: MA Experiment 20000479 PARAMETER Experiment Name: Zm_Drought_P Parameter: Age (day) Value: 10
  misc_feature: MA Experiment 20000479 PARAMETER Experiment Name: Zm_Drought_P Parameter: Organism Value: Zea mays
  misc_feature: MA Experiment 20000479 PARAMETER Experiment Name: Zm_Drought_P Parameter: Plant Line Value: 35A19
  misc_feature: MA Experiment 20000479 PARAMETER Experiment Name: Zm_Drought_P Parameter: Timepoint (hr) Value: 48
  misc_feature: MA Experiment 20000479 PARAMETER Experiment Name: Zm_Drought_P Parameter: Tissue Value: Aerial
  misc_feature: MA Experiment 20000479 PARAMETER Experiment Name: Zm_Drought_P Parameter: Treatment Value: Drought vs. No Drought
  misc_feature: MA Experiment ID: 20000480 Result: Down-regulated in Transcription
  misc_feature: MA Experiment 20000480 PARAMETER Experiment Name: Zm_Drought_P Parameter: Age (day) Value: 11
  misc_feature: MA Experiment 20000480 PARAMETER Experiment Name: Zm_Drought_P Parameter: Organism Value: Zea mays
  misc_feature: MA Experiment 20000480 PARAMETER Experiment Name: Zm_Drought_P Parameter: Plant Line Value: 35A19
  misc_feature: MA Experiment 20000480 PARAMETER Experiment Name: Zm_Drought_P Parameter: Timepoint (hr) Value: 72
  misc_feature: MA Experiment 20000480 PARAMETER Experiment Name: Zm_Drought_P Parameter: Tissue Value: Aerial
  misc_feature: MA Experiment 20000480 PARAMETER Experiment Name: Zm_Drought_P Parameter: Treatment Value: Drought vs. No Drought
agaaaaggctgagaggctgtaaagagtgttgaaggacgctcggttccttcaggtgcggcggcgaccttgtctaggattttacccgtggaacgtggcgaccacttccgacgggccactcgccgccgctcgcccgccctgctcttcaccccttctcccgggaccgggacaagcgatctcccgtccccgtagtccgcaggagagagatttttttctcggttgcaatgaagagttatccgtgggcgggggcccgccctcttgccgtcgtgcagctcctcctcttcctcgcccacctcgtcgaccgcggcggtgctgccggtggaggcagcaagggcagctcggtgtacccggcggctgtcgtctacccgcatcactcccgccagatctcctgcaaacccagggtgttcctgtatcagcacttcctcagcgacgacgaggctaaccacctgatctccctcgcgagagcggagctcaagaggtcagcggtcgccgataatatgtctggcaagagcacgctcagtgaggtccgcaccagctccggcaccttcctcaggaagggccaggatcctattgttgagggtatagaggacaaaattgctgcatggacattccttccaaaagagaatggtgaagatatccaagtcctaagatataagcatggggagaagtatgaaccacactatgattacttcactgacaatgttaacactgtccgtggtggtcatcgctacgctactgttcttttgtacttaactgatgtaccagaaggaggggaaacggttttccccttggctgaggagcccgatgatgctaaagatgcaaccttgtcagaatgtgctcagaaaggcattgcagtgagaccacggaaaggtgacgccctccttttcttcaaccttaacccagacggcaccaccgactcggtgagcctccatggtggttgcccggtcataaaaggcgagaaatggtcggctacgaagtggatccgtgtggcctcgttcgataaggtccatcacccacagggcaactgcaccgacgagaacgagagctgcgcgaaatgggcggccctaggggagtgcataaagaacccagagtacatggtgggaaccacagcgttgcctggttactgtcggaggagctgcaatgtgtgctagggtcaggacgtgagagtactagtatttgttagtgcataccacttgtatccatagtctgttgttggtctcctacatctcgcataaaagaaatactcctatgctataggttatgccgatggaggtgcatttagaataagcctagtatttgatctattgatttattagattgcttggttctgctagctcataatttgtaccggaaccttagaagatctttgattcgttgtcatctgtaacattttctcgatatatatatggtgtgcatttctgggc

SEQ ID NO: 2502 - protein, 308 aa, Zea mays subsp. mays
  peptide (1)..(308): Ceres Seq. ID no. 12414262
  misc_feature (134)..(255): Pfam Name: 2OG-Fe(II) oxygenase superfamily Pfam Description: 2OG-Fe(II) oxygenase superfamily
  misc_feature (33)..(308): Homolog of NCBI NO: 29150368 NR Description: putative oxidoreductase [Oryza sativa (japonica
  misc_feature (10)..(113): Homolog of NCBI NO: 37534316 NR Description: unknown protein [Oryza sativa (japonica
  misc_feature (114)..(308): Homolog of NCBI NO: 37534316 NR Description: unknown protein [Oryza sativa (japonica
  misc_feature (29)..(308): Homolog of NCBI NO: 34393269 NR Description: prolyl 4-hydroxylase alpha-1 subunit
  misc_feature (209)..(308): Homolog of NCBI NO: 6437556 NR Description: unknown protein [Arabidopsis thaliana]
  misc_feature (42)..(191): Homolog of NCBI NO: 6437556 NR Description: unknown protein [Arabidopsis thaliana]
  misc_feature (42)..(308): Homolog of NCBI NO: 21618073 NR Description: prolyl 4-hydroxylase alpha subunit-like protein
  misc_feature (42)..(308): Homolog of NCBI NO: 18397528 NR Description: expressed protein
  misc_feature (35)..(308): Homolog of NCBI NO: 15239594 NR Description: putative protein
  misc_feature (35)..(308): Homolog of NCBI NO: 20260280 NR Description: unknown protein [Arabidopsis thaliana]
MKSYPWAGARPLAVVQLLLFLAHLVDRGGAAGGGSKGSSVYPAAVVYPHHSRQISCKPRVFLYQHFLSDDEANHLISLARAELKRSAVADNMSGKSTLSEVRTSSGTFLRKGQDPIVEGIEDKIAAWTFLPKENGEDIQVLRYKHGEKYEPHYDYFTDNVNTVRGGHRYATVLLYLTDVPEGGETVFPLAEEPDDAKDATLSECAQKGIAVRPRKGDALLFFNLNPDGTTDSVSLHGGCPVIKGEKWSATKWIRVASFDKVHHPQGNCTDENESCAKWAALGECIKNPEYMVGTTALPGYCRRSCNVC

SEQ ID NO: 2503 - protein, 217 aa, Zea mays subsp. mays
  peptide (1)..(217): Ceres Seq. ID no. 12414263
  misc_feature (43)..(164): Pfam Name: 2OG-Fe(II) oxygenase superfamily Pfam Description: 2OG-Fe(II) oxygenase superfamily
  misc_feature (1)..(217): Homolog of NCBI NO: 29150368 NR Description: putative oxidoreductase [Oryza sativa (japonica
  misc_feature (1)..(22): Homolog of NCBI NO: 37534316 NR Description: unknown protein [Oryza sativa (japonica
  misc_feature (23)..(217): Homolog of NCBI NO: 37534316 NR Description: unknown protein [Oryza sativa (japonica
  misc_feature (1)..(217): Homolog of NCBI NO: 34393269 NR Description: prolyl 4-hydroxylase alpha-1 subunit
  misc_feature (118)..(217): Homolog of NCBI NO: 6437556 NR Description: unknown protein [Arabidopsis thaliana]
  misc_feature (1)..(100): Homolog of NCBI NO: 6437556 NR Description: unknown protein [Arabidopsis thaliana]
  misc_feature (1)..(217): Homolog of NCBI NO: 21618073 NR Description: prolyl 4-hydroxylase alpha subunit-like protein
  misc_feature (1)..(217): Homolog of NCBI NO: 18397528 NR Description: expressed protein
  misc_feature (1)..(217): Homolog of NCBI NO: 15239594 NR Description: putative protein
  misc_feature (1)..(217): Homolog of NCBI NO: 20260280 NR Description: unknown protein [Arabidopsis thaliana]
MSGKSTLSEVRTSSGTFLRKGQDPIVEGIEDKIAAWTFLPKENGEDIQVLRYKHGEKYEPHYDYFTDNVNTVRGGHRYATVLLYLTDVPEGGETVFPLAEEPDDAKDATLSECAQKGIAVRPRKGDALLFFNLNPDGTTDSVSLHGGCPVIKGEKWSATKWIRVASFDKVHHPQGNCTDENESCAKWAALGECIKNPEYMVGTTALPGYCRRSCNVC

SEQ ID NO: 2504 - DNA, 1522 bp, Zea mays subsp. mays
  misc_feature (1)..(1522): Ceres Seq. ID no. 12410682
  misc_feature: MA Experiment ID: 108522 Result: Up-regulated in Transcription
  misc_feature: MA Experiment 108522 PARAMETER Experiment Name: Zm_42deg_Heat_P Parameter: Age (day) Value: 8
  misc_feature: MA Experiment 108522 PARAMETER Experiment Name: Zm_42deg_Heat_P Parameter: Organism Value: Zea mays
  misc_feature: MA Experiment 108522 PARAMETER Experiment Name: Zm_42deg_Heat_P Parameter: Plant Line Value: 35A19
  misc_feature: MA Experiment 108522 PARAMETER Experiment Name: Zm_42deg_Heat_P Parameter: Temperature (deg C) Value: 42 vs. 22
  misc_feature: MA Experiment 108522 PARAMETER Experiment Name: Zm_42deg_Heat_P Parameter: Timepoint (hr) Value: 1
  misc_feature: MA Experiment 108522 PARAMETER Experiment Name: Zm_42deg_Heat_P Parameter: Tissue Value: Aerial
  misc_feature: MA Experiment ID: 108556 Result: Up-regulated in Transcription
  misc_feature: MA Experiment 108556 PARAMETER Experiment Name: Zm_Drought_P Parameter: Age (day) Value: 9
  misc_feature: MA Experiment 108556 PARAMETER Experiment Name: Zm_Drought_P Parameter: Organism Value: Zea mays
  misc_feature: MA Experiment 108556 PARAMETER Experiment Name: Zm_Drought_P Parameter: Plant Line Value: 35A19
  misc_feature: MA Experiment 108556 PARAMETER Experiment Name: Zm_Drought_P Parameter: Timepoint (hr) Value: 24
  misc_feature: MA Experiment 108556 PARAMETER Experiment Name: Zm_Drought_P Parameter: Tissue Value: Aerial
  misc_feature: MA Experiment 108556 PARAMETER Experiment Name: Zm_Drought_P Parameter: Treatment Value: Drought vs. No Drought
  misc_feature: MA Experiment ID: 108689 Result: Up-regulated in Transcription
  misc_feature: MA Experiment 108689 PARAMETER Experiment Name: Zm_Drought_Roots_P Parameter: Age (day) Value: 9
  misc_feature: MA Experiment 108689 PARAMETER Experiment Name: Zm_Drought_Roots_P Parameter: Organism Value: Zea mays
  misc_feature: MA Experiment 108689 PARAMETER Experiment Name: Zm_Drought_Roots_P Parameter: Plant Line Value: 35A19
  misc_feature: MA Experiment 108689 PARAMETER Experiment Name: Zm_Drought_Roots_P Parameter: Timepoint (hr) Value: 24
  misc_feature: MA Experiment 108689 PARAMETER Experiment Name: Zm_Drought_Roots_P Parameter: Tissue Value: Roots
  misc_feature: MA Experiment 108689 PARAMETER Experiment Name: Zm_Drought_Roots_P Parameter: Treatment Value: Drought vs. No Drought
  misc_feature: MA Experiment ID: 20000480 Result: Up-regulated in Transcription
  misc_feature: MA Experiment 20000480 PARAMETER Experiment Name: Zm_Drought_P Parameter: Age (day) Value: 11
  misc_feature: MA Experiment 20000480 PARAMETER Experiment Name: Zm_Drought_P Parameter: Organism Value: Zea mays
  misc_feature: MA Experiment 20000480 PARAMETER Experiment Name: Zm_Drought_P Parameter: Plant Line Value: 35A19
  misc_feature: MA Experiment 20000480 PARAMETER Experiment Name: Zm_Drought_P Parameter: Timepoint (hr) Value: 72
  misc_feature: MA Experiment 20000480 PARAMETER Experiment Name: Zm_Drought_P Parameter: Tissue Value: Aerial
  misc_feature: MA Experiment 20000480 PARAMETER Experiment Name: Zm_Drought_P Parameter: Treatment Value: Drought vs. No Drought
ctgggcctttaggtttttctgcgtatgtgttggacgcacgccaccctcctctctcctctacggctcagccggccgccgccctcctctctcggtctctcctctcctccaacggctcagccggcgccaccgccctcctccctcctatcctccaacatctccggcgcgtctctcctcagccgcggaggcaaagccggccgccggccgtggaggcacagcagacctgcgccaccgctggccgcctaccccacagcagatctgcactcaagaccagcagccagccagccatcctctgcggctccactctgccagcgcccaagaccagcgctagcagccagccatcctccacctccactgctctccatttgatcatttgctttggtaattggtcgtatagtccctcatcatcggaatggtggggtcacttatctttcccacacctaatgtggatccgaaggcagagaatcctaatgagatggttacagctggtgtgctttcaagccttcagaatttcctacgcaagtgcctcatagctatcctctcatatggcccaatgccgaagcacattgcatttattatggatggcaatcgtcgatatgctaaattcagaagcatgcaagaaggagctggtcacaggatgggtttctctacccttattgcaagtctaatgtactgctatgaaatgggtgtgaagtacatcactgtctacgcattcagcatcgacaattttaaaagggacccaagtgaggtggaatccttgatgcagttaatggaggaaaaaatcaacgaactcttagagaaccgaagtgtaatcaacaagattaactgtaagatcaacttttggggtaacttggacttgttatatgagccggtgcggttggcggctgagaagctgatggcgagcacagctgggaacacagggctggtcttttctatctgcatgccatacaactcgacttctgagattgtcaatgctgtcagtgaagtctgtgcggaaaggatggaaatgtttcagagtgaacatattggcgactgcaatggtcatgctgcaaataacggtgtgcgttcagagatttcagtggcggatttggatcgccacatgtatagtgccggatgcccagatcctgatatcgtcatccggacttcgggcgagactcgattgagcaatttcctcctttggcagacaacgtttagtcacttgcagaatccagatcctctgtggcccgagttctcttttaggcaccttgtttgggctatcttgcagtatcagagagtttaccctgctctggagcataacagaaagttggctaagaagcagttgtgattccatgttacttgcaaggaggtatcatgaagggctattaacatcaaacttttccttctcaatttcctggtaatggtaaatgcaaagaagaacatactagcatataacattatgaatagatcaccatgtaacttaagtgtgattgctaccgtaaccatgtaacttatttgagctcgtacaaatgctgtgattcctatatat

SEQ ID NO: 2505 - protein, 303 aa, Zea mays subsp. mays
  peptide (1)..(303): Ceres Seq. ID no. 12410683
  misc_feature (55)..(293): Pfam Name: Putative undecaprenyl diphosphate synthase Pfam Description: Putative undecaprenyl diphosphate synthase
  misc_feature (27)..(300): Homolog of NCBI NO: 18148934 NR Description: cis-prenyltransferase [Hevea brasiliensis]
  misc_feature (27)..(300): Homolog of NCBI NO: 22213585 NR Description: cis-prenyltransferase 1 [Hevea brasiliensis]
  misc_feature (27)..(300): Homolog of NCBI NO: 16751459 NR Description: cis-prenyltransferase [Hevea brasiliensis]
  misc_feature (27)..(300): Homolog of NCBI NO: 22213587 NR Description: cis-prenyltransferase 2 [Hevea brasiliensis]
  misc_feature (27)..(300): Homolog of NCBI NO: 16751461 NR Description: cis-prenyltransferase [Hevea brasiliensis]
  misc_feature (46)..(297): Homolog of NCBI NO: 25314045 NR Description: hypothetical protein At2g17570 [imported] -
  misc_feature (27)..(297): Homolog of NCBI NO: 20336659 NR Description: hypothetical protein [Arabidopsis thaliana]
  misc_feature (27)..(297): Homolog of NCBI NO: 18398467 NR Description: undecaprenyl pyrophosphate synthetase (UPP
  misc_feature (27)..(297): Homolog of NCBI NO: 23491567 NR Description: cis-prenyltransferase [Periploca sepium]
  misc_feature (1)..(303): Homolog of NCBI NO: 34898408 NR Description: ESTs C72761(E2193),AU056875(S20945), correspond to a region of the predicted gene.~Similar to Thermus gene for homocitrate synthase, homoaconitate hydratase, and
MVGSLIFPTPNVDPKAENPNEMVTAGVLSSLQNFLRKCLIAILSYGPMPKHIAFIMDGNRRYAKFRSMQEGAGHRMGFSTLIASLMYCYEMGVKYITVYAFSIDNFKRDPSEVESLMQLMEEKINELLENRSVINKINCKINFWGNLDLLYEPVRLAAEKLMASTAGNTGLVFSICMPYNSTSEIVNAVSEVCAERMEMFQSEHIGDCNGHAANNGVRSEISVADLDRHMYSAGCPDPDIVIRTSGETRLSNFLLWQTTFSHLQNPDPLWPEFSFRHLVWAILQYQRVYPALEHNRKLAKKQL

SEQ ID NO: 2506 - protein, 282 aa, Zea mays subsp. mays
  peptide (1)..(282): Ceres Seq. ID no. 12410684
  misc_feature (34)..(272): Pfam Name: Putative undecaprenyl diphosphate synthase Pfam Description: Putative undecaprenyl diphosphate synthase
  misc_feature (6)..(279): Homolog of NCBI NO: 16751459 NR Description: cis-prenyltransferase [Hevea brasiliensis]
  misc_feature (6)..(279): Homolog of NCBI NO: 22213587 NR Description: cis-prenyltransferase 2 [Hevea brasiliensis]
  misc_feature (6)..(279): Homolog of NCBI NO: 16751461 NR Description: cis-prenyltransferase [Hevea brasiliensis]
  misc_feature (25)..(276): Homolog of NCBI NO: 25314045 NR Description: hypothetical protein At2g17570 [imported] -
  misc_feature (6)..(279): Homolog of NCBI NO: 18148934 NR Description: cis-prenyltransferase [Hevea brasiliensis]
  misc_feature (6)..(279): Homolog of NCBI NO: 22213585 NR Description: cis-prenyltransferase 1 [Hevea brasiliensis]
  misc_feature (6)..(276): Homolog of NCBI NO: 20336659 NR Description: hypothetical protein [Arabidopsis thaliana]
  misc_feature (6)..(276): Homolog of NCBI NO: 18398467 NR Description: undecaprenyl pyrophosphate synthetase (UPP
  misc_feature (6)..(276): Homolog of NCBI NO: 23491567 NR Description: cis-prenyltransferase [Periploca sepium]
  misc_feature (1)..(282): Homolog of NCBI NO: 34898408 NR Description: ESTs C72761(E2193),AU056875(S20945), correspond to a region of the predicted gene.~Similar to Thermus gene for homocitrate synthase, homoaconitate hydratase, and
MVTAGVLSSLQNFLRKCLIAILSYGPMPKHIAFIMDGNRRYAKFRSMQEGAGHRMGFSTLIASLMYCYEMGVKYITVYAFSIDNFKRDPSEVESLMQLMEEKINELLENRSVINKINCKINFWGNLDLLYEPVRLAAEKLMASTAGNTGLVFSICMPYNSTSEIVNAVSEVCAERMEMFQSEHIGDCNGHAANNGVRSEISVADLDRHMYSAGCPDPDIVIRTSGETRLSNFLLWQTTFSHLQNPDPLWPEFSFRHLVWAILQYQRVYPALEHNRKLAKKQL

SEQ ID NO: 2507 - protein, 256 aa, Zea mays subsp. mays
  peptide (1)..(256): Ceres Seq. ID no. 12410685
  misc_feature (8)..(246): Pfam Name: Putative undecaprenyl diphosphate synthase Pfam Description: Putative undecaprenyl diphosphate synthase
  misc_feature (1)..(253): Homolog of NCBI NO: 18148934 NR Description: cis-prenyltransferase [Hevea brasiliensis]
  misc_feature (1)..(253): Homolog of NCBI NO: 22213585 NR Description: cis-prenyltransferase 1 [Hevea brasiliensis]
  misc_feature (1)..(253): Homolog of NCBI NO: 16751459 NR Description: cis-prenyltransferase [Hevea brasiliensis]
  misc_feature (1)..(253): Homolog of NCBI NO: 22213587 NR Description: cis-prenyltransferase 2 [Hevea brasiliensis]
  misc_feature (1)..(253): Homolog of NCBI NO: 16751461 NR Description: cis-prenyltransferase [Hevea brasiliensis]
  misc_feature (1)..(250): Homolog of NCBI NO: 25314045 NR Description: hypothetical protein At2g17570 [imported] -
  misc_feature (1)..(250): Homolog of NCBI NO: 20336659 NR Description: hypothetical protein [Arabidopsis thaliana]
  misc_feature (1)..(250): Homolog of NCBI NO: 18398467 NR Description: undecaprenyl pyrophosphate synthetase (UPP
  misc_feature (1)..(250): Homolog of NCBI NO: 23491567 NR Description: cis-prenyltransferase [Periploca sepium]
  misc_feature (1)..(256): Homolog of NCBI NO: 34898408 NR Description: ESTs C72761(E2193),AU056875(S20945), correspond to a region of the predicted gene.~Similar to Thermus gene for homocitrate synthase, homoaconitate hydratase, and
MPKHIAFIMDGNRRYAKFRSMQEGAGHRMGFSTLIASLMYCYEMGVKYITVYAFSIDNFKRDPSEVESLMQLMEEKINELLENRSVINKINCKINFWGNLDLLYEPVRLAAEKLMASTAGNTGLVFSICMPYNSTSEIVNAVSEVCAERMEMFQSEHIGDCNGHAANNGVRSEISVADLDRHMYSAGCPDPDIVIRTSGETRLSNFLLWQTTFSHLQNPDPLWPEFSFRHLVWAILQYQRVYPALEHNRKLAKKQL

SEQ ID NO: 2508 - DNA, 1823 bp, Zea mays subsp. mays
  misc_feature (1)..(1823): Ceres Seq. ID no. 12344471
  misc_feature: MA Experiment ID: 108515 Result: Up-regulated in Transcription
  misc_feature: MA Experiment 108515 PARAMETER Experiment Name: Zm_2mM_SA_P Parameter: Age (day) Value: 8
  misc_feature: MA Experiment 108515 PARAMETER Experiment Name: Zm_2mM_SA_P Parameter: Organism Value: Zea mays
  misc_feature: MA Experiment 108515 PARAMETER Experiment Name: Zm_2mM_SA_P Parameter: Plant Line Value: 35A19
  misc_feature: MA Experiment 108515 PARAMETER Experiment Name: Zm_2mM_SA_P Parameter: Timepoint (hr) Value: 12
  misc_feature: MA Experiment 108515 PARAMETER Experiment Name: Zm_2mM_SA_P Parameter: Tissue Value: Aerial
  misc_feature: MA Experiment 108515 PARAMETER Experiment Name: Zm_2mM_SA_P Parameter: Treatment Value: 2mM SA vs. No Treatment
  misc_feature: MA Experiment ID: 108526 Result: Up-regulated in Transcription
  misc_feature: MA Experiment 108526 PARAMETER Experiment Name: Zm_5mM_NO_P Parameter: Age (day) Value: 8
  misc_feature: MA Experiment 108526 PARAMETER Experiment Name: Zm_5mM_NO_P Parameter: Organism Value: Zea mays
  misc_feature: MA Experiment 108526 PARAMETER Experiment Name: Zm_5mM_NO_P Parameter: Plant Line Value: 35A19
  misc_feature: MA Experiment 108526 PARAMETER Experiment Name: Zm_5mM_NO_P Parameter: Timepoint (hr) Value: 1
  misc_feature: MA Experiment 108526 PARAMETER Experiment Name: Zm_5mM_NO_P Parameter: Tissue Value: Aerial
  misc_feature: MA Experiment 108526 PARAMETER Experiment Name: Zm_5mM_NO_P Parameter: Treatment Value: 5mM NO vs. No Treatment
  misc_feature: MA Experiment ID: 108527 Result: Up-regulated in Transcription
  misc_feature: MA Experiment 108527 PARAMETER Experiment Name: Zm_5mM_NO_P Parameter: Age (day) Value: 8
  misc_feature: MA Experiment 108527 PARAMETER Experiment Name: Zm_5mM_NO_P Parameter: Organism Value: Zea mays
  misc_feature: MA Experiment 108527 PARAMETER Experiment Name: Zm_5mM_NO_P Parameter: Plant Line Value: 35A19
  misc_feature: MA Experiment 108527 PARAMETER Experiment Name: Zm_5mM_NO_P Parameter: Timepoint (hr) Value: 6
  misc_feature: MA Experiment 108527 PARAMETER Experiment Name: Zm_5mM_NO_P Parameter: Tissue Value: Aerial
  misc_feature: MA Experiment 108527 PARAMETER Experiment Name: Zm_5mM_NO_P Parameter: Treatment Value: 5mM NO vs. No Treatment
  misc_feature: MA Experiment ID: 108543 Result: Down-regulated in Transcription
atcctttttatatcttgcctttcccctcccgttccgttcccgtctcgctctcgcatcggccaacaacgcttcacggcaaaatccttccacaggcgggggagtcgcctcacctcacttcaccccgttcatccccagcgaagaaggtaactaccgccatctcccggtaatgatcctcggtatcttccggccagaaaagatttgttttcggtacggatagggtttctgatcaagtgcgcgcgagcccaggagctaagaagaatcccagttctttgttcgccgactcgagtttgacattatgcaaaatacttagcacaccagtgatggcggctacttaccaaactggccttgtggccgagccacagttgctgaacactgaaattatcactcggagggccaccaactctgttgctgacactaacagaaaagacaaatgcgtcggctacttggatgtgtttgtacaccaagcacgcgacatccacaatgtttgtatctatcacaagcaggatgtgtatgcaaagctgtgcctcacgagcagccctgatgtttcgtgctcaaccaaggtgatcaacagtgctgggcgcaacccagtatttgaggaaagcctacgccttgatgtgcaaactgtggatgcttctctcaagtgcgagatatggatgttaagcagagtgaggaactacctggaggatcagctccttggctttgcccttgttcctctggtagacattgtaattggtaatggaaagctggtccaggagttctccttgacatctactgacctattccacacaccagctggatttgtgcacttgtccttgtcatatgctggttgttccccagatgttgtcctcatctcatcacccaataagtccccatcaacagtggatgattctggaaatgatcatgtggttcctgctcagcttgagaagattgtgttcccagacctaaatgtggagaaggaagacgagattatggtctcaaagtatctcgagatgacttcagactctgaaacccctataaaagttgagaacgtcatgtcactgcattctgcaaatgatgatgatgttccttctaaacttgaaaagatcaagttcatagattctgagagccgtgcgaaagctgaaaatggcaagatgctactatttggtgtagctgtgcctagtactgcaatttgtgcagataaggttgaggaacaccgcgatgaaagccctctaagttgtgtctcaaccacaggctcctccactaccctttctgcaacaacacaatcagtttctgagccttcggagaccagtgtcgaggcatcccctacaatgccatagggagaaaagccaagatgttacaggtggtgaggctaattcttctgaaacaccagcaaaggatgaagttatcaagcctgtgatctgcgttaaccttcagccagagcagtcagttgtccaacaggacatagttgacatgtacatgaagagcatgcaacagttcacagaatctcttgcaaaaatgaaacttccattggacgttgagaatactagtccctcaaacgatgattcatactccagtacaattgagaagacatccccatccccatcttcatctgcagcaaagggttctagggtcttttatggaagcagggccttcttttaagtttctaatgcaaagtagtacactagctcgttactatctcctacatacatatacatggttccaggtttatcagatatcttctggcatgtaatcacatactttctgtctccataatatgcttctaggactcactcctggtattgctattagtgttatgctttgttagaagataataatttcatctc

SEQ ID NO: 2509 - protein, 331 aa, Zea mays subsp. mays
  peptide (1)..(331): Ceres Seq. ID no. 12344472
  misc_feature (42)..(129): Pfam Name: C2 domain Pfam Description: C2 domain
  misc_feature (31)..(222): Homolog of NCBI NO: 34906644 NR Description: P0431G06.18 [Oryza sativa (japonica
  misc_feature (40)..(221): Homolog of NCBI NO: 18416832 NR Description: putative protein; protein id: At5g12300.1
  misc_feature (39)..(323): Homolog of NCBI NO: 34901084 NR Description: contains ESTs
  misc_feature (26)..(264): Homolog of NCBI NO: 21593485 NR Description: unknown [Arabidopsis thaliana]
  misc_feature (26)..(264): Homolog of NCBI NO: 18403117 NR Description: Expressed protein
  misc_feature (1)..(264): Homolog of NCBI NO: 25405379 NR Description: unknown protein [imported] - Arabidopsis thaliana
  misc_feature (34)..(325): Homolog of NCBI NO: 28393796 NR Description: unknown protein [Arabidopsis thaliana]
  misc_feature (34)..(325): Homolog of NCBI NO: 30696612 NR Description: C2 domain-containing protein [Arabidopsis
  misc_feature (34)..(325): Homolog of NCBI NO: 9758185 NR Description: gene_id:MTE17.25~pir||T07080~similar to unknown
  misc_feature (3)..(331): Homolog of NCBI NO: 24414275 NR Description: Unknown protein [Oryza sativa (japonica
MAATYQTGLVAEPQLLNTEIITRRATNSVADTNRKDKCVGYLDVFVHQARDIHNVCIYHKQDVYAKLCLTSSPDVSCSTKVINSAGRNPVFEESLRLDVQTVDASLKCEIWMLSRVRNYLEDQLLGFALVPLVDIVIGNGKLVQEFSLTSTDLFHTPAGFVHLSLSYAGCSPDVVLISSPNKSPSTVDDSGNDHVVPAQLEKIVFPDLNVEKEDEIMVSKYLEMTSDSETPIKVENVMSLHSANDDDVPSKLEKIKFIDSESRAKAENGKMLLFGVAVPSTAICADKVEEHRDESPLSCVSTTGSSTTLSATTQSVSEPSETSVEASPTMP

SEQ ID NO: 2510 - protein, 220 aa, Zea mays subsp. mays
  peptide (1)..(220): Ceres Seq. ID no. 12344473
  misc_feature (1)..(111): Homolog of NCBI NO: 34906644 NR Description: P0431G06.18 [Oryza sativa (japonica
  misc_feature (1)..(110): Homolog of NCBI NO: 18416832 NR Description: putative protein; protein id: At5g12300.1
  misc_feature (1)..(212): Homolog of NCBI NO: 34901084 NR Description: contains ESTs
  misc_feature (1)..(153): Homolog of NCBI NO: 21593485 NR Description: unknown [Arabidopsis thaliana]
  misc_feature (1)..(153): Homolog of NCBI NO: 18403117 NR Description: Expressed protein
  misc_feature (1)..(153): Homolog of NCBI NO: 25405379 NR Description: unknown protein [imported] - Arabidopsis thaliana
  misc_feature (1)..(214): Homolog of NCBI NO: 28393796 NR Description: unknown protein [Arabidopsis thaliana]
  misc_feature (1)..(214): Homolog of NCBI NO: 30696612 NR Description: C2 domain-containing protein [Arabidopsis
  misc_feature (1)..(214): Homolog of NCBI NO: 9758185 NR Description: gene_id:MTE17.25~pir||T07080~similar to unknown
  misc_feature (1)..(220): Homolog of NCBI NO: 24414275 NR Description: Unknown protein [Oryza sativa (japonica
MLSRVRNYLEDQLLGFALVPLVDIVIGNGKLVQEFSLTSTDLFHTPAGFVHLSLSYAGCSPDVVLISSPNKSPSTVDDSGNDHVVPAQLEKIVFPDLNVEKEDEIMVSKYLEMTSDSETPIKVENVMSLHSANDDDVPSKLEKIKFIDSESRAKAENGKMLLFGVAVPSTAICADKVEEHRDESPLSCVSTTGSSTTLSATTQSVSEPSETSVEASPTMP

SEQ ID NO: 2511 - DNA, 1549 bp, Zea mays subsp. mays
  misc_feature (1)..(1549): Ceres Seq. ID no. 12352684
  misc_feature: MA Experiment ID: 108527 Result: Up-regulated in Transcription
  misc_feature: MA Experiment 108527 PARAMETER Experiment Name: Zm_5mM_NO_P Parameter: Age (day) Value: 8
  misc_feature: MA Experiment 108527 PARAMETER Experiment Name: Zm_5mM_NO_P Parameter: Organism Value: Zea mays
  misc_feature: MA Experiment 108527 PARAMETER Experiment Name: Zm_5mM_NO_P Parameter: Plant Line Value: 35A19
  misc_feature: MA Experiment 108527 PARAMETER Experiment Name: Zm_5mM_NO_P Parameter: Timepoint (hr) Value: 6
  misc_feature: MA Experiment 108527 PARAMETER Experiment Name: Zm_5mM_NO_P Parameter: Tissue Value: Aerial
  misc_feature: MA Experiment 108527 PARAMETER Experiment Name: Zm_5mM_NO_P Parameter: Treatment Value: 5mM NO vs. No Treatment
  misc_feature: MA Experiment ID: 108544 Result: Up-regulated in Transcription
  misc_feature: MA Experiment ID: 108556 Result: Up-regulated in Transcription
  misc_feature: MA Experiment 108556 PARAMETER Experiment Name: Zm_Drought_P Parameter: Age (day) Value: 9
  misc_feature: MA Experiment 108556 PARAMETER Experiment Name: Zm_Drought_P Parameter: Organism Value: Zea mays
  misc_feature: MA Experiment 108556 PARAMETER Experiment Name: Zm_Drought_P Parameter: Plant Line Value: 35A19
  misc_feature: MA Experiment 108556 PARAMETER Experiment Name: Zm_Drought_P Parameter: Timepoint (hr) Value: 24
  misc_feature: MA Experiment 108556 PARAMETER Experiment Name: Zm_Drought_P Parameter: Tissue Value: Aerial
  misc_feature: MA Experiment 108556 PARAMETER Experiment Name: Zm_Drought_P Parameter: Treatment Value: Drought vs. No Drought
  misc_feature: MA Experiment ID: 20000477 Result: Up-regulated in Transcription
  misc_feature: MA Experiment 20000477 PARAMETER Experiment Name: Zm_5mM_SA_P Parameter: Age (day) Value: 10
  misc_feature: MA Experiment 20000477 PARAMETER Experiment Name: Zm_5mM_SA_P Parameter: Organism Value: Zea mays
  misc_feature: MA Experiment 20000477 PARAMETER Experiment Name: Zm_5mM_SA_P Parameter: Plant Line Value: 35A19
  misc_feature: MA Experiment 20000477 PARAMETER Experiment Name: Zm_5mM_SA_P Parameter: Timepoint (hr) Value: 48
  misc_feature: MA Experiment 20000477 PARAMETER Experiment Name: Zm_5mM_SA_P Parameter: Tissue Value: Aerial
  misc_feature: MA Experiment 20000477 PARAMETER Experiment Name: Zm_5mM_SA_P Parameter: Treatment Value: 5mM SA vs. No Treatment
  misc_feature: MA Experiment ID: 20000478 Result: Up-regulated in Transcription
  misc_feature: MA Experiment 20000478 PARAMETER Experiment Name: Zm_5mM_SA_P Parameter: Age (day) Value: 11
  misc_feature: MA Experiment 20000478 PARAMETER Experiment Name: Zm_5mM_SA_P Parameter: Organism Value: Zea mays
  misc_feature: MA Experiment 20000478 PARAMETER Experiment Name: Zm_5mM_SA_P Parameter: Plant Line Value: 35A19
  misc_feature: MA Experiment 20000478 PARAMETER Experiment Name: Zm_5mM_SA_P Parameter: Timepoint (hr) Value: 72
  misc_feature: MA Experiment 20000478 PARAMETER Experiment Name: Zm_5mM_SA_P Parameter: Tissue Value: Aerial
  misc_feature: MA Experiment 20000478 PARAMETER Experiment Name: Zm_5mM_SA_P Parameter: Treatment Value: 5mM SA vs. No Treatment
  misc_feature: MA Experiment ID: 20000479 Result: Up-regulated in Transcription
  misc_feature: MA Experiment 20000479 PARAMETER Experiment Name: Zm_Drought_P Parameter: Age (day) Value: 10
  misc_feature: MA Experiment 20000479 PARAMETER Experiment Name: Zm_Drought_P Parameter: Organism Value: Zea mays
  misc_feature: MA Experiment 20000479 PARAMETER Experiment Name: Zm_Drought_P Parameter: Plant Line Value: 35A19
  misc_feature: MA Experiment 20000479 PARAMETER Experiment Name: Zm_Drought_P Parameter: Timepoint (hr) Value: 48
  misc_feature: MA Experiment 20000479 PARAMETER Experiment Name: Zm_Drought_P Parameter: Tissue Value: Aerial
  misc_feature: MA Experiment 20000479 PARAMETER Experiment Name: Zm_Drought_P Parameter: Treatment Value: Drought vs. No Drought
  misc_feature: MA Experiment ID: 20000480 Result: Up-regulated in Transcription
  misc_feature: MA Experiment 20000480 PARAMETER Experiment Name: Zm_Drought_P Parameter: Age (day) Value: 11
  misc_feature: MA Experiment 20000480 PARAMETER Experiment Name: Zm_Drought_P Parameter: Organism Value: Zea mays
  misc_feature: MA Experiment 20000480 PARAMETER Experiment Name: Zm_Drought_P Parameter: Plant Line Value: 35A19
  misc_feature: MA Experiment 20000480 PARAMETER Experiment Name: Zm_Drought_P Parameter: Timepoint (hr) Value: 72
  misc_feature: MA Experiment 20000480 PARAMETER Experiment Name: Zm_Drought_P Parameter: Tissue Value: Aerial
  misc_feature: MA Experiment 20000480 PARAMETER Experiment Name: Zm_Drought_P Parameter: Treatment Value: Drought vs. No Drought
tcaaaaaaaaaggaaaataaaaaaaaaatcgtagagagttcgattggcagttgctgagcccgagcgcgccctccggcgccgacaagccgggaccccacctccgccggcggcgatgggcaactcgcaggcttcgccggcgtccgcctccagctcccgcttcgtcatggcctcgagggccttcccgaaggcaggagctggacggcctccgcgagctattcgcctccctcgcagcgcagtcgcggaccggcggccgcgccatctcacgccccgtcttcctcgaatactatcaggtccgggggcgattaggagacaggctgttccagcttgtggcgaaggagagtggcgggagcgatggggtcacgttcgaggatttgatcatctccaaagcaacatatggaaggggaactcgtgatgaggtcgatgaattcatttatcaactatgtgatgtcacaggagatggcgccttaacaaggtctgatttggaatcagtcttggcgtctgttcatgaaactgtatttgcaataaagaaggaagttgtcgaagtttccaacaatagaccattcgaagaattcctcaactctgcagtgttttcaaaggatgttgaaggggtctcagggaagtctatgtcattgtcagactttaggaactggtgcactctcttgccatcattgaggaatttcttggaaatttgttgatgccccctgattcaggtagaccaggatttgaagtaccactgcttcatcatcctgaaaacatctgcactgatacgctgcttctaaacaaagagtatgcctggcatattggaggaggtttctcccaacatgaggtgcaagagtggaagcttttatatcatagttctcttcatggacaaagcttcaacactttcttgggcaaagtaacgaatggagatgctcagactgttctgattgttaaagatacagaaggatcaatttatggtggatatgcttcacagccttgggaaaggcacagtgatttttatggtgacatgaagacattcctcttcaaatgctatcctcaagcatccatttttcgtcctactggagcaaacaagaatttgcaatggtgtgctgtaaacttcagctctgagaacatacccaatggtattggatttggagggcagccacatcatttcggactctttttatcagcaaattttgaccaagggcactcatttacgtgtagcacatttaccagccctcccctttccaagacaaataggttcaggccagaagttattgaatgttggggtatacaaatgagaggagcacaagatgaaaaactggagttagtcaaggggacagtcctcgagagattcaaggaggaccggaacatgctgaagatggttggtttggcaaatgcaagtgattaagtgatagaggatcacaatgatgtacatgatggagagtctgtacagcacatgttcataaaaataatcaaatctgagaccatgtttctatattctactgttcatattttgtcactcaaaatattcatttgatccacactttgtaacaattgaccagtcgtt

SEQ ID NO: 2512 - protein, 231 aa, Zea mays subsp. mays
  peptide (1)..(231): Ceres Seq. ID no. 12352685
  misc_feature (48)..(191): Homolog of NCBI NO: 21753815 NR Description: unnamed protein product [Homo sapiens]
  misc_feature (48)..(194): Homolog of NCBI NO: 13540302 NR Description: nucleolar protein C7C [Rattus norvegicus]
  misc_feature (48)..(194): Homolog of NCBI NO: 13278166 NR Description: Similar to oxidation resistance 1 [Mus musculus]
  misc_feature (27)..(231): Homolog of NCBI NO: 19920876 NR Description: CG5149-PA [Drosophila melanogaster]
  misc_feature (35)..(231): Homolog of NCBI NO: 10047293 NR Description: KIAA1609 protein [Homo sapiens]
  misc_feature (35)..(231): Homolog of NCBI NO: 23270886 NR Description: Unknown (protein for MGC:25024) [Homo sapiens]
  misc_feature (42)..(231): Homolog of NCBI NO: 28077021 NR Description: RIKEN cDNA 4632415K11 [Mus musculus]
  misc_feature (1)..(71): Homolog of NCBI NO: 17065420 NR Description: Unknown protein [Arabidopsis thaliana]
  misc_feature (1)..(71): Homolog of NCBI NO: 22329148 NR Description: putative protein; protein id: At4g34070.1
  misc_feature (1)..(231): Homolog of NCBI NO: 15239986 NR Description: putative protein
MPPDSGRPGFEVPLLHHPENICTDTLLLNKEYAWHIGGGFSQHEVQEWKLLYHSSLHGQSFNTFLGKVTNGDAQTVLIVKDTEGSIYGGYASQPWERHSDFYGDMKTFLFKCYPQASIFRPTGANKNLQWCAVNFSSENIPNGIGFGGQPHHFGLFLSANFDQGHSFTCSTFTSPPLSKTNRFRPEVIECWGIQMRGAQDEKLELVKGTVLERFKEDRNMLKMVGLANASD

SEQ ID NO: 2513 - protein, 127 aa, Zea mays subsp. mays
  peptide (1)..(127): Ceres Seq. ID no. 12352686
  misc_feature (1)..(87): Homolog of NCBI NO: 24644181 NR Description: CG32464-PI [Drosophila melanogaster]
  misc_feature (1)..(87): Homolog of NCBI NO: 26329173 NR Description: unnamed protein product [Mus musculus]
  misc_feature (1)..(87): Homolog of NCBI NO: 21753815 NR Description: unnamed protein product [Homo sapiens]
  misc_feature (1)..(90): Homolog of NCBI NO: 13540302 NR Description: nucleolar protein C7C [Rattus norvegicus]
  misc_feature (1)..(90): Homolog of NCBI NO: 13278166 NR Description: Similar to oxidation resistance 1 [Mus musculus]
  misc_feature (1)..(127): Homolog of NCBI NO: 19920876 NR Description: CG5149-PA [Drosophila melanogaster]
  misc_feature (1)..(127): Homolog of NCBI NO: 10047293 NR Description: KIAA1609 protein [Homo sapiens]
  misc_feature (1)..(127): Homolog of NCBI NO: 23270886 NR Description: Unknown (protein for MGC:25024) [Homo sapiens]
  misc_feature (1)..(127): Homolog of NCBI NO: 28077021 NR Description: RIKEN cDNA 4632415K11 [Mus musculus]
  misc_feature (1)..(127): Homolog of NCBI NO: 15239986 NR Description: putative protein
MKTFLFKCYPQASIFRPTGANKNLQWCAVNFSSENIPNGIGFGGQPHHFGLFLSANFDQGHSFTCSTFTSPPLSKTNRFRPEVIECWGIQMRGAQDEKLELVKGTVLERFKEDRNMLKMVGLANASD

SEQ ID NO: 2514 - DNA, 1305 bp, Zea mays subsp. mays
  misc_feature (1)..(1305): Ceres Seq. ID no. 13498849
  misc_feature: MA Experiment ID: 108687 Result: Down-regulated in Transcription
  misc_feature: MA Experiment 108687 PARAMETER Experiment Name: Zm_Embryos-Flowers__P Parameter: Tissue Value: Embryo vs. Aerial+
  misc_feature: MA Experiment ID: 20000535 Result: Down-regulated in Transcription
  misc_feature: MA Experiment 20000535 PARAMETER Experiment Name: Zm_Hybrid_Seed_Dev_P Parameter: DAP Value: 30 vs. 12
  misc_feature: MA Experiment 20000535 PARAMETER Experiment Name: Zm_Hybrid_Seed_Dev_P Parameter: Organism Value: Zea mays
  misc_feature: MA Experiment 20000535 PARAMETER Experiment Name: Zm_Hybrid_Seed_Dev_P Parameter: Plant Line Value: 35A19
  misc_feature: MA Experiment 20000535 PARAMETER Experiment Name: Zm_Hybrid_Seed_Dev_P Parameter: Tissue Value: Embryo vs. Unfert Floret
  misc_feature: Phenotype: INFLORESCENCE Strength-Weak
  misc_feature: Phenotype: FERTILITY Fertility-Sterile
  misc_feature: Phenotype: FERTILITY Fertility-Sterile
  misc_feature: Phenotype: ROSETTE LEAVES Disorganized Rosette-Disorganized Rosette
  misc_feature: Phenotype: ROSETTE LEAVES Shape-Undulate
  misc_feature: Phenotype: WHOLE PLANT Size-Small
  misc_feature: Phenotype: WHOLE PLANT Other
  misc_feature: Phenotype: ROSETTE LEAVES Disorganized Rosette-Disorganized Rosette
aaaaaaccgccccctcccttcctcttctcctagctctcttgcctgcgcaccactcgagtcgagactcgagaggcacctgatctttccttcccgtcttcctcccacacgtccccatcaccattgctgcgacgagagtgagcgggagagggtaggtggcgaggcggcggagatggggcgggggccggtgcagctgcgccggatcgagaacaagatcaaccgccaggtgaccttctccaagcgccggaacgggctgctgaagaaggcccacgagatctccgtgctctgcgacgcagaggtcgcgctcatcgtcttctccactaaggggaagctctacgagtactctagccattccagcatggaaggcattcttgagcgttaccagcgttactcatttgaagaaagggcagtacttaacccaagtattgaagaccaggcaaattggggagatgaatatgtccggttaaaatccaaacttgatgcacttcagaagagtcaaaggcagctgttaggagaacaattgagttcactgaccataaaagaactccagcaactggagcaacaactggacagttctttgaagcatattaggtcaagaaagaatcagctcatgttcgattcaatttccgcgcttcagaaaaaggagaaagcacttacagatcaaaacggtgtcctgcaaaagttcatggaggcagagaaggagaaaaacaaggctttgatgaacgcgcagctccgggagcagcaaaatggagcatcaacaagctccccatcactttcaccaccaatagttccagattccatgccaactctaaatatagggccatgtcaacatagaggggcagcagaatctgagtctgaaccgtctcctgctcctgcacaagcaaacaggggcaacctgccaccatggatgctccgcactgtcaagtaacaggtgaggtcttcccagtgtagttttgcagctgatctcgacagcaacacacctgtcaccgaaatgcttcggtgaccctagatatcaaccgatgcacgatccatctcgatcctgtgatcgaataccggcgtaggtactaccaataaagtcaggccccgtcaaatgctttacatggtgattgaagtctggagcttctcagcaccaccatatattgtgttcagttcctgtgtttattgccatagctaccctttttttctctgatctacgagctagacgtagctttgtgcttggagattccactactatgtttcctctgtcctgtgtatgctttaacggagatgcacgttgtacccgtggtaatatatataaatttgcgttgt

SEQ ID NO: 2515 - protein, 307 aa, Zea mays subsp. mays
  peptide (1)..(307): Ceres Seq. ID no. 13498850
  misc_feature (131)..(228): Pfam Name: K-box region Pfam Description: K-box region
  misc_feature (62)..(303): Homolog of NCBI NO: 32478105 NR Description: FRUITFULL-like MADS-box [Tradescantia virginiana]
  misc_feature (57)..(304): Homolog of NCBI NO: 1483232 NR Description: MADS5 protein [Betula pendula]
  misc_feature (57)..(303): Homolog of NCBI NO: 6467974 NR Description: MADS box protein DOMADS2 [Dendrobium grex Madame
  misc_feature (57)..(305): Homolog of NCBI NO: 33355661 NR Description: putative Apetala1-like MADS-box transcription
  misc_feature (57)..(251): Homolog of NCBI NO: 28630957 NR Description: MADS3 [Lolium perenne]
  misc_feature (68)..(305): Homolog of NCBI NO: 7677036 NR Description: FDRMADS7 [Oryza sativa]
  misc_feature (57)..(306): Homolog of NCBI NO: 9367307 NR Description: MADS-box protein 3 [Hordeum vulgare subsp.
  misc_feature (57)..(305): Homolog of NCBI NO: 6175371 NR Description: MADS box transcription factor MADS18 [Oryza
  misc_feature (57)..(305): Homolog of NCBI NO: 6006607 NR Description: MADS box protein, MADS28 [Oryza sativa (japonica
  misc_feature (57)..(307): Homolog of NCBI NO: 29372774 NR Description: putative MADS-domain transcription factor [Zea
KNRPLPSSSPSSLACAPLESRLERHLIFPSRLPPTRPHHHCCDESERERVGGEAAEMGRGPVQLRRIENKINRQVTFSKRRNGLLKKAHEISVLCDAEVALIVFSTKGKLYEYSSHSSMEGILERYQRYSFEERAVLNPSIEDQANWGDEYVRLKSKLDALQKSQRQLLGEQLSSLTIKELQQLEQQLDSSLKHIRSRKNQLMFDSISALQKKEKALTDQNGVLQKFMEAEKEKNKALMNAQLREQQNGASTSSPSLSPPIVPDSMPTLNIGPCQHRGAAESESEPSPAPAQANRGNLPPWMLRTVK

SEQ ID NO: 2516 - protein, 251 aa, Zea mays subsp. mays
  peptide (1)..(251): Ceres Seq. ID no. 13498851
  misc_feature (75)..(172): Pfam Name: K-box region Pfam Description: K-box region
  misc_feature (6)..(247): Homolog of NCBI NO: 32478105 NR Description: FRUITFULL-like MADS-box [Tradescantia virginiana]
  misc_feature (1)..(248): Homolog of NCBI NO: 1483232 NR Description: MADS5 protein [Betula pendula]
  misc_feature (1)..(247): Homolog of NCBI NO: 6467974 NR Description: MADS box protein DOMADS2 [Dendrobium grex Madame
  misc_feature (1)..(249): Homolog of NCBI NO: 33355661 NR Description: putative Apetala1-like MADS-box transcription
  misc_feature (1)..(195): Homolog of NCBI NO: 28630957 NR Description: MADS3 [Lolium perenne]
  misc_feature (12)..(249): Homolog of NCBI NO: 7677036 NR Description: FDRMADS7 [Oryza sativa]
  misc_feature (1)..(250): Homolog of NCBI NO: 9367307 NR Description: MADS-box protein 3 [Hordeum vulgare subsp.
  misc_feature (1)..(249): Homolog of NCBI NO: 6175371 NR Description: MADS box transcription factor MADS18 [Oryza
  misc_feature (1)..(249): Homolog of NCBI NO: 6006607 NR Description: MADS box protein, MADS28 [Oryza sativa (japonica
  misc_feature (1)..(251): Homolog of NCBI NO: 29372774 NR Description: putative MADS-domain transcription factor [Zea
MGRGPVQLRRIENKINRQVTFSKRRNGLLKKAHEISVLCDAEVALIVFSTKGKLYEYSSHSSMEGILERYQRYSFEERAVLNPSIEDQANWGDEYVRLKSKLDALQKSQRQLLGEQLSSLTIKELQQLEQQLDSSLKHIRSRKNQLMFDSISALQKKEKALTDQNGVLQKFMEAEKEKNKALMNAQLREQQNGASTSSPSLSPPIVPDSMPTLNIGPCQHRGAAESESEPSPAPAQANRGNLPPWMLRTVK

SEQ ID NO: 2517 - protein, 189 aa, Zea mays subsp. mays
  peptide (1)..(189): Ceres Seq. ID no. 13498852
  misc_feature (13)..(110): Pfam Name: K-box region Pfam Description: K-box region
  misc_feature (1)..(185): Homolog of NCBI NO: 32478105 NR Description: FRUITFULL-like MADS-box [Tradescantia virginiana]
  misc_feature (1)..(186): Homolog of NCBI NO: 1483232 NR Description: MADS5 protein [Betula pendula]
  misc_feature (1)..(185): Homolog of NCBI NO: 6467974 NR Description: MADS box protein DOMADS2 [Dendrobium grex Madame
  misc_feature (1)..(187): Homolog of NCBI NO: 33355661 NR Description: putative Apetala1-like MADS-box transcription
  misc_feature (1)..(133): Homolog of NCBI NO: 28630957 NR Description: MADS3 [Lolium perenne]
  misc_feature (1)..(187): Homolog of NCBI NO: 7677036 NR Description: FDRMADS7 [Oryza sativa]
  misc_feature (1)..(188): Homolog of NCBI NO: 9367307 NR Description: MADS-box protein 3 [Hordeum vulgare subsp.
  misc_feature (1)..(187): Homolog of NCBI NO: 6175371 NR Description: MADS box transcription factor MADS18 [Oryza
  misc_feature (1)..(187): Homolog of NCBI NO: 6006607 NR Description: MADS box protein, MADS28 [Oryza sativa (japonica
  misc_feature (1)..(189): Homolog of NCBI NO: 29372774 NR Description: putative MADS-domain transcription factor [Zea
MEGILERYQRYSFEERAVLNPSIEDQANWGDEYVRLKSKLDALQKSQRQLLGEQLSSLTIKELQQLEQQLDSSLKHIRSRKNQLMFDSISALQKKEKALTDQNGVLQKFMEAEKEKNKALMNAQLREQQNGASTSSPSLSPPIVPDSMPTLNIGPCQHRGAAESESEPSPAPAQANRGNLPPWMLRTVK

SEQ ID NO: 2518 - DNA, 2830 bp, Zea mays subsp. mays
  misc_feature (1)..(2830): Ceres Seq. ID no. 12362942
  misc_feature: MA Experiment ID: 108543 Result: Up-regulated in Transcription
gcacgagaccattacctagaacatcctaatcgaaaaagttcgccaccatcgtgctccgtacacgctccgctccggccatggccgccgccgcggcctccttttcggccctgccgttccttctacttttgctgctggtgccgtcgctcgacggcgcctccaatgtgacgtacgaccaccgctccctcatcatctccggccgccgccgcctcgtcatctccacctccatccactacccccgcagcgtccccgagatgtggcccaagctggtggctgaagccaaagacggcggcgccgactgcatcgagacctacgtcttctggaacggccatgagatcgccccaggccagtactacttcgaggaccggtttgacctggtgcggttcgtgaaggtcgttagagacgctgggctgctcttgatcctgcgcatcgggccctatgtcgccgccgagtggaattatggaggcgtgccggtgtggttgcactacgtgccaggaacggttttcaggacaaacaacgagccattcaagaaccatatgaagagtttcacgacatacatcgtggatatgatgaagaaagagcagctcttcgcttctcagggagggaacattatcctagctcagatagagaacgaatatggagattattatgaacaagcgtatggagctggcggcaaaccatacgccatgtgggcagctagtatggctcttgctcaaaacactggtgtcccttggattatgtgccaagagtctgatgcccctgatcccgtgataaactcttgcaacggtttctactgcgatggattccagccaaattcgccaaccaagccaaaaatttggactgagaattggccaggatggttccagacttttggtgaaagtaatccccacagaccacctgaagatgttgcattcgctgttgcacgttttttcgagaaaggtggcagtgttcaaaattactatgtgtatcatggtggcacaaattttggtcgcactactggggggccattcattacaactagctacgactatgatgcaccaattgatgaatatggacttcggagatttccgaagtgggcacatctgagggaacttcacaaatctataagattgtgtgagcacaccctgctttatggaaatacaacgtttctttctctgggtcctaaacaagaggctgatatttacagtgatcagtctggaggctgtgttgcattcctggcaaatattgattcagccaatgacaaagttgtcactttccgtaacaggcaatatgatcttcctgcttggtcagttagtattcttcctgactgcaggaatgtggtgttcaacactgcaaaggtgcaatctcaaacttcaatggtgaccatggttccagaaagtttgcaagcatcaaaacctgagcgatggagcattttcagggagagaactgggatttggggtaaaaatgactttgtccggaatggatttgtggaccatattaatacgacaaaggactccaccgactacctatggtacacaacaagttttagtgtggatggaagttactcctcaaaagggagccatgctgtccttaatatcgactccaatggccatggtgtccatgctttcttgaataatgtgctcataggtagtgcatatggtaatggctcacaatcaagattcagtgtcaaattgaccatcaacctgaggactggaaagaatgaacttgcccttctaagtatgactgttggtttacaaaatgcaggattcgcttatgaatggataggagcaggctttacaaatgtgaacatctctggtgtgagaactggaatcatagacttgtcttcaaataattgggcatacaagattggactggaaggggaatattataatttgttcaagcctgatcagacaaataaccaacggtggataccacaatccgagccaccaaaaaaccaacctttgacatggtataaggtaaatgttgatgttccacaaggagatgacccagttgggatagacatgcagtctatggggaaaggcttggcttggttgaatggaaatgccatcgggcggtattggccgaggaccagttctattaatgataggtgcactcccagttgtaactacaggggaacatttattccagacaagtgcaggacaggttgtggacagccaactcagagatggtaccatatcccacggtcatggtttcatccctcagggaacatcctcgtggtctttgaggagaagggtggggatcccacgaagatcacattctcaagaagagctgtgacgagcgtgtgctcctttgtgtcagagcacttcccttccatagacttggaatcctgggatgaaagtgccatgaacgaaggcacacccccagccaaagcacagctgtcttgccccgagggtaaaagtatatcttccgtgaagtttgcgagcttgggaaaccccagtggaacctgtagatcataccaaatggggcgctgccaccacccgaactccttatctgttgttgagaaggcctgtctgaacaccaacagctgtacagtctccctgacagacgagagctttgggaaggatttatgccatggagtcaccaaaacactcgccatcgaagcggactgttcttagcgacctacggagtacgaagtacctcggtgtgcatctaggttccactgcaagtatgcccgtcaaaattctaaaattgtagtgcttcttgcacggcaatgctattgtaacctggatttgaatgtatccatctgagataggttatgtttcaggagctttcttaaactaacgttgttgctgagcagcatggtttgaaatagcaggctatggcaaatgacggc

SEQ ID NO: 2519 - protein, 844 aa, Zea mays subsp. mays
  peptide (1)..(844): Ceres Seq. ID no. 12362943
  misc_feature (6)..(729): Pfam Name: Glycosyl hydrolases family 35 Pfam Description: Glycosyl hydrolases family 35
  misc_feature (6)..(729): Pfam Name: Glycosyl hydrolases family 35 Pfam Description: Glycosyl hydrolases family 35
  misc_feature (13)..(844): Homolog of NCBI NO: 15081596 NR Description: putative beta-galactosidase BG1 [Vitis vinifera]
  misc_feature (1)..(437): Homolog of NCBI NO: 18403090 NR Description: glycosyl hydrolase family 35 (beta-galactosidase)
  misc_feature (375)..(844): Homolog of NCBI NO: 18403090 NR Description: glycosyl hydrolase family 35 (beta-galactosidase)
  misc_feature (26)..(844): Homolog of NCBI NO: 7939623 NR Description: putative beta-galactosidase [Lycopersicon
  misc_feature (5)..(843): Homolog of NCBI NO: 14970841 NR Description: beta-galactosidase [Fragaria x ananassa]
  misc_feature (13)..(844): Homolog of NCBI NO: 15081596 NR Description: putative beta-galactosidase BG1 [Vitis vinifera]
  misc_feature (375)..(844): Homolog of NCBI NO: 18403090 NR Description: glycosyl hydrolase family 35 (beta-galactosidase)
  misc_feature (5)..(843): Homolog of NCBI NO: 14970841 NR Description: beta-galactosidase [Fragaria x ananassa]
  misc_feature (25)..(844): Homolog of NCBI NO: 7939621 NR Description: beta-galactosidase [Lycopersicon esculentum]
  misc_feature (6)..(734): Homolog of NCBI NO: 15242897 NR Description: glycosyl hydrolase family 35 (beta-galactosidase)
  misc_feature (6)..(734): Homolog of NCBI NO: 6686892 NR Description: putative beta-galactosidase [Arabidopsis thaliana]
  misc_feature (1)..(844): Homolog of NCBI NO: 6686888 NR Description: putative beta-galactosidase [Arabidopsis thaliana]
  misc_feature (14)..(844): Homolog of NCBI NO: 25326167 NR Description: probable beta-galactosidase [imported] -
  misc_feature (26)..(844): Homolog of NCBI NO: 7939623 NR Description: putative beta-galactosidase [Lycopersicon
  misc_feature (1)..(437): Homolog of NCBI NO: 18403090 NR Description: glycosyl hydrolase family 35 (beta-galactosidase)
  misc_feature (14)..(844): Homolog of NCBI NO: 25326167 NR Description: probable beta-galactosidase [imported] -
  misc_feature (1)..(844): Homolog of NCBI NO: 6686888 NR Description: putative beta-galactosidase [Arabidopsis thaliana]
  misc_feature (6)..(734): Homolog of NCBI NO: 6686892 NR Description: putative beta-galactosidase [Arabidopsis thaliana]
  misc_feature (6)..(734): Homolog of NCBI NO: 15242897 NR Description: glycosyl hydrolase family 35 (beta-galactosidase)
  misc_feature (25)..(844): Homolog of NCBI NO: 7939621 NR Description: beta-galactosidase [Lycopersicon esculentum]
MAAAAASFSALPFLLLLLLVPSLDGASNVTYDHRSLIISGRRRLVISTSIHYPRSVPEMWPKLVAEAKDGGADCIETYVFWNGHEIAPGQYYFEDRFDLVRFVKVVRDAGLLLILRIGPYVAAEWNYGGVPVWLHYVPGTVFRTNNEPFKNHMKSFTTYIVDMMKKEQLFASQGGNIILAQIENEYGDYYEQAYGAGGKPYAMWAASMALAQNTGVPWIMCQESDAPDPVINSCNGFYCDGFQPNSPTKPKIWTENWPGWFQTFGESNPHRPPEDVAFAVARFFEKGGSVQNYYVYHGGTNFGRTTGGPFITTSYDYDAPIDEYGLRRFPKWAHLRELHKSIRLCEHTLLYGNTTFLSLGPKQEADIYSDQSGGCVAFLANIDSANDKVVTFRNRQYDLPAWSVSILPDCRNVVFNTAKVQSQTSMVTMVPESLQASKPERWSIFRERTGIWGKNDFVRNGFVDHINTTKDSTDYLWYTTSFSVDGSYSSKGSHAVLNIDSNGHGVHAFLNNVLIGSAYGNGSQSRFSVKLTINLRTGKNELALLSMTVGLQNAGFAYEWIGAGFTNVNISGVRTGIIDLSSNNWAYKIGLEGEYYNLFKPDQTNNQRWIPQSEPPKNQPLTWYKVNVDVPQGDDPVGIDMQSMGKGLAWLNGNAIGRYWPRTSSINDRCTPSCNYRGTFIPDKCRTGCGQPTQRWYHIPRSWFHPSGNILVVFEEKGGDPTKITFSRRAVTSVCSFVSEHFPSIDLESWDESAMNEGTPPAKAQLSCPEGKSISSVKFASLGNPSGTCRSYQMGRCHHPNSLSVVEKACLNTNSCTVSLTDESFGKDLCHGVTKTLAIEADCS

SEQ ID NO: 2520 - protein, 786 aa, Zea mays subsp. mays
  peptide (1)..(786): Ceres Seq. ID no. 12362944
  misc_feature (1)..(671): Pfam Name: Glycosyl hydrolases family 35 Pfam Description: Glycosyl hydrolases family 35
  misc_feature (1)..(671): Pfam Name: Glycosyl hydrolases family 35 Pfam Description: Glycosyl hydrolases family 35
  misc_feature (1)..(786): Homolog of NCBI NO: 15081596 NR Description: putative beta-galactosidase BG1 [Vitis vinifera]
  misc_feature (1)..(379): Homolog of NCBI NO: 18403090 NR Description: glycosyl hydrolase family 35 (beta-galactosidase)
  misc_feature (317)..(786): Homolog of NCBI NO: 18403090 NR Description: glycosyl hydrolase family 35 (beta-galactosidase)
  misc_feature (1)..(786): Homolog of NCBI NO: 7939623 NR Description: putative beta-galactosidase [Lycopersicon
  misc_feature (1)..(785): Homolog of NCBI NO: 14970841 NR Description: beta-galactosidase [Fragaria x ananassa]
  misc_feature (1)..(786): Homolog of NCBI NO: 15081596 NR Description: putative beta-galactosidase BG1 [Vitis vinifera]
  misc_feature (317)..(786): Homolog of NCBI NO: 18403090 NR Description: glycosyl hydrolase family 35 (beta-galactosidase)
  misc_feature (1)..(785): Homolog of NCBI NO: 14970841 NR Description: beta-galactosidase [Fragaria x ananassa]
  misc_feature (1)..(786): Homolog of NCBI NO: 7939621 NR Description: beta-galactosidase [Lycopersicon esculentum]
  misc_feature (1)..(676): Homolog of NCBI NO: 15242897 NR Description: glycosyl hydrolase family 35 (beta-galactosidase)
  misc_feature (1)..(676): Homolog of NCBI NO: 6686892 NR Description: putative beta-galactosidase [Arabidopsis thaliana]
  misc_feature (1)..(786): Homolog of NCBI NO: 6686888 NR Description: putative beta-galactosidase [Arabidopsis thaliana]
  misc_feature (1)..(786): Homolog of NCBI NO: 25326167 NR Description: probable beta-galactosidase [imported] -
  misc_feature (1)..(786): Homolog of NCBI NO: 7939623 NR Description: putative beta-galactosidase [Lycopersicon
  misc_feature (1)..(379): Homolog of NCBI NO: 18403090 NR Description: glycosyl hydrolase family 35 (beta-galactosidase)
  misc_feature (1)..(786): Homolog of NCBI NO: 25326167 NR Description: probable beta-galactosidase [imported] -
  misc_feature (1)..(786): Homolog of NCBI NO: 6686888 NR Description: putative beta-galactosidase [Arabidopsis thaliana]
  misc_feature (1)..(676): Homolog of NCBI NO: 6686892 NR Description: putative beta-galactosidase [Arabidopsis thaliana]
  misc_feature (1)..(676): Homolog of NCBI NO: 15242897 NR Description: glycosyl hydrolase family 35 (beta-galactosidase)
  misc_feature (1)..(786): Homolog of NCBI NO: 7939621 NR Description: beta-galactosidase [Lycopersicon esculentum]
MWPKLVAEAKDGGADCIETYVFWNGHEIAPGQYYFEDRFDLVRFVKVVRDAGLLLILRIGPYVAAEWNYGGVPVWLHYVPGTVFRTNNEPFKNHMKSFTTYIVDMMKKEQLFASQGGNIILAQIENEYGDYYEQAYGAGGKPYAMWAASMALAQNTGVPWIMCQESDAPDPVINSCNGFYCDGFQPNSPTKPKIWTENWPGWFQTFGESNPHRPPEDVAFAVARFFEKGGSVQNYYVYHGGTNFGRTTGGPFITTSYDYDAPIDEYGLRRFPKWAHLRELHKSIRLCEHTLLYGNTTFLSLGPKQEADIYSDQSGGCVAFLANIDSANDKVVTFRNRQYDLPAWSVSILPDCRNVVFNTAKVQSQTSMVTMVPESLQASKPERWSIFRERTGIWGKNDFVRNGFVDHINTTKDSTDYLWYTTSFSVDGSYSSKGSHAVLNIDSNGHGVHAFLNNVLIGSAYGNGSQSRFSVKLTINLRTGKNELALLSMTVGLQNAGFAYEWIGAGFTNVNISGVRTGIIDLSSNNWAYKIGLEGEYYNLFKPDQTNNQRWIPQSEPPKNQPLTWYKVNVDVPQGDDPVGIDMQSMGKGLAWLNGNAIGRYWPRTSSINDRCTPSCNYRGTFIPDKCRTGCGQPTQRWYHIPRSWFHPSGNILVVFEEKGGDPTKITFSRRAVTSVCSFVSEHFPSIDLESWDESAMNEGTPPAKAQLSCPEGKSISSVKFASLGNPSGTCRSYQMGRCHHPNSLSVVEKACLNTNSCTVSLTDESFGKDLCHGVTKTLAIEADCS

SEQ ID NO: 2521 - protein, 692 aa, Zea mays subsp. mays
  peptide (1)..(692): Ceres Seq. ID no. 12362945
  misc_feature (1)..(577): Pfam Name: Glycosyl hydrolases family 35 Pfam Description: Glycosyl hydrolases family 35
  misc_feature (1)..(577): Pfam Name: Glycosyl hydrolases family 35 Pfam Description: Glycosyl hydrolases family 35
  misc_feature (1)..(285): Homolog of NCBI NO: 18403090 NR Description: glycosyl hydrolase family 35 (beta-galactosidase)
  misc_feature (223)..(692): Homolog of NCBI NO: 18403090 NR Description: glycosyl hydrolase family 35 (beta-galactosidase)
  misc_feature (1)..(692): Homolog of NCBI NO: 7939623 NR Description: putative beta-galactosidase [Lycopersicon
  misc_feature (1)..(691): Homolog of NCBI NO: 14970841 NR Description: beta-galactosidase [Fragaria x ananassa]
  misc_feature (1)..(692): Homolog of NCBI NO: 25326167 NR Description: probable beta-galactosidase [imported] -
  misc_feature (1)..(692): Homolog of NCBI NO: 15081596 NR Description: putative beta-galactosidase BG1 [Vitis vinifera]
  misc_feature (223)..(692): Homolog of NCBI NO: 18403090 NR Description: glycosyl hydrolase family 35 (beta-galactosidase)
  misc_feature (1)..(691): Homolog of NCBI NO: 14970841 NR Description: beta-galactosidase [Fragaria x ananassa]
  misc_feature (1)..(692): Homolog of NCBI NO: 7939621 NR Description: beta-galactosidase [Lycopersicon esculentum]
  misc_feature (1)..(582): Homolog of NCBI NO: 15242897 NR Description: glycosyl hydrolase family 35 (beta-galactosidase)
  misc_feature (1)..(582): Homolog of NCBI NO: 6686892 NR Description: putative beta-galactosidase [Arabidopsis thaliana]
  misc_feature (1)..(692): Homolog of NCBI NO: 6686888 NR Description: putative beta-galactosidase [Arabidopsis thaliana]
  misc_feature (1)..(692): Homolog of NCBI NO: 25326167 NR Description: probable beta-galactosidase [imported] -
  misc_feature (1)..(692): Homolog of NCBI NO: 7939623 NR Description: putative beta-galactosidase [Lycopersicon
  misc_feature (1)..(285): Homolog of NCBI NO: 18403090 NR Description: glycosyl hydrolase family 35 (beta-galactosidase)
  misc_feature (1)..(692): Homolog of NCBI NO: 15081596 NR Description: putative beta-galactosidase BG1 [Vitis vinifera]
  misc_feature (1)..(692): Homolog of NCBI NO: 6686888 NR Description: putative beta-galactosidase [Arabidopsis thaliana]
  misc_feature (1)..(582): Homolog of NCBI NO: 6686892 NR Description: putative beta-galactosidase [Arabidopsis thaliana]
  misc_feature (1)..(582): Homolog of NCBI NO: 15242897 NR Description: glycosyl hydrolase family 35 (beta-galactosidase)
  misc_feature (1)..(692): Homolog of NCBI NO: 7939621 NR Description: beta-galactosidase [Lycopersicon esculentum]
MKSFTTYIVDMMKKEQLFASQGGNIILAQIENEYGDYYEQAYGAGGKPYAMWAASMALAQNTGVPWIMCQESDAPDPVINSCNGFYCDGFQPNSPTKPKIWTENWPGWFQTFGESNPHRPPEDVAFAVARFFEKGGSVQNYYVYHGGTNFGRTTGGPFITTSYDYDAPIDEYGLRRFPKWAHLRELHKSIRLCEHTLLYGNTTFLSLGPKQEADIYSDQSGGCVAFLANIDSANDKVVTFRNRQYDLPAWSVSILPDCRNVVFNTAKVQSQTSMVTMVPESLQASKPERWSIFRERTGIWGKNDFVRNGFVDHINTTKDSTDYLWYTTSFSVDGSYSSKGSHAVLNIDSNGHGVHAFLNNVLIGSAYGNGSQSRFSVKLTINLRTGKNELALLSMTVGLQNAGFAYEWIGAGFTNVNISGVRTGIIDLSSNNWAYKIGLEGEYYNLFKPDQTNNQRWIPQSEPPKNQPLTWYKVNVDVPQGDDPVGIDMQSMGKGLAWLNGNAIGRYWPRTSSINDRCTPSCNYRGTFIPDKCRTGCGQPTQRWYHIPRSWFHPSGNILVVFEEKGGDPTKITFSRRAVTSVCSFVSEHFPSIDLESWDESAMNEGTPPAKAQLSCPEGKSISSVKFASLGNPSGTCRSYQMGRCHHPNSLSVVEKACLNTNSCTVSLTDESFGKDLCHGVTKTLAIEADCS

SEQ ID NO: 2522 - DNA, 1431 bp, Zea mays subsp. mays
  misc_feature (1)..(1431): Ceres Seq. ID no. 12367901
  misc_feature: MA Experiment ID: 108556 Result: Down-regulated in Transcription
  misc_feature: MA Experiment 108556 PARAMETER Experiment Name: Zm_Drought_P Parameter: Age (day) Value: 9
  misc_feature: MA Experiment 108556 PARAMETER Experiment Name: Zm_Drought_P Parameter: Organism Value: Zea mays
  misc_feature: MA Experiment 108556 PARAMETER Experiment Name: Zm_Drought_P Parameter: Plant Line Value: 35A19
  misc_feature: MA Experiment 108556 PARAMETER Experiment Name: Zm_Drought_P Parameter: Timepoint (hr) Value: 24
  misc_feature: MA Experiment 108556 PARAMETER Experiment Name: Zm_Drought_P Parameter: Tissue Value: Aerial
  misc_feature: MA Experiment 108556 PARAMETER Experiment Name: Zm_Drought_P Parameter: Treatment Value: Drought vs. No Drought
  misc_feature: MA Experiment ID: 108689 Result: Down-regulated in Transcription
  misc_feature: MA Experiment 108689 PARAMETER Experiment Name: Zm_Drought_Roots_P Parameter: Age (day) Value: 9
  misc_feature: MA Experiment 108689 PARAMETER Experiment Name: Zm_Drought_Roots_P Parameter: Organism Value: Zea mays
  misc_feature: MA Experiment 108689 PARAMETER Experiment Name: Zm_Drought_Roots_P Parameter: Plant Line Value: 35A19
  misc_feature: MA Experiment 108689 PARAMETER Experiment Name: Zm_Drought_Roots_P Parameter: Timepoint (hr) Value: 24
  misc_feature: MA Experiment 108689 PARAMETER Experiment Name: Zm_Drought_Roots_P Parameter: Tissue Value: Roots
  misc_feature: MA Experiment 108689 PARAMETER Experiment Name: Zm_Drought_Roots_P Parameter: Treatment Value: Drought vs. No Drought
atttccattttccagcgcgcacggacgactgttacctcccccgcccttcgccactccgctccctcctccacctgtcatctcccgcgcgggagacctgcccgctccatggcgccgtcgcgaccgctcatgcgggggatccgcccgccgcgcgtcttcccgacccgcggcggccgcgcctcgccgtacaccgtcgcgctcaccgcgctacttctcgtctccgccgccctcctcgcgctcatagccttcggcgtcttctcgctccccgtgtccgcgccaaatgctgccgccaccaccggcactgcagccggaggggagaccgagtcggccgacgtccgcccccgcgcccgccgcgacctgggggaggggctgggagagcgcggtgcgcagtggaccgaggtcatctcgtgggagcccagggcatttgtctaccacaacttcctctctaaggatgagtgtgaatacctaattggattggccaagcctcacatggtaaaatcaacagttgtcgacagcactaccggcaaaagcaaggacagcagggtccggacaagttcaggcatgtttcttcaaagaggaagagacaaggttattcgagcaattgaaaagaggatagcagactataccttcatacccgtagatcatggtgagggactccaagtgctgcattatgaagtcgggcagaagtatgagcctcactttgattattttcttgatgagtttaacacaaagaatggtggtcagaggatagctactcttctgatgtatctatcagatgttgaagaagggggcgagactattttccctgatgcaaatgtgaacgccagttctttaccatggtacaatgagcttttcagattgtgccaaaagaggcctttctgtcaaaccaaagatgggagatgcgcttcttttctggagcatgaaaccagatgccactttggacccattaagcttgcatgggggttgtcctgtgattaaaggaaataaatggtcatcaaccaagtggatgcacatccatgagtacaaagcttgaggcttggcgaatcaaatatatgctgttgaattgggtttgtaagatggatctttatgcatgtgacttagggatttctacgggattgacactcatgtatgctttacagacccactggagctgtattctttgcttctttgttggaggggagataatagggataagcaggggccttgctcgtccttgcagtttttttttttttttggctgatccttgctgacttggctttttttcacttttctttttcttccttgcagtaccccaactatagaggagttgtgtagtgcctatagagtttgagattttgtttttgtgtcatgcccctaatattagtacatgaatgttgtgttactatgatacttgtaagctttggtactaatgaatagtgaggtctagagctcaac

SEQ ID NO: 2523 - protein, 324 aa, Zea mays subsp. mays
  peptide (1)..(324): Ceres Seq. ID no. 12367902
  misc_feature (214)..(290): Pfam Name: 2OG-Fe(II) oxygenase superfamily Pfam Description: 2OG-Fe(II) oxygenase superfamily
  misc_feature (115)..(270): Homolog of NCBI NO: 29150365 NR Description: putative oxidoreductase [Oryza sativa (japonica
  misc_feature (180)..(289): Homolog of NCBI NO: 15233341 NR Description: putative protein; protein id: At4g35810.1
  misc_feature (58)..(183): Homolog of NCBI NO: 15233341 NR Description: putative protein; protein id: At4g35810.1
  misc_feature (63)..(289): Homolog of NCBI NO: 7488226 NR Description: procollagen-proline dioxygenase alpha chain
  misc_feature (49)..(289): Homolog of NCBI NO: 15239240 NR Description: prolyl 4-hydroxylase, alpha subunit-like protein
  misc_feature (56)..(290): Homolog of NCBI NO: 37535718 NR Description: putative prolyl 4-hydroxylase, alpha subunit
  misc_feature (63)..(289): Homolog of NCBI NO: 21593091 NR Description: putative prolyl 4-hydroxylase, alpha subunit
  misc_feature (63)..(289): Homolog of NCBI NO: 15227885 NR Description: putative prolyl 4-hydroxylase, alpha subunit
  misc_feature (60)..(290): Homolog of NCBI NO: 21537370 NR Description: putative prolyl 4-hydroxylase, alpha subunit
  misc_feature (60)..(290): Homolog of NCBI NO: 18394842 NR Description: expressed protein
ISIFQRARTTVTSPALRHSAPSSTCHLPRGRPARSMAPSRPLMRGIRPPRVFPTRGGRASPYTVALTALLLVSAALLALIAFGVFSLPVSAPNAAATTGTAAGGETESADVRPRARRDLGEGLGERGAQWTEVISWEPRAFVYHNFLSKDECEYLIGLAKPHMVKSTVVDSTTGKSKDSRVRTSSGMFLQRGRDKVIRAIEKRIADYTFIPVDHGEGLQVLHYEVGQKYEPHFDYFLDEFNTKNGGQRIATLLMYLSDVEEGGETIFPDANVNASSLPWYNELFRLCQKRPFCQTKDGRCASFLEHETRCHFGPIKLAWGLSCD

SEQ ID NO: 2524 - protein, 289 aa, Zea mays subsp. mays
  peptide (1)..(289): Ceres Seq. ID no. 12367903
  misc_feature (179)..(255): Pfam Name: 2OG-Fe(II) oxygenase superfamily Pfam Description: 2OG-Fe(II) oxygenase superfamily
  misc_feature (80)..(235): Homolog of NCBI NO: 29150365 NR Description: putative oxidoreductase [Oryza sativa (japonica
  misc_feature (145)..(254): Homolog of NCBI NO: 15233341 NR Description: putative protein; protein id: At4g35810.1
  misc_feature (23)..(148): Homolog of NCBI NO: 15233341 NR Description: putative protein; protein id: At4g35810.1
  misc_feature (28)..(254): Homolog of NCBI NO: 7488226 NR Description: procollagen-proline dioxygenase alpha chain
  misc_feature (14)..(254): Homolog of NCBI NO: 15239240 NR Description: prolyl 4-hydroxylase, alpha subunit-like protein
  misc_feature (21)..(255): Homolog of NCBI NO: 37535718 NR Description: putative prolyl 4-hydroxylase, alpha subunit
  misc_feature (28)..(254): Homolog of NCBI NO: 21593091 NR Description: putative prolyl 4-hydroxylase, alpha subunit
  misc_feature (28)..(254): Homolog of NCBI NO: 15227885 NR Description: putative prolyl 4-hydroxylase, alpha subunit
  misc_feature (25)..(255): Homolog of NCBI NO: 21537370 NR Description: putative prolyl 4-hydroxylase, alpha subunit
  misc_feature (25)..(255): Homolog of NCBI NO: 18394842 NR Description: expressed protein
MAPSRPLMRGIRPPRVFPTRGGRASPYTVALTALLLVSAALLALIAFGVFSLPVSAPNAAATTGTAAGGETESADVRPRARRDLGEGLGERGAQWTEVISWEPRAFVYHNFLSKDECEYLIGLAKPHMVKSTVVDSTTGKSKDSRVRTSSGMFLQRGRDKVIRAIEKRIADYTFIPVDHGEGLQVLHYEVGQKYEPHFDYFLDEFNTKNGGQRIATLLMYLSDVEEGGETIFPDANVNASSLPWYNELFRLCQKRPFCQTKDGRCASFLEHETRCHFGPIKLAWGLSCD

SEQ ID NO: 2525 - protein, 282 aa, Zea mays subsp. mays
  peptide (1)..(282): Ceres Seq. ID no. 12367904
  misc_feature (172)..(248): Pfam Name: 2OG-Fe(II) oxygenase superfamily Pfam Description: 2OG-Fe(II) oxygenase superfamily
  misc_feature (73)..(228): Homolog of NCBI NO: 29150365 NR Description: putative oxidoreductase [Oryza sativa (japonica
  misc_feature (138)..(247): Homolog of NCBI NO: 15233341 NR Description: putative protein; protein id: At4g35810.1
  misc_feature (16)..(141): Homolog of NCBI NO: 15233341 NR Description: putative protein; protein id: At4g35810.1
  misc_feature (21)..(247): Homolog of NCBI NO: 7488226 NR Description: procollagen-proline dioxygenase alpha chain
  misc_feature (7)..(247): Homolog of NCBI NO: 15239240 NR Description: prolyl 4-hydroxylase, alpha subunit-like protein
  misc_feature (14)..(248): Homolog of NCBI NO: 37535718 NR Description: putative prolyl 4-hydroxylase, alpha subunit
  misc_feature (21)..(247): Homolog of NCBI NO: 21593091 NR Description: putative prolyl 4-hydroxylase, alpha subunit
  misc_feature (21)..(247): Homolog of NCBI NO: 15227885 NR Description: putative prolyl 4-hydroxylase, alpha subunit
  misc_feature (18)..(248): Homolog of NCBI NO: 21537370 NR Description: putative prolyl 4-hydroxylase, alpha subunit
  misc_feature (18)..(248): Homolog of NCBI NO: 18394842 NR Description: expressed protein
MRGIRPPRVFPTRGGRASPYTVALTALLLVSAALLALIAFGVFSLPVSAPNAAATTGTAAGGETESADVRPRARRDLGEGLGERGAQWTEVISWEPRAFVYHNFLSKDECEYLIGLAKPHMVKSTVVDSTTGKSKDSRVRTSSGMFLQRGRDKVIRAIEKRIADYTFIPVDHGEGLQVLHYEVGQKYEPHFDYFLDEFNTKNGGQRIATLLMYLSDVEEGGETIFPDANVNASSLPWYNELFRLCQKRPFCQTKDGRCASFLEHETRCHFGPIKLAWGLSCD

SEQ ID NO: 2526 - DNA, 1263 bp, Zea mays subsp. mays
  misc_feature (1)..(1263): Ceres Seq. ID no. 12410662
  misc_feature: MA Experiment ID: 108522 Result: Up-regulated in Transcription
  misc_feature: MA Experiment 108522 PARAMETER Experiment Name: Zm_42deg_Heat_P Parameter: Age (day) Value: 8
  misc_feature: MA Experiment 108522 PARAMETER Experiment Name: Zm_42deg_Heat_P Parameter: Organism Value: Zea mays
  misc_feature: MA Experiment 108522 PARAMETER Experiment Name: Zm_42deg_Heat_P Parameter: Plant Line Value: 35A19
  misc_feature: MA Experiment 108522 PARAMETER Experiment Name: Zm_42deg_Heat_P Parameter: Temperature (deg C) Value: 42 vs. 22
  misc_feature: MA Experiment 108522 PARAMETER Experiment Name: Zm_42deg_Heat_P Parameter: Timepoint (hr) Value: 1
  misc_feature: MA Experiment 108522 PARAMETER Experiment Name: Zm_42deg_Heat_P Parameter: Tissue Value: Aerial
  misc_feature: MA Experiment ID: 108526 Result: Up-regulated in Transcription
  misc_feature: MA Experiment 108526 PARAMETER Experiment Name: Zm_5mM_NO_P Parameter: Age (day) Value: 8
  misc_feature: MA Experiment 108526 PARAMETER Experiment Name: Zm_5mM_NO_P Parameter: Organism Value: Zea mays
  misc_feature: MA Experiment 108526 PARAMETER Experiment Name: Zm_5mM_NO_P Parameter: Plant Line Value: 35A19
  misc_feature: MA Experiment 108526 PARAMETER Experiment Name: Zm_5mM_NO_P Parameter: Timepoint (hr) Value: 1
  misc_feature: MA Experiment 108526 PARAMETER Experiment Name: Zm_5mM_NO_P Parameter: Tissue Value: Aerial
  misc_feature: MA Experiment 108526 PARAMETER Experiment Name: Zm_5mM_NO_P Parameter: Treatment Value: 5mM NO vs. No Treatment
  misc_feature: MA Experiment ID: 108527 Result: Up-regulated in Transcription
  misc_feature: MA Experiment 108527 PARAMETER Experiment Name: Zm_5mM_NO_P Parameter: Age (day) Value: 8
  misc_feature: MA Experiment 108527 PARAMETER Experiment Name: Zm_5mM_NO_P Parameter: Organism Value: Zea mays
  misc_feature: MA Experiment 108527 PARAMETER Experiment Name: Zm_5mM_NO_P Parameter: Plant Line Value: 35A19
  misc_feature: MA Experiment 108527 PARAMETER Experiment Name: Zm_5mM_NO_P Parameter: Timepoint (hr) Value: 6
  misc_feature: MA Experiment 108527 PARAMETER Experiment Name: Zm_5mM_NO_P Parameter: Tissue Value: Aerial
  misc_feature: MA Experiment 108527 PARAMETER Experiment Name: Zm_5mM_NO_P Parameter: Treatment Value: 5mM NO vs. No Treatment
  misc_feature: MA Experiment ID: 108529 Result: Up-regulated in Transcription
  misc_feature: MA Experiment 108529 PARAMETER Experiment Name: Zm_Imbibed_Seeds_P Parameter: Age (day) Value: 5 vs. 2
  misc_feature: MA Experiment 108529 PARAMETER Experiment Name: Zm_Imbibed_Seeds_P Parameter: Organism Value: Zea mays
  misc_feature: MA Experiment 108529 PARAMETER Experiment Name: Zm_Imbibed_Seeds_P Parameter: Plant Line Value: 35A19
  misc_feature: MA Experiment 108529 PARAMETER Experiment Name: Zm_Imbibed_Seeds_P Parameter: Tissue Value: Roots vs. Embryo
  misc_feature: MA Experiment ID: 108530 Result: Up-regulated in Transcription
  misc_feature: MA Experiment 108530 PARAMETER Experiment Name: Zm_Imbibed_Seeds_P Parameter: Age (day) Value: 6 vs. 2
  misc_feature: MA Experiment 108530 PARAMETER Experiment Name: Zm_Imbibed_Seeds_P Parameter: Organism Value: Zea mays
  misc_feature: MA Experiment 108530 PARAMETER Experiment Name: Zm_Imbibed_Seeds_P Parameter: Plant Line Value: 35A19
  misc_feature: MA Experiment 108530 PARAMETER Experiment Name: Zm_Imbibed_Seeds_P Parameter: Tissue Value: Aerial vs. Embryo
  misc_feature: MA Experiment ID: 108534 Result: Up-regulated in Transcription
  misc_feature: MA Experiment 108534 PARAMETER Experiment Name: Zm_4deg_Cold_P Parameter: Age (hr) Value: 8
  misc_feature: MA Experiment 108534 PARAMETER Experiment Name: Zm_4deg_Cold_P Parameter: Organism Value: Zea mays
  misc_feature: MA Experiment 108534 PARAMETER Experiment Name: Zm_4deg_Cold_P Parameter: Plant Line Value: 35A19
  misc_feature: MA Experiment 108534 PARAMETER Experiment Name: Zm_4deg_Cold_P Parameter: Temperature (deg C) Value: 4 vs. 22
  misc_feature: MA Experiment 108534 PARAMETER Experiment Name: Zm_4deg_Cold_P Parameter: Timepoint (hr) Value: 6
  misc_feature: MA Experiment 108534 PARAMETER Experiment Name: Zm_4deg_Cold_P Parameter: Tissue Value: Aerial
  misc_feature: MA Experiment ID: 108535 Result: Down-regulated in Transcription
  misc_feature: MA Experiment 108535 PARAMETER Experiment Name: Zm_Meristem_P Parameter: Age (day) Value: 8
  misc_feature: MA Experiment 108535 PARAMETER Experiment Name: Zm_Meristem_P Parameter: Organism Value: Zea mays
  misc_feature: MA Experiment 108535 PARAMETER Experiment Name: Zm_Meristem_P Parameter: Plant Line Value: 35A19
  misc_feature: MA Experiment 108535 PARAMETER Experiment Name: Zm_Meristem_P Parameter: Tissue Value: Root Meristem vs. Above Root Meristem
  misc_feature: MA Experiment ID: 108547 Result: Up-regulated in Transcription
  misc_feature: MA Experiment 108547 PARAMETER Experiment Name: Zm_Imbibed_Seeds_P Parameter: Age (day) Value: 4 vs. 2
  misc_feature: MA Experiment 108547 PARAMETER Experiment Name: Zm_Imbibed_Seeds_P Parameter: Organism Value: Zea mays
  misc_feature: MA Experiment 108547 PARAMETER Experiment Name: Zm_Imbibed_Seeds_P Parameter: Plant Line Value: 35A19
  misc_feature: MA Experiment 108547 PARAMETER Experiment Name: Zm_Imbibed_Seeds_P Parameter: Tissue Value: Aerial vs. Embryo
  misc_feature: MA Experiment ID: 20000535 Result: Down-regulated in Transcription
  misc_feature: MA Experiment 20000535 PARAMETER Experiment Name: Zm_Hybrid_Seed_Dev_P Parameter: DAP Value: 30 vs. 12
  misc_feature: MA Experiment 20000535 PARAMETER Experiment Name: Zm_Hybrid_Seed_Dev_P Parameter: Organism Value: Zea mays
  misc_feature: MA Experiment 20000535 PARAMETER Experiment Name: Zm_Hybrid_Seed_Dev_P Parameter: Plant Line Value: 35A19
  misc_feature: MA Experiment 20000535 PARAMETER Experiment Name: Zm_Hybrid_Seed_Dev_P Parameter: Tissue Value: Embryo vs. Unfert Floret
  misc_feature: MA Experiment ID: 20000630 Result: Up-regulated in Transcription
  misc_feature: MA Experiment 20000630 PARAMETER Experiment Name: Zm_Herbicide-Treatments_P Parameter: Timepoint (hr) Value: 4
  misc_feature: MA Experiment 20000630 PARAMETER Experiment Name: Zm_Herbicide-Treatments_P Parameter: Tissue Value: Aerial
  misc_feature: MA Experiment 20000630 PARAMETER Experiment Name: Zm_Herbicide-Treatments_P Parameter: Treatment Value: Roundup vs. No Treatment
  misc_feature: MA Experiment ID: 20001614 Result: Up-regulated in Transcription
  misc_feature: MA Experiment 20001614 PARAMETER Experiment Name: Zm_50ppm_KNO3_L-to-H_P Parameter: Age (day) Value: 21
  misc_feature: MA Experiment 20001614 PARAMETER Experiment Name: Zm_50ppm_KNO3_L-to-H_P Parameter: Organism Value: Zea mays
  misc_feature: MA Experiment 20001614 PARAMETER Experiment Name: Zm_50ppm_KNO3_L-to-H_P Parameter: Plant Line Value: 35A19
  misc_feature: MA Experiment 20001614 PARAMETER Experiment Name: Zm_50ppm_KNO3_L-to-H_P Parameter: Timepoint (hr) Value: 48
  misc_feature: MA Experiment 20001614 PARAMETER Experiment Name: Zm_50ppm_KNO3_L-to-H_P Parameter: Tissue Value: Roots
  misc_feature: MA Experiment 20001614 PARAMETER Experiment Name: Zm_50ppm_KNO3_L-to-H_P Parameter: Treatment Value: 50ppm KNO3 vs. 50ppm KCl
atcctcaagtcatcagctagctagccttccctacagcaactgcatacatacaacacttccatctgcccgctcgtcttcgatcaattcccaagtcaaataatataacagcaatggtggttcccgtgatcgacttctccaagctggacggcgctgagagggccgaaaccctggcgcagatcgccaatggctgcgaggagtggggattcttccagctcgtgaaccacggcatcccgctggagctgctcgagcgcgtcaagaaggtgtgctccgacagctaccgcctccgggaggccgggttcaaggcgtcggagccggtgcgcacgctggaggcgctcgtcgacgcggagcggcgcggtgaggtggtggcgccggtggacgacctggactgggaggacatcttctacattcatgacggatgccagtggccgtccgacccgccggcgttcaaggagaccatgcgcgagtaccgcgccgagctgaggaagctcgccgagcgagtcatggaggccatggacgagaacctcggcctcgccaggggcaccatcaaggacgccttcaccggcggcagccggcacgagcccttcttcggcaccaaggtcagccactacccgccgtgcccacgcccggacctcatcacgggcctgcgcgcgcacaccgacgccggcggcgtcatcctcctgttccaggacgacaaggtcggtggcctggaggtgctcaaggacggcgagtgggccgacgtacagccgctcgagggcgccatcgtcgtcaacaccggcgaccagatcgaggtgctcagcaacgggcggtaccgcagcgcctggcaccgcgtgctgcccatgcgccgacggcaatcgccgctccatcgcatccttctacaacccggccaaccgaagccaccatctcgccggcggcggtgcaggtcagcggcggtgacgcgtatcccaagtacttgttcggcgattacatggacgtgtacgtcaagcagaagttccaggccaaggagcctaggttcgaagccgtcaagacgggggcgccaaagtcatctccagcggcataaataaatagggaaaacaattattgaatgcattattaaaagtagtaataagtttgttaaatataaactagctcgaccggattgcaccgtccgatctggacttcctctagttattggaagcttatatatatatatatatatagccagttgccagtgctttgactatggatctaaatatattatataaataggtattgtcatatttatcc

SEQ ID NO: 2527 - protein, 316 aa, Zea mays subsp. mays
  peptide (1)..(316): Ceres Seq. ID no. 12410663
  misc_feature (157)..(244): Pfam Name: 2OG-Fe(II) oxygenase superfamily Pfam Description: 2OG-Fe(II) oxygenase superfamily
  misc_feature (4)..(241): Homolog of NCBI NO: 232041 NR Description: 1-aminocyclopropane-1-carboxylate oxidase 1 (ACC
  misc_feature (4)..(241): Homolog of NCBI NO: 2385371 NR Description: ACC oxidase [Malus x domestica]
  misc_feature (1)..(241): Homolog of NCBI NO: 25285689 NR Description: hypothetical protein F2P24.4 [imported] -
  misc_feature (1)..(241): Homolog of NCBI NO: 21555054 NR Description: 1-aminocyclopropane-1-carboxylate oxidase,
  misc_feature (1)..(241): Homolog of NCBI NO: 18411485 NR Description: 1-aminocyclopropane-1-carboxylate oxidase,
  misc_feature (1)..(248): Homolog of NCBI NO: 27371996 NR Description: 1-aminocyclopropane-1-carboxylic acid oxidase
  misc_feature (1)..(241): Homolog of NCBI NO: 28949891 NR Description: 1-aminocyclopropane-1-carboxylic acid oxidase
  misc_feature (1)..(241): Homolog of NCBI NO: 25452792 NR Description: 1-aminocyclopropane-1-carboxylate oxidase (ACC
  misc_feature (1)..(241): Homolog of NCBI NO: 12001828 NR Description: 1-aminocyclopropane-1-carboxylate oxidase; ACC
  misc_feature (1)..(244): Homolog of NCBI NO: 7433217 NR Description: 1-aminocyclopropane-1-carboxylate oxidase (EC
MVVPVIDFSKLDGAERAETLAQIANGCEEWGFFQLVNHGIPLELLERVKKVCSDSYRLREAGFKASEPVRTLEALVDAERRGEVVAPVDDLDWEDIFYIHDGCQWPSDPPAFKETMREYRAELRKLAERVMEAMDENLGLARGTIKDAFTGGSRHEPFFGTKVSHYPPCPRPDLITGLRAHTDAGGVILLFQDDKVGGLEVLKDGEWADVQPLEGAIVVNTGDQIEVLSNGRYRSAWHRVLPMRRRQSPLHRILLQPGQPKPPSRRRRCRSAAVTRIPSTCSAITWTCTSSRSSRPRSLGSKPSRRGRQSHLQRHK

SEQ ID NO: 2528 - protein, 213 aa, Zea mays subsp. mays
  peptide (1)..(213): Ceres Seq. ID no. 12410664
  misc_feature (1)..(145): Pfam Name: HlyD family secretion protein Pfam Description: HlyD family secretion protein
  misc_feature (163)..(213): Homolog of NCBI NO: 232041 NR Description: 1-aminocyclopropane-1-carboxylate oxidase 1 (ACC
  misc_feature (129)..(213): Homolog of NCBI NO: 2385371 NR Description: ACC oxidase [Malus x domestica]
  misc_feature (159)..(204): Homolog of NCBI NO: 25285689 NR Description: hypothetical protein F2P24.4 [imported] -
  misc_feature (159)..(204): Homolog of NCBI NO: 21555054 NR Description: 1-aminocyclopropane-1-carboxylate oxidase,
  misc_feature (159)..(204): Homolog of NCBI NO: 18411485 NR Description: 1-aminocyclopropane-1-carboxylate oxidase,
  misc_feature (159)..(203): Homolog of NCBI NO: 27371996 NR Description: 1-aminocyclopropane-1-carboxylic acid oxidase
  misc_feature (157)..(203): Homolog of NCBI NO: 28949891 NR Description: 1-aminocyclopropane-1-carboxylic acid oxidase
  misc_feature (145)..(203): Homolog of NCBI NO: 25452792 NR Description: 1-aminocyclopropane-1-carboxylate oxidase (ACC
  misc_feature (145)..(203): Homolog of NCBI NO: 12001828 NR Description: 1-aminocyclopropane-1-carboxylate oxidase; ACC
  misc_feature (124)..(213): Homolog of NCBI NO: 7433217 NR Description: 1-aminocyclopropane-1-carboxylate oxidase (EC
MPVAVRPAGVQGDHARVPRRAEEARRASHGGHGREPRPRQGHHQGRLHRRQPARALLRHQGQPLPAVPTPGPHHGPARAHRRRRRHPPVPGRQGRWPGGAQGRRVGRRTAARGRHRRQHRRPDRGAQQRAVPQRLAPRAAHAPTAIAAPSHPSTTRPTEATISPAAVQVSGGDAYPKYLFGDYMDVYVKQKFQAKEPRFEAVKTGAPKSSPAA

SEQ ID NO: 2529 - protein, 201 aa, Zea mays subsp. mays
  peptide (1)..(201): Ceres Seq. ID no. 12410665
  misc_feature (42)..(129): Pfam Name: 2OG-Fe(II) oxygenase superfamily Pfam Description: 2OG-Fe(II) oxygenase superfamily
  misc_feature (1)..(126): Homolog of NCBI NO: 232041 NR Description: 1-aminocyclopropane-1-carboxylate oxidase 1 (ACC
  misc_feature (1)..(126): Homolog of NCBI NO: 2385371 NR Description: ACC oxidase [Malus x domestica]
  misc_feature (1)..(126): Homolog of NCBI NO: 25285689 NR Description: hypothetical protein F2P24.4 [imported] -
  misc_feature (1)..(126): Homolog of NCBI NO: 21555054 NR Description: 1-aminocyclopropane-1-carboxylate oxidase,
  misc_feature (1)..(126): Homolog of NCBI NO: 18411485 NR Description: 1-aminocyclopropane-1-carboxylate oxidase,
  misc_feature (1)..(133): Homolog of NCBI NO: 27371996 NR Description: 1-aminocyclopropane-1-carboxylic acid oxidase
  misc_feature (1)..(126): Homolog of NCBI NO: 28949891 NR Description: 1-aminocyclopropane-1-carboxylic acid oxidase
  misc_feature (1)..(126): Homolog of NCBI NO: 25452792 NR Description: 1-aminocyclopropane-1-carboxylate oxidase (ACC
  misc_feature (1)..(126): Homolog of NCBI NO: 12001828 NR Description: 1-aminocyclopropane-1-carboxylate oxidase; ACC
  misc_feature (1)..(129): Homolog of NCBI NO: 7433217 NR Description: 1-aminocyclopropane-1-carboxylate oxidase (EC
MREYRAELRKLAERVMEAMDENLGLARGTIKDAFTGGSRHEPFFGTKVSHYPPCPRPDLITGLRAHTDAGGVILLFQDDKVGGLEVLKDGEWADVQPLEGAIVVNTGDQIEVLSNGRYRSAWHRVLPMRRRQSPLHRILLQPGQPKPPSRRRRCRSAAVTRIPSTCSAITWTCTSSRSSRPRSLGSKPSRRGRQSHLQRHK

SEQ ID NO: 2530 - DNA, 1626 bp, Zea mays subsp. mays
  misc_feature (1)..(1626): Ceres Seq. ID no. 12407976
  misc_feature: MA Experiment ID: 108536 Result: Down-regulated in Transcription
  misc_feature: MA Experiment 108536 PARAMETER Experiment Name: Zm_Meristem_P Parameter: Age (day) Value: 8
  misc_feature: MA Experiment 108536 PARAMETER Experiment Name: Zm_Meristem_P Parameter: Organism Value: Zea mays
  misc_feature: MA Experiment 108536 PARAMETER Experiment Name: Zm_Meristem_P Parameter: Plant Line Value: 35A19
  misc_feature: MA Experiment 108536 PARAMETER Experiment Name: Zm_Meristem_P Parameter: Tissue Value: Shoot Meristem vs. Above Shoot Meristem
  misc_feature: MA Experiment ID: 20000480 Result: Down-regulated in Transcription
  misc_feature: MA Experiment 20000480 PARAMETER Experiment Name: Zm_Drought_P Parameter: Age (day) Value: 11
  misc_feature: MA Experiment 20000480 PARAMETER Experiment Name: Zm_Drought_P Parameter: Organism Value: Zea mays
  misc_feature: MA Experiment 20000480 PARAMETER Experiment Name: Zm_Drought_P Parameter: Plant Line Value: 35A19
  misc_feature: MA Experiment 20000480 PARAMETER Experiment Name: Zm_Drought_P Parameter: Timepoint (hr) Value: 72
  misc_feature: MA Experiment 20000480 PARAMETER Experiment Name: Zm_Drought_P Parameter: Tissue Value: Aerial
  misc_feature: MA Experiment 20000480 PARAMETER Experiment Name: Zm_Drought_P Parameter: Treatment Value: Drought vs. No Drought
ggtcgcggctgcccgccgcttttcccttcttccgttgcggcctcgctataaaaaccgtccgtccagtccgcgccgcggccgcgcacggcgaacccgaatcccgagcacaggccgccgctcgctcgctcgctgcagctacgcacgcacgcgcctgctcctccccttagcttccacaaggctcgactcggccggcggcgatggcgcggaagaagatccgggagtacgactccaagcgcctcctccgggagcacctcaagcgcctcgccggcatcgacctccagatcctctccgcgcaggtcacacagtcaacggatttcactgagcttgcaaaccaggagccgtggctctcatctatgaagttggttgtgaaacctgacatgctctttgggaaacgtgggaagagtgggcttgtggccctcaacctagatcttgcccaagttcgccaatttgtcaaggagcggttgggagttgaggtcgagatgggtggctgcaaagctccaattacaaccttcatagttgaaccatttgtgccacatgaccaagagtactacctttcgattgtatctgaaaggcttggcaacaccattagtttctcagaatgtggaggtattgagatcgaggagaactgggacaaggttaagactatctttcttcccacagagaagcaaatgacacctgacgcatgtgctccattgattgccaccctgccattggaggtccgcacaaagataggtggtttcattagagctgtattttctgttttccaagacttggatttctcatttcttgagatgaacccattcaccttggtaaatggtgaaccgtatcctctggatatgagaggagaactagatgacacagctgctttcaaaaacttcaataagtggggcaatattgtgtttcccctaccatttggaagagttctcagtccctccgaaagttttatccatgaactggatgagaagacaagtgcttctctgaaattcacggtactgaacccaaaaggacgcatctggacaatggttgcaggtggtggtgctagtgtcatatacgcagacactgttggtgatttgggatatgcttcggagctaggaaattatgcagagtacagtggagctcccaaggaggaggaggttctgcagtatgctagagtgcttttggattgcgctacctctgatcctgatggccgtaagagagcccttctaatcggaggaggaatcgctaacttcacagatgttgcttctacatttagtggcatcattcgggctttaagagagaaggagtccaaattaaaggctgcaaggatgaacatttatgtccggagaggtggtccgaactaccaaactggactcgccaaaatgcgcaccctaggcgccgaacttggcgttccaattgaggtctatggaccagaggcgaccatgactgggatctgcaaagaagccattgattgcatcatggccgcgtaaatcacaaatgtggttgttccatttgaagtcacatccgttttgtactagacgttccttgtacgtgattgctctggtaaaacagagaacgatcattgtcatgagtaaactcggcctttgtaacacagttacgcaagtaataattaagatcttggtttggtgc

SEQ ID NO: 2531 - protein, 422 aa, Zea mays subsp. mays
  peptide (1)..(422): Ceres Seq. ID no. 12407977
  misc_feature (50)..(199): Pfam Name: ATP-grasp domain Pfam Description: ATP-grasp domain
  misc_feature (1)..(416): Homolog of NCBI NO: 38569421 NR Description: ATP citrate lyase isoform 1 [Homo sapiens]
  misc_feature (1)..(411): Homolog of NCBI NO: 8392839 NR Description: ATP citrate lyase [Rattus norvegicus]
  misc_feature (1)..(416): Homolog of NCBI NO: 29293809 NR Description: ATP citrate lyase [Mus musculus]
  misc_feature (1)..(416): Homolog of NCBI NO: 31235932 NR Description: ENSANGP00000012364 [Anopheles gambiae]
  misc_feature (1)..(422): Homolog of NCBI NO: 19698853 NR Description: similar to ATP-citrate-lyase [Arabidopsis
  misc_feature (1)..(422): Homolog of NCBI NO: 15219818 NR Description: ATP citrate-lyase, putative
  misc_feature (1)..(422): Homolog of NCBI NO: 21593129 NR Description: ATP citrate-lyase, putative [Arabidopsis thaliana]
  misc_feature (1)..(422): Homolog of NCBI NO: 15220186 NR Description: ATP citrate-lyase, putative
  misc_feature (1)..(422): Homolog of NCBI NO: 15919089 NR Description: ATP citrate lyase b-subunit [Lupinus albus]
  misc_feature (1)..(420): Homolog of NCBI NO: 15217510 NR Description: unknown protein; protein id: At1g09430.1
MARKKIREYDSKRLLREHLKRLAGIDLQILSAQVTQSTDFTELANQEPWLSSMKLVVKPDMLFGKRGKSGLVALNLDLAQVRQFVKERLGVEVEMGGCKAPITTFIVEPFVPHDQEYYLSIVSERLGNTISFSECGGIEIEENWDKVKTIFLPTEKQMTPDACAPLIATLPLEVRTKIGGFIRAVFSVFQDLDFSFLEMNPFTLVNGEPYPLDMRGELDDTAAFKNFNKWGNIVFPLPFGRVLSPSESFIHELDEKTSASLKFTVLNPKGRIWTMVAGGGASVIYADTVGDLGYASELGNYAEYSGAPKEEEVLQYARVLLDCATSDPDGRKRALLIGGGIANFTDVASTFSGIIRALREKESKLKAARMNIYVRRGGPNYQTGLAKMRTLGAELGVPIEVYGPEATMTGICKEAIDCIMAA

SEQ ID NO: 2532 - protein, 370 aa, Zea mays subsp. mays
  peptide (1)..(370): Ceres Seq. ID no. 12407978
  misc_feature (1)..(147): Pfam Name: ATP-grasp domain Pfam Description: ATP-grasp domain
  misc_feature (1)..(370): Homolog of NCBI NO: 21593129 NR Description: ATP citrate-lyase, putative [Arabidopsis thaliana]
  misc_feature (1)..(370): Homolog of NCBI NO: 15220186 NR Description: ATP citrate-lyase, putative
  misc_feature (1)..(364): Homolog of NCBI NO: 38569421 NR Description: ATP citrate lyase isoform 1 [Homo sapiens]
  misc_feature (1)..(364): Homolog of NCBI NO: 29293809 NR Description: ATP citrate lyase [Mus musculus]
  misc_feature (1)..(370): Homolog of NCBI NO: 19698853 NR Description: similar to ATP-citrate-lyase [Arabidopsis
  misc_feature (1)..(370): Homolog of NCBI NO: 15219818 NR Description: ATP citrate-lyase, putative
  misc_feature (1)..(364): Homolog of NCBI NO: 31235932 NR Description: ENSANGP00000012364 [Anopheles gambiae]
  misc_feature (1)..(359): Homolog of NCBI NO: 8392839 NR Description: ATP citrate lyase [Rattus norvegicus]
  misc_feature (1)..(370): Homolog of NCBI NO: 15919089 NR Description: ATP citrate lyase b-subunit [Lupinus albus]
  misc_feature (1)..(368): Homolog of NCBI NO: 15217510 NR Description: unknown protein; protein id: At1g09430.1
MKLVVKPDMLFGKRGKSGLVALNLDLAQVRQFVKERLGVEVEMGGCKAPITTFIVEPFVPHDQEYYLSIVSERLGNTISFSECGGIEIEENWDKVKTIFLPTEKQMTPDACAPLIATLPLEVRTKIGGFIRAVFSVFQDLDFSFLEMNPFTLVNGEPYPLDMRGELDDTAAFKNFNKWGNIVFPLPFGRVLSPSESFIHELDEKTSASLKFTVLNPKGRIWTMVAGGGASVIYADTVGDLGYASELGNYAEYSGAPKEEEVLQYARVLLDCATSDPDGRKRALLIGGGIANFTDVASTFSGIIRALREKESKLKAARMNIYVRRGGPNYQTGLAKMRTLGAELGVPIEVYGPEATMTGICKEAIDCIMAA

SEQ ID NO: 2533 - protein, 362 aa, Zea mays subsp. mays
  peptide (1)..(362): Ceres Seq. ID no. 12407979
  misc_feature (1)..(139): Pfam Name: ATP-grasp domain Pfam Description: ATP-grasp domain
  misc_feature (1)..(356): Homolog of NCBI NO: 38569421 NR Description: ATP citrate lyase isoform 1 [Homo sapiens]
  misc_feature (1)..(351): Homolog of NCBI NO: 8392839 NR Description: ATP citrate lyase [Rattus norvegicus]
  misc_feature (1)..(356): Homolog of NCBI NO: 29293809 NR Description: ATP citrate lyase [Mus musculus]
  misc_feature (1)..(356): Homolog of NCBI NO: 31235932 NR Description: ENSANGP00000012364 [Anopheles gambiae]
  misc_feature (1)..(362): Homolog of NCBI NO: 19698853 NR Description: similar to ATP-citrate-lyase [Arabidopsis
  misc_feature (1)..(362): Homolog of NCBI NO: 15219818 NR Description: ATP citrate-lyase, putative
  misc_feature (1)..(362): Homolog of NCBI NO: 21593129 NR Description: ATP citrate-lyase, putative [Arabidopsis thaliana]
  misc_feature (1)..(362): Homolog of NCBI NO: 15220186 NR Description: ATP citrate-lyase, putative
  misc_feature (1)..(362): Homolog of NCBI NO: 15919089 NR Description: ATP citrate lyase b-subunit [Lupinus albus]
  misc_feature (1)..(360): Homolog of NCBI NO: 15217510 NR Description: unknown protein; protein id: At1g09430.1
MLFGKRGKSGLVALNLDLAQVRQFVKERLGVEVEMGGCKAPITTFIVEPFVPHDQEYYLSIVSERLGNTISFSECGGIEIEENWDKVKTIFLPTEKQMTPDACAPLIATLPLEVRTKIGGFIRAVFSVFQDLDFSFLEMNPFTLVNGEPYPLDMRGELDDTAAFKNFNKWGNIVFPLPFGRVLSPSESFIHELDEKTSASLKFTVLNPKGRIWTMVAGGGASVIYADTVGDLGYASELGNYAEYSGAPKEEEVLQYARVLLDCATSDPDGRKRALLIGGGIANFTDVASTFSGIIRALREKESKLKAARMNIYVRRGGPNYQTGLAKMRTLGAELGVPIEVYGPEATMTGICKEAIDCIMAA

SEQ ID NO: 2534 - DNA, 1052 bp, Zea mays subsp. mays
  misc_feature (1)..(1052): Ceres Seq. ID no. 13499104
  misc_feature: MA Experiment ID: 108527 Result: Up-regulated in Transcription
  misc_feature: MA Experiment 108527 PARAMETER Experiment Name: Zm_5mM_NO_P Parameter: Age (day) Value: 8
  misc_feature: MA Experiment 108527 PARAMETER Experiment Name: Zm_5mM_NO_P Parameter: Organism Value: Zea mays
  misc_feature: MA Experiment 108527 PARAMETER Experiment Name: Zm_5mM_NO_P Parameter: Plant Line Value: 35A19
  misc_feature: MA Experiment 108527 PARAMETER Experiment Name: Zm_5mM_NO_P Parameter: Timepoint (hr) Value: 6
  misc_feature: MA Experiment 108527 PARAMETER Experiment Name: Zm_5mM_NO_P Parameter: Tissue Value: Aerial
  misc_feature: MA Experiment 108527 PARAMETER Experiment Name: Zm_5mM_NO_P Parameter: Treatment Value: 5mM NO vs. No Treatment
  misc_feature: MA Experiment ID: 108534 Result: Up-regulated in Transcription
  misc_feature: MA Experiment 108534 PARAMETER Experiment Name: Zm_4deg_Cold_P Parameter: Age (hr) Value: 8
  misc_feature: MA Experiment 108534 PARAMETER Experiment Name: Zm_4deg_Cold_P Parameter: Organism Value: Zea mays
  misc_feature: MA Experiment 108534 PARAMETER Experiment Name: Zm_4deg_Cold_P Parameter: Plant Line Value: 35A19
  misc_feature: MA Experiment 108534 PARAMETER Experiment Name: Zm_4deg_Cold_P Parameter: Temperature (deg C) Value: 4 vs. 22
  misc_feature: MA Experiment 108534 PARAMETER Experiment Name: Zm_4deg_Cold_P Parameter: Timepoint (hr) Value: 6
  misc_feature: MA Experiment 108534 PARAMETER Experiment Name: Zm_4deg_Cold_P Parameter: Tissue Value: Aerial
  misc_feature: MA Experiment ID: 108535 Result: Down-regulated in Transcription
  misc_feature: MA Experiment 108535 PARAMETER Experiment Name: Zm_Meristem_P Parameter: Age (day) Value: 8
  misc_feature: MA Experiment 108535 PARAMETER Experiment Name: Zm_Meristem_P Parameter: Organism Value: Zea mays
  misc_feature: MA Experiment 108535 PARAMETER Experiment Name: Zm_Meristem_P Parameter: Plant Line Value: 35A19
  misc_feature: MA Experiment 108535 PARAMETER Experiment Name: Zm_Meristem_P Parameter: Tissue Value: Root Meristem vs. Above Root Meristem
  misc_feature: MA Experiment ID: 108544 Result: Down-regulated in Transcription
  misc_feature: MA Experiment ID: 108559 Result: Up-regulated in Transcription
  misc_feature: MA Experiment 108559 PARAMETER Experiment Name: Zm_5mM_NO_P Parameter: Age (day) Value: 8
  misc_feature: MA Experiment 108559 PARAMETER Experiment Name: Zm_5mM_NO_P Parameter: Organism Value: Zea mays
  misc_feature: MA Experiment 108559 PARAMETER Experiment Name: Zm_5mM_NO_P Parameter: Plant Line Value: 35A19
  misc_feature: MA Experiment 108559 PARAMETER Experiment Name: Zm_5mM_NO_P Parameter: Timepoint (hr) Value: 12
  misc_feature: MA Experiment 108559 PARAMETER Experiment Name: Zm_5mM_NO_P Parameter: Tissue Value: Aerial
  misc_feature: MA Experiment 108559 PARAMETER Experiment Name: Zm_5mM_NO_P Parameter: Treatment Value: 5mM NO vs. No Treatment
  misc_feature: MA Experiment ID: 20000477 Result: Up-regulated in Transcription
  misc_feature: MA Experiment 20000477 PARAMETER Experiment Name: Zm_5mM_SA_P Parameter: Age (day) Value: 10
  misc_feature: MA Experiment 20000477 PARAMETER Experiment Name: Zm_5mM_SA_P Parameter: Organism Value: Zea mays
  misc_feature: MA Experiment 20000477 PARAMETER Experiment Name: Zm_5mM_SA_P Parameter: Plant Line Value: 35A19
  misc_feature: MA Experiment 20000477 PARAMETER Experiment Name: Zm_5mM_SA_P Parameter: Timepoint (hr) Value: 48
  misc_feature: MA Experiment 20000477 PARAMETER Experiment Name: Zm_5mM_SA_P Parameter: Tissue Value: Aerial
  misc_feature: MA Experiment 20000477 PARAMETER Experiment Name: Zm_5mM_SA_P Parameter: Treatment Value: 5mM SA vs. No Treatment
  misc_feature: MA Experiment ID: 20000478 Result: Up-regulated in Transcription
  misc_feature: MA Experiment 20000478 PARAMETER Experiment Name: Zm_5mM_SA_P Parameter: Age (day) Value: 11
  misc_feature: MA Experiment 20000478 PARAMETER Experiment Name: Zm_5mM_SA_P Parameter: Organism Value: Zea mays
  misc_feature: MA Experiment 20000478 PARAMETER Experiment Name: Zm_5mM_SA_P Parameter: Plant Line Value: 35A19
  misc_feature: MA Experiment 20000478 PARAMETER Experiment Name: Zm_5mM_SA_P Parameter: Timepoint (hr) Value: 72
  misc_feature: MA Experiment 20000478 PARAMETER Experiment Name: Zm_5mM_SA_P Parameter: Tissue Value: Aerial
  misc_feature: MA Experiment 20000478 PARAMETER Experiment Name: Zm_5mM_SA_P Parameter: Treatment Value: 5mM SA vs. No Treatment
  misc_feature: MA Experiment ID: 20000535 Result: Down-regulated in Transcription
  misc_feature: MA Experiment 20000535 PARAMETER Experiment Name: Zm_Hybrid_Seed_Dev_P Parameter: DAP Value: 30 vs. 12
  misc_feature: MA Experiment 20000535 PARAMETER Experiment Name: Zm_Hybrid_Seed_Dev_P Parameter: Organism Value: Zea mays
  misc_feature: MA Experiment 20000535 PARAMETER Experiment Name: Zm_Hybrid_Seed_Dev_P Parameter: Plant Line Value: 35A19
  misc_feature: MA Experiment 20000535 PARAMETER Experiment Name: Zm_Hybrid_Seed_Dev_P Parameter: Tissue Value: Embryo vs. Unfert Floret
  misc_feature: MA Experiment ID: 20000626 Result: Up-regulated in Transcription
  misc_feature: MA Experiment 20000626 PARAMETER Experiment Name: Zm_Herbicide-Treatments_P Parameter: Timepoint (hr) Value: 12
  misc_feature: MA Experiment 20000626 PARAMETER Experiment Name: Zm_Herbicide-Treatments_P Parameter: Tissue Value: Aerial
  misc_feature: MA Experiment 20000626 PARAMETER Experiment Name: Zm_Herbicide-Treatments_P Parameter: Treatment Value: Roundup vs. No Treatment
aaccagcaccagcgccagcaacagcaacagctgtggttttagcacaagaaggacgaggaagaagcgcagctgcgtttcttggacggtgagcgcggctactccggcggacatggcgaccaacagtgccctggcgaagctggcgccgctggaagccatcctgttcgacatcgacggcacgctctgcgactccgaccccatccacttctgcgccttccgagagctcctgcagcaggccggcttcaacggcggtgtccccatcacggaggagttctacagcgccaacatcagcgggggccacaacgacgacctcgccaggtcgctgttcccgggcatggatcaccagaaggcgatgcggttcatggatgataaagaagctatgttcagaaagttggcgcctgggcagctgaagcccgtggatgggctgcaggagctgtgcggatggatggaaggccgcgacatgaagcgcgcggcggtgacgaacgccccgagggcgaacgccgagctgatgctgtcgctgctggggctcaccgacttcttcccggtgctcgtcatcgggagcgagtgcgaccgggccaagccgttccctgacccgtacctcaaggcgctccagctcatcgacgcatcgcctcaacacaccttcatatttgaagactctgcatcgggggtccgggccggtgtggctgccggagtgcccgtggttggcctgacgacgaggaaccccgggaaggtgctgaaagacgcaggggccagcttgctggtcaaggattttcaggacccggagctgctgtccgtgcttcaacaggtggaggtcgaacccgcagcggagaatgcacaaggctgatgggtcgggcattgcggaaaatgtcatgctggacagactagccatcagcgattctttcacggagtggaatagctgtgtaactgcatcgtggaataaactaactccggtcggttcctcggcaggaacctggagccggtgcgcatggatgtgtgctgtgtgcaaaacctggcgcctactacactggttcttaacatgcaacaggcattttggc

SEQ ID NO: 2535 - protein, 279 aa, Zea mays subsp. mays
  peptide (1)..(279): Ceres Seq. ID no. 13499105
  misc_feature (49)..(238): Pfam Name: haloacid dehalogenase-like hydrolase Pfam Description: haloacid dehalogenase-like hydrolase
  misc_feature (51)..(277): Homolog of NCBI NO: 34496852 NR Description: probable beta-phosphoglucomutase
  misc_feature (49)..(265): Homolog of NCBI NO: 23042473 NR Description: hypothetical protein [Trichodesmium erythraeum
  misc_feature (49)..(272): Homolog of NCBI NO: 17228223 NR Description: hypothetical protein [Nostoc sp. PCC 7120]
  misc_feature (49)..(266): Homolog of NCBI NO: 37521914 NR Description: hypothetical protein glr2345 [Gloeobacter
  misc_feature (49)..(272): Homolog of NCBI NO: 23127812 NR Description: hypothetical protein [Nostoc punctiforme]
  misc_feature (66)..(269): Homolog of NCBI NO: 25408616 NR Description: hypothetical protein At2g38740 [imported] -
  misc_feature (42)..(278): Homolog of NCBI NO: 34897820 NR Description: P0514G12.30 [Oryza sativa (japonica
  misc_feature (115)..(274): Homolog of NCBI NO: 37700485 NR Description: putative beta-phosphoglucomutase [Oryza sativa]
  misc_feature (42)..(269): Homolog of NCBI NO: 18404847 NR Description: haloacid dehalogenase-like hydrolase family
  misc_feature (35)..(274): Homolog of NCBI NO: 37536998 NR Description: putative beta-phosphoglucomutase
TSTSASNSNSCGFSTRRTRKKRSCVSWTVSAATPADMATNSALAKLAPLEAILFDIDGTLCDSDPIHFCAFRELLQQAGFNGGVPITEEFYSANISGGHNDDLARSLFPGMDHQKAMRFMDDKEAMFRKLAPGQLKPVDGLQELCGWMEGRDMKRAAVTNAPRANAELMLSLLGLTDFFPVLVIGSECDRAKPFPDPYLKALQLIDASPQHTFIFEDSASGVRAGVAAGVPVVGLTTRNPGKVLKDAGASLLVKDFQDPELLSVLQQVEVEPAAENAQG

SEQ ID NO: 2536 - protein, 243 aa, Zea mays subsp. mays
  peptide (1)..(243): Ceres Seq. ID no. 13499106
  misc_feature (13)..(202): Pfam Name: haloacid dehalogenase-like hydrolase Pfam Description: haloacid dehalogenase-like hydrolase
  misc_feature (15)..(241): Homolog of NCBI NO: 34496852 NR Description: probable beta-phosphoglucomutase
  misc_feature (13)..(229): Homolog of NCBI NO: 23042473 NR Description: hypothetical protein [Trichodesmium erythraeum
  misc_feature (13)..(236): Homolog of NCBI NO: 17228223 NR Description: hypothetical protein [Nostoc sp. PCC 7120]
  misc_feature (13)..(230): Homolog of NCBI NO: 37521914 NR Description: hypothetical protein glr2345 [Gloeobacter
  misc_feature (13)..(236): Homolog of NCBI NO: 23127812 NR Description: hypothetical protein [Nostoc punctiforme]
  misc_feature (30)..(233): Homolog of NCBI NO: 25408616 NR Description: hypothetical protein At2g38740 [imported] -
  misc_feature (6)..(242): Homolog of NCBI NO: 34897820 NR Description: P0514G12.30 [Oryza sativa (japonica
  misc_feature (79)..(238): Homolog of NCBI NO: 37700485 NR Description: putative beta-phosphoglucomutase [Oryza sativa]
  misc_feature (6)..(233): Homolog of NCBI NO: 18404847 NR Description: haloacid dehalogenase-like hydrolase family
  misc_feature (1)..(238): Homolog of NCBI NO: 37536998 NR Description: putative beta-phosphoglucomutase
MATNSALAKLAPLEAILFDIDGTLCDSDPIHFCAFRELLQQAGFNGGVPITEEFYSANISGGHNDDLARSLFPGMDHQKAMRFMDDKEAMFRKLAPGQLKPVDGLQELCGWMEGRDMKRAAVTNAPRANAELMLSLLGLTDFFPVLVIGSECDRAKPFPDPYLKALQLIDASPQHTFIFEDSASGVRAGVAAGVPVVGLTTRNPGKVLKDAGASLLVKDFQDPELLSVLQQVEVEPAAENAQG

SEQ ID NO: 2537 - protein, 169 aa, Zea mays subsp. mays
  peptide (1)..(169): Ceres Seq. ID no. 13499107
  misc_feature (1)..(128): Pfam Name: haloacid dehalogenase-like hydrolase Pfam Description: haloacid dehalogenase-like hydrolase
  misc_feature (1)..(167): Homolog of NCBI NO: 34496852 NR Description: probable beta-phosphoglucomutase
  misc_feature (1)..(155): Homolog of NCBI NO: 23042473 NR Description: hypothetical protein [Trichodesmium erythraeum
  misc_feature (1)..(162): Homolog of NCBI NO: 17228223 NR Description: hypothetical protein [Nostoc sp. PCC 7120]
  misc_feature (1)..(156): Homolog of NCBI NO: 37521914 NR Description: hypothetical protein glr2345 [Gloeobacter
  misc_feature (1)..(162): Homolog of NCBI NO: 23127812 NR Description: hypothetical protein [Nostoc punctiforme]
  misc_feature (1)..(159): Homolog of NCBI NO: 25408616 NR Description: hypothetical protein At2g38740 [imported] -
  misc_feature (1)..(168): Homolog of NCBI NO: 34897820 NR Description: P0514G12.30 [Oryza sativa (japonica
  misc_feature (5)..(164): Homolog of NCBI NO: 37700485 NR Description: putative beta-phosphoglucomutase [Oryza sativa]
  misc_feature (1)..(159): Homolog of NCBI NO: 18404847 NR Description: haloacid dehalogenase-like hydrolase family
  misc_feature (1)..(164): Homolog of NCBI NO: 37536998 NR Description: putative beta-phosphoglucomutase
MDHQKAMRFMDDKEAMFRKLAPGQLKPVDGLQELCGWMEGRDMKRAAVTNAPRANAELMLSLLGLTDFFPVLVIGSECDRAKPFPDPYLKALQLIDASPQHTFIFEDSASGVRAGVAAGVPVVGLTTRNPGKVLKDAGASLLVKDFQDPELLSVLQQVEVEPAAENAQG

SEQ ID NO: 2538 - DNA, 1452 bp, Zea mays subsp. mays
  misc_feature (1)..(1452): Ceres Seq. ID no. 12367355
  misc_feature: MA Experiment ID: 108529 Result: Up-regulated in Transcription
  misc_feature: MA Experiment 108529 PARAMETER Experiment Name: Zm_Imbibed_Seeds_P Parameter: Age (day) Value: 5 vs. 2
  misc_feature: MA Experiment 108529 PARAMETER Experiment Name: Zm_Imbibed_Seeds_P Parameter: Organism Value: Zea mays
  misc_feature: MA Experiment 108529 PARAMETER Experiment Name: Zm_Imbibed_Seeds_P Parameter: Plant Line Value: 35A19
  misc_feature: MA Experiment 108529 PARAMETER Experiment Name: Zm_Imbibed_Seeds_P Parameter: Tissue Value: Roots vs. Embryo
  misc_feature: MA Experiment ID: 108535 Result: Down-regulated in Transcription
  misc_feature: MA Experiment 108535 PARAMETER Experiment Name: Zm_Meristem_P Parameter: Age (day) Value: 8
  misc_feature: MA Experiment 108535 PARAMETER Experiment Name: Zm_Meristem_P Parameter: Organism Value: Zea mays
  misc_feature: MA Experiment 108535 PARAMETER Experiment Name: Zm_Meristem_P Parameter: Plant Line Value: 35A19
  misc_feature: MA Experiment 108535 PARAMETER Experiment Name: Zm_Meristem_P Parameter: Tissue Value: Root Meristem vs. Above Root Meristem
  misc_feature: MA Experiment ID: 108543 Result: Up-regulated in Transcription
  misc_feature: MA Experiment ID: 108545 Result: Down-regulated in Transcription
  misc_feature: MA Experiment 108545 PARAMETER Experiment Name: Zm_Imbibed_Seeds_P Parameter: Age (day) Value: 3 vs. 2
  misc_feature: MA Experiment 108545 PARAMETER Experiment Name: Zm_Imbibed_Seeds_P Parameter: Organism Value: Zea mays
  misc_feature: MA Experiment 108545 PARAMETER Experiment Name: Zm_Imbibed_Seeds_P Parameter: Plant Line Value: 35A19
  misc_feature: MA Experiment 108545 PARAMETER Experiment Name: Zm_Imbibed_Seeds_P Parameter: Tissue Value: Aerial vs. Embryo
  misc_feature: MA Experiment ID: 108547 Result: Down-regulated in Transcription
  misc_feature: MA Experiment 108547 PARAMETER Experiment Name: Zm_Imbibed_Seeds_P Parameter: Age (day) Value: 4 vs. 2
  misc_feature: MA Experiment 108547 PARAMETER Experiment Name: Zm_Imbibed_Seeds_P Parameter: Organism Value: Zea mays
  misc_feature: MA Experiment 108547 PARAMETER Experiment Name: Zm_Imbibed_Seeds_P Parameter: Plant Line Value: 35A19
  misc_feature: MA Experiment 108547 PARAMETER Experiment Name: Zm_Imbibed_Seeds_P Parameter: Tissue Value: Aerial vs. Embryo
  misc_feature: MA Experiment ID: 108689 Result: Down-regulated in Transcription
  misc_feature: MA Experiment 108689 PARAMETER Experiment Name: Zm_Drought_Roots_P Parameter: Age (day) Value: 9
  misc_feature: MA Experiment 108689 PARAMETER Experiment Name: Zm_Drought_Roots_P Parameter: Organism Value: Zea mays
  misc_feature: MA Experiment 108689 PARAMETER Experiment Name: Zm_Drought_Roots_P Parameter: Plant Line Value: 35A19
  misc_feature: MA Experiment 108689 PARAMETER Experiment Name: Zm_Drought_Roots_P Parameter: Timepoint (hr) Value: 24
  misc_feature: MA Experiment 108689 PARAMETER Experiment Name: Zm_Drought_Roots_P Parameter: Tissue Value: Roots
  misc_feature: MA Experiment 108689 PARAMETER Experiment Name: Zm_Drought_Roots_P Parameter: Treatment Value: Drought vs. No Drought
  misc_feature: MA Experiment ID: 20000535 Result: Down-regulated in Transcription
  misc_feature: MA Experiment 20000535 PARAMETER Experiment Name: Zm_Hybrid_Seed_Dev_P Parameter: DAP Value: 30 vs. 12
  misc_feature: MA Experiment 20000535 PARAMETER Experiment Name: Zm_Hybrid_Seed_Dev_P Parameter: Organism Value: Zea mays
  misc_feature: MA Experiment 20000535 PARAMETER Experiment Name: Zm_Hybrid_Seed_Dev_P Parameter: Plant Line Value: 35A19
  misc_feature: MA Experiment 20000535 PARAMETER Experiment Name: Zm_Hybrid_Seed_Dev_P Parameter: Tissue Value: Embryo vs. Unfert Floret
gcaaccaccgtgcgcgcatcaactcggcacaaccggtgagtcttctgcatcttcgatggagaaccagggacccaaacccatccgatgcaaagcggccgtgtgcagggccgccggcgagccgctggccatcgaggaggtcgtcgttgacacgcccaaggcgcacgaggtcaggatacggatcatctgcacgtcgctctgccacagcgacgtcacgttctggcgcatgaaggatctccctgacaatatccccagaatatttggccacgaagccttcggggtggtggagagcgtgggtgaacaggtggacgagttcgcggcgggcgacgcggtggtgccgacgttcctggggcagtgcagcgagtgcgtggactgcaggtcggcgcggagcaacatgtgctccaagtaccggttcgcggtgcgcccggggatgccgcgcgacggcaccacccggttcaccgacggccaggggcgcccgctgcaccacttcttcggcgtgtccagcttcgccgagtacaccgtggtggacgtgaaccaggtcgtcaagctcaaccccgccgtgccgccggcactcgcctgcctgctcagctgcggcgcctccacgggggttggagccgcatggaagcaggcgaaagttgagcctggatcttcggtcgctatcttcggcctcggcgctgtaggattggcggtggctgaaggagccaggatttgtggggcgtcgaagataatcggcgtggatataaaccctgataaatgcgagcttggaaagaagttcggcgtgacacatttcatcaatcccaaagagctcggtgaggagaaacctgtccaccaggcgatcgccgagatgaccgacggtggcgcggactactgcttcgagtgcattggactggcggcgctgatgaacgacgcgttccggagctcccgagacgggtggggcaagacgatcattcttggggtggaaatgcacggtgcccccctctgcatctctcctcacgagatcctccacgggaagtctgtcatcgggtccatgttcggcggggtgaagcctaagcaggatatccccattctcgccgacaagtacatgaacaaggagctggagcttgacaagttcataacccatgaagttggcctcaaggacatcaaccaagcttttgacctcctgctgcaagggaagagtctcaggtgcaccatatggatggacaagtgatgcaataaccagagttacgcatcggaacctgaagatgctatgatgcttccacctcgtttcagtgaaaataattgtttcatcagctgccaaaagaaatgttatatgtatcttaaattcgagttttccattccttttcttcacgtcatcactcaaacatgttaaaatgtgcccatgttttgatttttactgctttcaaaagttgtgactatccttatcttattagtgatattttcggaatttatctggcg

SEQ ID NO: 2539 - protein, 400 aa, Zea mays subsp. mays
  peptide (1)..(400): Ceres Seq. ID no. 12367356
  misc_feature (25)..(400): Homolog of NCBI NO: 18415840 NR Description: alcohol dehydrogenase like protein
  misc_feature (25)..(400): Homolog of NCBI NO: 21618210 NR Description: alcohol dehydrogenase like protein [Arabidopsis
  misc_feature (25)..(400): Homolog of NCBI NO: 15219884 NR Description: alcohol dehydrogenase ADH, putative; protein id:
  misc_feature (21)..(400): Homolog of NCBI NO: 15219882 NR Description: alcohol dehydrogenase ADH, putative
  misc_feature (13)..(398): Homolog of NCBI NO: 15238330 NR Description: alcohol dehydrogenase
  misc_feature (17)..(400): Homolog of NCBI NO: 1076580 NR Description: probable alcohol dehydrogenase (EC 1.1.1.1) ADH3b
  misc_feature (17)..(400): Homolog of NCBI NO: 7705215 NR Description: alcohol dehydrogenase ADH [Lycopersicon
  misc_feature (19)..(399): Homolog of NCBI NO: 34906828 NR Description: contains EST C99136(E10204)~similar to alcohol
  misc_feature (25)..(400): Homolog of NCBI NO: 1076579 NR Description: probable alcohol dehydrogenase (EC 1.1.1.1) ADH3a
  misc_feature (25)..(400): Homolog of NCBI NO: 7705214 NR Description: alcohol dehydrogenase ADH [Lycopersicon
QPPCAHQLGTTGESSASSMENQGPKPIRCKAAVCRAAGEPLAIEEVVVDTPKAHEVRIRIICTSLCHSDVTFWRMKDLPDNIPRIFGHEAFGVVESVGEQVDEFAAGDAVVPTFLGQCSECVDCRSARSNMCSKYRFAVRPGMPRDGTTRFTDGQGRPLHHFFGVSSFAEYTVVDVNQVVKLNPAVPPALACLLSCGASTGVGAAWKQAKVEPGSSVAIFGLGAVGLAVAEGARICGASKIIGVDINPDKCELGKKFGVTHFINPKELGEEKPVHQAIAEMTDGGADYCFECIGLAALMNDAFRSSRDGWGKTIILGVEMHGAPLCISPHEILHGKSVIGSMFGGVKPKQDIPILADKYMNKELELDKFITHEVGLKDINQAFDLLLQGKSLRCTIWMDK

SEQ ID NO: 2540 - protein, 382 aa, Zea mays subsp. mays
  peptide (1)..(382): Ceres Seq. ID no. 12367357
  misc_feature (7)..(382): Homolog of NCBI NO: 18415840 NR Description: alcohol dehydrogenase like protein
  misc_feature (7)..(382): Homolog of NCBI NO: 21618210 NR Description: alcohol dehydrogenase like protein [Arabidopsis
  misc_feature (7)..(382): Homolog of NCBI NO: 15219884 NR Description: alcohol dehydrogenase ADH, putative; protein id:
  misc_feature (3)..(382): Homolog of NCBI NO: 15219882 NR Description: alcohol dehydrogenase ADH, putative
  misc_feature (1)..(380): Homolog of NCBI NO: 15238330 NR Description: alcohol dehydrogenase
  misc_feature (1)..(382): Homolog of NCBI NO: 1076580 NR Description: probable alcohol dehydrogenase (EC 1.1.1.1) ADH3b
  misc_feature (1)..(382): Homolog of NCBI NO: 7705215 NR Description: alcohol dehydrogenase ADH [Lycopersicon
  misc_feature (1)..(381): Homolog of NCBI NO: 34906828 NR Description: contains EST C99136(E10204)~similar to alcohol
  misc_feature (7)..(382): Homolog of NCBI NO: 1076579 NR Description: probable alcohol dehydrogenase (EC 1.1.1.1) ADH3a
  misc_feature (7)..(382): Homolog of NCBI NO: 7705214 NR Description: alcohol dehydrogenase ADH [Lycopersicon
MENQGPKPIRCKAAVCRAAGEPLAIEEVVVDTPKAHEVRIRIICTSLCHSDVTFWRMKDLPDNIPRIFGHEAFGVVESVGEQVDEFAAGDAVVPTFLGQCSECVDCRSARSNMCSKYRFAVRPGMPRDGTTRFTDGQGRPLHHFFGVSSFAEYTVVDVNQVVKLNPAVPPALACLLSCGASTGVGAAWKQAKVEPGSSVAIFGLGAVGLAVAEGARICGASKIIGVDINPDKCELGKKFGVTHFINPKELGEEKPVHQAIAEMTDGGADYCFECIGLAALMNDAFRSSRDGWGKTIILGVEMHGAPLCISPHEILHGKSVIGSMFGGVKPKQDIPILADKYMNKELELDKFITHEVGLKDINQAFDLLLQGKSLRCTIWMDK

SEQ ID NO: 2541 - protein, 326 aa, Zea mays subsp. mays
  peptide (1)..(326): Ceres Seq. ID no. 12367358
  misc_feature (1)..(326): Homolog of NCBI NO: 18415840 NR Description: alcohol dehydrogenase like protein
  misc_feature (1)..(326): Homolog of NCBI NO: 21618210 NR Description: alcohol dehydrogenase like protein [Arabidopsis
  misc_feature (1)..(326): Homolog of NCBI NO: 15219884 NR Description: alcohol dehydrogenase ADH, putative; protein id:
  misc_feature (1)..(326): Homolog of NCBI NO: 15219882 NR Description: alcohol dehydrogenase ADH, putative
  misc_feature (1)..(324): Homolog of NCBI NO: 15238330 NR Description: alcohol dehydrogenase
  misc_feature (1)..(326): Homolog of NCBI NO: 1076580 NR Description: probable alcohol dehydrogenase (EC 1.1.1.1) ADH3b
  misc_feature (1)..(326): Homolog of NCBI NO: 7705215 NR Description: alcohol dehydrogenase ADH [Lycopersicon
  misc_feature (1)..(325): Homolog of NCBI NO: 34906828 NR Description: contains EST C99136(E10204)~similar to alcohol
  misc_feature (1)..(326): Homolog of NCBI NO: 1076579 NR Description: probable alcohol dehydrogenase (EC 1.1.1.1) ADH3a
  misc_feature (1)..(326): Homolog of NCBI NO: 7705214 NR Description: alcohol dehydrogenase ADH [Lycopersicon
MKDLPDNIPRIFGHEAFGVVESVGEQVDEFAAGDAVVPTFLGQCSECVDCRSARSNMCSKYRFAVRPGMPRDGTTRFTDGQGRPLHHFFGVSSFAEYTVVDVNQVVKLNPAVPPALACLLSCGASTGVGAAWKQAKVEPGSSVAIFGLGAVGLAVAEGARICGASKIIGVDINPDKCELGKKFGVTHFINPKELGEEKPVHQAIAEMTDGGADYCFECIGLAALMNDAFRSSRDGWGKTIILGVEMHGAPLCISPHEILHGKSVIGSMFGGVKPKQDIPILADKYMNKELELDKFITHEVGLKDINQAFDLLLQGKSLRCTIWMDK

SEQ ID NO: 2542 - DNA, 1234 bp, Zea mays subsp. mays
  misc_feature (1)..(1234): Ceres Seq. ID no. 12410659
  misc_feature: MA Experiment ID: 20000477 Result: Down-regulated in Transcription
  misc_feature: MA Experiment 20000477 PARAMETER Experiment Name: Zm_5mM_SA_P Parameter: Age (day) Value: 10
  misc_feature: MA Experiment 20000477 PARAMETER Experiment Name: Zm_5mM_SA_P Parameter: Organism Value: Zea mays
  misc_feature: MA Experiment 20000477 PARAMETER Experiment Name: Zm_5mM_SA_P Parameter: Plant Line Value: 35A19
  misc_feature: MA Experiment 20000477 PARAMETER Experiment Name: Zm_5mM_SA_P Parameter: Timepoint (hr) Value: 48
  misc_feature: MA Experiment 20000477 PARAMETER Experiment Name: Zm_5mM_SA_P Parameter: Tissue Value: Aerial
  misc_feature: MA Experiment 20000477 PARAMETER Experiment Name: Zm_5mM_SA_P Parameter: Treatment Value: 5mM SA vs. No Treatment
  misc_feature: MA Experiment ID: 20000478 Result: Down-regulated in Transcription
  misc_feature: MA Experiment 20000478 PARAMETER Experiment Name: Zm_5mM_SA_P Parameter: Age (day) Value: 11
  misc_feature: MA Experiment 20000478 PARAMETER Experiment Name: Zm_5mM_SA_P Parameter: Organism Value: Zea mays
  misc_feature: MA Experiment 20000478 PARAMETER Experiment Name: Zm_5mM_SA_P Parameter: Plant Line Value: 35A19
  misc_feature: MA Experiment 20000478 PARAMETER Experiment Name: Zm_5mM_SA_P Parameter: Timepoint (hr) Value: 72
  misc_feature: MA Experiment 20000478 PARAMETER Experiment Name: Zm_5mM_SA_P Parameter: Tissue Value: Aerial
  misc_feature: MA Experiment 20000478 PARAMETER Experiment Name: Zm_5mM_SA_P Parameter: Treatment Value: 5mM SA vs. No Treatment
  misc_feature: MA Experiment ID: 20000479 Result: Down-regulated in Transcription
  misc_feature: MA Experiment 20000479 PARAMETER Experiment Name: Zm_Drought_P Parameter: Age (day) Value: 10
  misc_feature: MA Experiment 20000479 PARAMETER Experiment Name: Zm_Drought_P Parameter: Organism Value: Zea mays
  misc_feature: MA Experiment 20000479 PARAMETER Experiment Name: Zm_Drought_P Parameter: Plant Line Value: 35A19
  misc_feature: MA Experiment 20000479 PARAMETER Experiment Name: Zm_Drought_P Parameter: Timepoint (hr) Value: 48
  misc_feature: MA Experiment 20000479 PARAMETER Experiment Name: Zm_Drought_P Parameter: Tissue Value: Aerial
  misc_feature: MA Experiment 20000479 PARAMETER Experiment Name: Zm_Drought_P Parameter: Treatment Value: Drought vs. No Drought
atataatccgctctctctcccccggtttctcttgtcttcttgctgcggcgatggaccaagaaacctcacgggaaccccactccttgaggagccgtccagtgccgcattagtgggttccattcttctttggatcgctgctcgcgatcgcattgcccgcgtttcttttggccgtcttggttcgttcttgattcttggacgaggtgggatttggagagccgagagcggcgcggcagcggcgggtttctcggtcgggctagattgtttccatcgagatggtgggcggcggagggcattcgtcgatggaccacactggcgccaaggacctcgagcgcggcgagctgcgccgtggcgcgcctgagtttgcggacggcgacgatggagacggggaagaaagccagtacttctcggacgcggaggaccggtcgtggccgtcgcactcacgccacgactccaccgcctacgaggactacgtctcgccgtgcgtgtccgcccgcgcaagctccgtcgacgccgacgccgacgccgacgccgacggcgaggccgtcagacaacactgcaggaagtcgtcgtgcgtgtcagagggctcgctggacgacgttgacctggaggccggactgagcgagatcatcaaggccagccctgagaaggccgaacagaactgtcgcatttgccaccttggcctggagagcgcggcggccgagtccggtgccggcatcacgctcggctgctcctgcaagggggacttatcctacgcccacaagcagtgcgccgacacctggttcaagatcagaggcaacaaggtctgtgagatatgtagctcgactgcatccaacgtggtagtcttgggggatcccgagttcagcgaccagtggagtgaaacaaacagtgccgccgccgcggcgcaggcgccgccgccaccagccgaaccccggaggttctggcaggggcatcggttcctcaacttcctcctcgcctgcatggtgttcgccttcgtcatctcttggctcttccacttcaacgtccccggctaacaagttctttggcgcacatacatggcccccgaataaaaaaaaaagctccaaaaaagccatcactccggacgccgggtcggtaagttagcggatctggaagaacaggctggtgggtgctgggttggttgaagtaaaagctcgacatgggtgggggggccgggggacgatgatactgcattttttgtttatgatgaatgcctttg

SEQ ID NO: 2543 - protein, 252 aa, Zea mays subsp. mays
  peptide (1)..(252): Ceres Seq. ID no. 12410660
  misc_feature (130)..(181): Pfam Name: Zinc finger, C3HC4 type (RING finger) Pfam Description: Zinc finger, C3HC4 type (RING finger)
  misc_feature (120)..(250): Homolog of NCBI NO: 9759231 NR Description: gb|AAD32776.1~gene_id:K19M22.19~similar to
  misc_feature (64)..(251): Homolog of NCBI NO: 15239254 NR Description: putative protein; protein id: At5g05830.1
  misc_feature (101)..(190): Homolog of NCBI NO: 13605863 NR Description: AT5g60580/muf9_230 [Arabidopsis thaliana]
  misc_feature (54)..(176): Homolog of NCBI NO: 15240886 NR Description: putative protein; protein id: At5g01070.1
  misc_feature (145)..(250): Homolog of NCBI NO: 15237796 NR Description: putative protein
  misc_feature (96)..(250): Homolog of NCBI NO: 15224415 NR Description: unknown protein; protein id: At2g37950.1
  misc_feature (145)..(250): Homolog of NCBI NO: 21537129 NR Description: unknown [Arabidopsis thaliana]
  misc_feature (46)..(201): Homolog of NCBI NO: 29725746 NR Description: hypothetical protein [Arabidopsis thaliana]
  misc_feature (101)..(190): Homolog of NCBI NO: 18424371 NR Description: putative protein
  misc_feature (27)..(252): Homolog of NCBI NO: 34908318 NR Description: P0529H11.12 [Oryza sativa (japonica
MVGGGGHSSMDHTGAKDLERGELRRGAPEFADGDDGDGEESQYFSDAEDRSWPSHSRHDSTAYEDYVSPCVSARASSVDADADADADGEAVRQHCRKSSCVSEGSLDDVDLEAGLSEIIKASPEKAEQNCRICHLGLESAAAESGAGITLGCSCKGDLSYAHKQCADTWFKIRGNKVCEICSSTASNVVVLGDPEFSDQWSETNSAAAAAQAPPPPAEPRRFWQGHRFLNFLLACMVFAFVISWLFHFNVPG

SEQ ID NO: 2544 - protein, 243 aa, Zea mays subsp. mays
  peptide (1)..(243): Ceres Seq. ID no. 12410661
  misc_feature (121)..(172): Pfam Name: Zinc finger, C3HC4 type (RING finger) Pfam Description: Zinc finger, C3HC4 type (RING finger)
  misc_feature (92)..(181): Homolog of NCBI NO: 18424371 NR Description: putative protein
  misc_feature (92)..(181): Homolog of NCBI NO: 13605863 NR Description: AT5g60580/muf9_230 [Arabidopsis thaliana]
  misc_feature (37)..(192): Homolog of NCBI NO: 29725746 NR Description: hypothetical protein [Arabidopsis thaliana]
  misc_feature (45)..(167): Homolog of NCBI NO: 15240886 NR Description: putative protein; protein id: At5g01070.1
  misc_feature (136)..(241): Homolog of NCBI NO: 21537129 NR Description: unknown [Arabidopsis thaliana]
  misc_feature (136)..(241): Homolog of NCBI NO: 15237796 NR Description: putative protein
  misc_feature (87)..(241): Homolog of NCBI NO: 15224415 NR Description: unknown protein; protein id: At2g37950.1
  misc_feature (111)..(241): Homolog of NCBI NO: 9759231 NR Description: gb|AAD32776.1~gene_id:K19M22.19~similar to
  misc_feature (55)..(242): Homolog of NCBI NO: 15239254 NR Description: putative protein; protein id: At5g05830.1
  misc_feature (18)..(243): Homolog of NCBI NO: 34908318 NR Description: P0529H11.12 [Oryza sativa (japonica
MDHTGAKDLERGELRRGAPEFADGDDGDGEESQYFSDAEDRSWPSHSRHDSTAYEDYVSPCVSARASSVDADADADADGEAVRQHCRKSSCVSEGSLDDVDLEAGLSEIIKASPEKAEQNCRICHLGLESAAAESGAGITLGCSCKGDLSYAHKQCADTWFKIRGNKVCEICSSTASNVVVLGDPEFSDQWSETNSAAAAAQAPPPPAEPRRFWQGHRFLNFLLACMVFAFVISWLFHFNVPG

SEQ ID NO: 2545 - DNA, 1233 bp, Zea mays subsp. mays
  misc_feature (1)..(1233): Ceres Seq. ID no. 13564187
  misc_feature: MA Experiment ID: 108536 Result: Up-regulated in Transcription
  misc_feature: MA Experiment 108536 PARAMETER Experiment Name: Zm_Meristem_P Parameter: Age (day) Value: 8
  misc_feature: MA Experiment 108536 PARAMETER Experiment Name: Zm_Meristem_P Parameter: Organism Value: Zea mays
  misc_feature: MA Experiment 108536 PARAMETER Experiment Name: Zm_Meristem_P Parameter: Plant Line Value: 35A19
  misc_feature: MA Experiment 108536 PARAMETER Experiment Name: Zm_Meristem_P Parameter: Tissue Value: Shoot Meristem vs. Above Shoot Meristem
aacgcaacaaagccgaggtaaagcagggagcatcttgagtgttcgacagtgagccatggagaagacgtccgagagcgctataccgccggcggcatccccgctgatgctgttcgggtcgtgggcgagctcgtacacgcaccgcgtgcagctggcgctgcggctcaagggcctggagttcgactacgtggaggaggacctggggaacaagagcgacgagctgctgcgccacaaccccgtccacaagaaggtgcccgtgctcgtccacggcggccgcgcgctcccggagtccgtcattatcctccagtaccttgacgacgcctggccggagacccgcccgctgctccccgccgacgccttcgaccgcgcgctcgcgcggttctggtgccacttcgccgacgacaagctcgggccggcggtgggcgcggtgttcgcgtcgacgggggagggccaggaggcggcggtgcggcaggtgcacgagaacctggccctgatcgagtccgagctccgcgacggcgcgttccggggccgccgcttcttcggcggcgacgaggtgggcctgctggacgtcgtcctgggctgcggctcctactggctcgccgtgttcgaggaggtgaccggggtgcgcctcgtggacgccgacgccttcccgcgcttccacgcctggctgcgcgacttcgaggccctggacgaggtccgggagaccatccccgcggtggaccgcctgctcgagtacgcgcgcggcctccgccacatgctgctcggcctcgcgggggccggcgccggcgccggcgcggacgcgccctccaccgacgcccccgccgcaccgccggcctcggctgacatcgccgtcgacatttgaacgcagggcgtcgtcgcgccgggcgtctgccagcgccgtccggctagccatcagtagctagtacgtagtaccagtatagtttgcagagtcgattgcgccatgtgtggtggctgcgtgcctgtgcctgcctgccggcctggcctggagtgcggttctgctgccgccacagttaattggcccagtttgtctagctgtcgagttttttttttttcaactctctctgtctctctccgactcttcccttctttttgataaagttcgtccctgcagttaaatctctgtttgctgcgacttgttcttcttgtgtgtgagagtgggacgaaatctcgtgtgtttgtatgtggcagtttggctcgcttgttgaatgtaagcca

SEQ ID NO: 2546 - protein, 267 aa, Zea mays subsp. mays
  peptide (1)..(267): Ceres Seq. ID no. 13564188
  misc_feature (1)..(267): Homolog of NCBI NO: 11385533 NR Description: glutathione S-transferase GST 41 [Zea mays]
  misc_feature (1)..(267): Homolog of NCBI NO: 11385533 NR Description: glutathione S-transferase GST 41 [Zea mays]
  misc_feature (1)..(267): Homolog of NCBI NO: 11385533 NR Description: glutathione S-transferase GST 41 [Zea mays]
MEKTSESAIPPAASPLMLFGSWASSYTHRVQLALRLKGLEFDYVEEDLGNKSDELLRHNPVHKKVPVLVHGGRALPESVIILQYLDDAWPETRPLLPADAFDRALARFWCHFADDKLGPAVGAVFASTGEGQEAAVRQVHENLALIESELRDGAFRGRRFFGGDEVGLLDVVLGCGSYWLAVFEEVTGVRLVDADAFPRFHAWLRDFEALDEVRETIPAVDRLLEYARGLRHMLLGLAGAGAGAGADAPSTDAPAAPPASADIAVDI

SEQ ID NO: 2547 - protein, 251 aa, Zea mays subsp. mays
  peptide (1)..(251): Ceres Seq. ID no. 13564189
  misc_feature (1)..(251): Homolog of NCBI NO: 11385533 NR Description: glutathione S-transferase GST 41 [Zea mays]
  misc_feature (1)..(251): Homolog of NCBI NO: 11385533 NR Description: glutathione S-transferase GST 41 [Zea mays]
  misc_feature (1)..(251): Homolog of NCBI NO: 11385533 NR Description: glutathione S-transferase GST 41 [Zea mays]
MLFGSWASSYTHRVQLALRLKGLEFDYVEEDLGNKSDELLRHNPVHKKVPVLVHGGRALPESVIILQYLDDAWPETRPLLPADAFDRALARFWCHFADDKLGPAVGAVFASTGEGQEAAVRQVHENLALIESELRDGAFRGRRFFGGDEVGLLDVVLGCGSYWLAVFEEVTGVRLVDADAFPRFHAWLRDFEALDEVRETIPAVDRLLEYARGLRHMLLGLAGAGAGAGADAPSTDAPAAPPASADIAVDI

SEQ ID NO: 2548 - DNA, 1442 bp, Zea mays subsp. mays
  misc_feature (1)..(1442): Ceres Seq. ID no. 12414246
  misc_feature: MA Experiment ID: 108544 Result: Up-regulated in Transcription
  misc_feature: MA Experiment ID: 20000534 Result: Down-regulated in Transcription
  misc_feature: MA Experiment 20000534 PARAMETER Experiment Name: Zm_Hybrid_Pollen_P Parameter: Age (day) Value: 8
  misc_feature: MA Experiment 20000534 PARAMETER Experiment Name: Zm_Hybrid_Pollen_P Parameter: Organism Value: Zea mays
  misc_feature: MA Experiment 20000534 PARAMETER Experiment Name: Zm_Hybrid_Pollen_P Parameter: Plant Line Value: 35A19
  misc_feature: MA Experiment 20000534 PARAMETER Experiment Name: Zm_Hybrid_Pollen_P Parameter: Tissue Value: Pollen vs. Aerial
aagtgttctcttctctccaagcggacaaagcccgtccctctcctactcctcccccaaagttccgttcagttccctcccgcaggtcaaaaccctcaacctcccacgcggctcgctgggtgggtcggtcggccatggctccccccgcgctcggatctcaggtggccgccgcagcctcggttcccgtcggctcggactctctcgctaagggcgcggcgctcaagggtaacagcactctaaactttcggaccaaaccatgcatcggaatggcattagcatggaaaaacaggacccagcaaccacggcgtctgaacaaggtactctgcatgtctgttcaacaagcaagcaggagcaaggttgctgtcatgcccgtcgagttggagaaggcaaaggagccactgctccacctgtacaaaccaaaggagccttacacggccacgatcgtctctgtcgagaggcttgtaggacccagagctcctggcgaaacatgccacgttgtcattgatcatggcggcaatgttccgtactgggaaggacagagttacggcgtcattcctcctggagagaatccaaaaaaacctggatctcccaatactgttaggctctattcaattgcttctactaggtatggtgattcttttgatggaaagacagcaagcttatgtgttcgtcgtgctgtttattatgatcctgaaactggagaggaagacccatcaaagagaggtgtctgcagtaacttcctgtgtggctcaaaaccaggggacaaagttcagatcacaggcccctcgggcaaaataatgcttcttcccgaggatgatccaaatgcgactcatatcatgattgccacggggactggtgttgctccctaccgcggctacctacgtcgcatgttcatggaagatgtcccaactttcaaatttggtggtctggcttggctcttccttggtgttgcgaactctgacagccttctctatgatgaagagttcacaaactaccttcaacagtatccagacaatttcaggtacgacaaagcgctaagcagggagcagaagaacaagagcggcgggaagatgtacgtgcaggacaagatcgaggagtacagcgacgaaatcttcagactgctagatggcggtgcgcacatctacttctgtggtttgaaggggatgatgccggggatccaggacacgctcaagaaggtggctgagcaaagaggcgagagctgggaccagaagctgtcacagctgaaaaagaacaagcagtggcacgtcgaggtttactaggctataagatggcaaggattgtgattgtttagctactgagctgagaaactggacgtatgattgaacgactgtggctgcgatgtaatataacattgtagacttggattcataagcttctgctccaaatggtgaataaaatgaagcacgcggtctgtagctgctact

SEQ ID NO: 2549 - protein, 424 aa, Zea mays subsp. mays
  peptide (1)..(424): Ceres Seq. ID no. 12414247
  misc_feature (273)..(394): Pfam Name: Oxidoreductase NAD-binding domain Pfam Description: Oxidoreductase NAD-binding domain
  misc_feature (54)..(424): Homolog of NCBI NO: 18397542 NR Description: ferrodoxin NADP oxidoreductase, putative
  misc_feature (54)..(424): Homolog of NCBI NO: 30691910 NR Description: ferredoxin--NADP(+) reductase (adrenodoxin
  misc_feature (44)..(424): Homolog of NCBI NO: 3913650 NR Description: Ferredoxin--NADP reductase, root-type isozyme,
  misc_feature (109)..(424): Homolog of NCBI NO: 14719468 NR Description: Chain A, Crystal Structure Of The
  misc_feature (108)..(424): Homolog of NCBI NO: 218163 NR Description: ferredoxin-NADP+ reductase enzyme
  misc_feature (56)..(424): Homolog of NCBI NO: 7433380 NR Description: ferredoxin-NADP reductase (EC 1.18.1.2) - garden
  misc_feature (56)..(424): Homolog of NCBI NO: 3913648 NR Description: Ferredoxin--NADP reductase, root isozyme,
  misc_feature (103)..(424): Homolog of NCBI NO: 1076803 NR Description: ferredoxin-NADP reductase (EC 1.18.1.2)
  misc_feature (48)..(424): Homolog of NCBI NO: 34897132 NR Description: ferredoxin-NADP+ reductase [Oryza sativa]
  misc_feature (48)..(424): Homolog of NCBI NO: 3913653 NR Description: Ferredoxin--NADP reductase, embryo isozyme,
VFSSLQADKARPSPTPPPKFRSVPSRRSKPSTSHAARWVGRSAMAPPALGSQVAAAASVPVGSDSLAKGAALKGNSTLNFRTKPCIGMALAWKNRTQQPRRLNKVLCMSVQQASRSKVAVMPVELEKAKEPLLHLYKPKEPYTATIVSVERLVGPRAPGETCHVVIDHGGNVPYWEGQSYGVIPPGENPKKPGSPNTVRLYSIASTRYGDSFDGKTASLCVRRAVYYDPETGEEDPSKRGVCSNFLCGSKPGDKVQITGPSGKIMLLPEDDPNATHIMIATGTGVAPYRGYLRRMFMEDVPTFKFGGLAWLFLGVANSDSLLYDEEFTNYLQQYPDNFRYDKALSREQKNKSGGKMYVQDKIEEYSDEIFRLLDGGAHIYFCGLKGMMPGIQDTLKKVAEQRGESWDQKLSQLKKNKQWHVEVY

SEQ ID NO: 2550 - protein, 381 aa, Zea mays subsp. mays
  peptide (1)..(381): Ceres Seq. ID no. 12414248
  misc_feature (230)..(351): Pfam Name: Oxidoreductase NAD-binding domain Pfam Description: Oxidoreductase NAD-binding domain
  misc_feature (11)..(381): Homolog of NCBI NO: 18397542 NR Description: ferrodoxin NADP oxidoreductase, putative
  misc_feature (11)..(381): Homolog of NCBI NO: 30691910 NR Description: ferredoxin--NADP(+) reductase (adrenodoxin
  misc_feature (1)..(381): Homolog of NCBI NO: 3913650 NR Description: Ferredoxin--NADP reductase, root-type isozyme,
  misc_feature (66)..(381): Homolog of NCBI NO: 14719468 NR Description: Chain A, Crystal Structure Of The
  misc_feature (65)..(381): Homolog of NCBI NO: 218163 NR Description: ferredoxin-NADP+ reductase enzyme
  misc_feature (13)..(381): Homolog of NCBI NO: 7433380 NR Description: ferredoxin-NADP reductase (EC 1.18.1.2) - garden
  misc_feature (13)..(381): Homolog of NCBI NO: 3913648 NR Description: Ferredoxin--NADP reductase, root isozyme,
  misc_feature (60)..(381): Homolog of NCBI NO: 1076803 NR Description: ferredoxin-NADP reductase (EC 1.18.1.2)
  misc_feature (5)..(381): Homolog of NCBI NO: 34897132 NR Description: ferredoxin-NADP+ reductase [Oryza sativa]
  misc_feature (5)..(381): Homolog of NCBI NO: 3913653 NR Description: Ferredoxin--NADP reductase, embryo isozyme,
MAPPALGSQVAAAASVPVGSDSLAKGAALKGNSTLNFRTKPCIGMALAWKNRTQQPRRLNKVLCMSVQQASRSKVAVMPVELEKAKEPLLHLYKPKEPYTATIVSVERLVGPRAPGETCHVVIDHGGNVPYWEGQSYGVIPPGENPKKPGSPNTVRLYSIASTRYGDSFDGKTASLCVRRAVYYDPETGEEDPSKRGVCSNFLCGSKPGDKVQITGPSGKIMLLPEDDPNATHIMIATGTGVAPYRGYLRRMFMEDVPTFKFGGLAWLFLGVANSDSLLYDEEFTNYLQQYPDNFRYDKALSREQKNKSGGKMYVQDKIEEYSDEIFRLLDGGAHIYFCGLKGMMPGIQDTLKKVAEQRGESWDQKLSQLKKNKQWHVEVY

SEQ ID NO: 2551 - protein, 337 aa, Zea mays subsp. mays
  peptide (1)..(337): Ceres Seq. ID no. 12414249
  misc_feature (186)..(307): Pfam Name: Oxidoreductase NAD-binding domain Pfam Description: Oxidoreductase NAD-binding domain
  misc_feature (1)..(337): Homolog of NCBI NO: 18397542 NR Description: ferrodoxin NADP oxidoreductase, putative
  misc_feature (1)..(337): Homolog of NCBI NO: 30691910 NR Description: ferredoxin--NADP(+) reductase (adrenodoxin
  misc_feature (1)..(337): Homolog of NCBI NO: 3913650 NR Description: Ferredoxin--NADP reductase, root-type isozyme,
  misc_feature (22)..(337): Homolog of NCBI NO: 14719468 NR Description: Chain A, Crystal Structure Of The
  misc_feature (21)..(337): Homolog of NCBI NO: 218163 NR Description: ferredoxin-NADP+ reductase enzyme
  misc_feature (1)..(337): Homolog of NCBI NO: 7433380 NR Description: ferredoxin-NADP reductase (EC 1.18.1.2) - garden
  misc_feature (1)..(337): Homolog of NCBI NO: 3913648 NR Description: Ferredoxin--NADP reductase, root isozyme,
  misc_feature (16)..(337): Homolog of NCBI NO: 1076803 NR Description: ferredoxin-NADP reductase (EC 1.18.1.2)
  misc_feature (1)..(337): Homolog of NCBI NO: 34897132 NR Description: ferredoxin-NADP+ reductase [Oryza sativa]
  misc_feature (1)..(337): Homolog of NCBI NO: 3913653 NR Description: Ferredoxin--NADP reductase, embryo isozyme,
MALAWKNRTQQPRRLNKVLCMSVQQASRSKVAVMPVELEKAKEPLLHLYKPKEPYTATIVSVERLVGPRAPGETCHVVIDHGGNVPYWEGQSYGVIPPGENPKKPGSPNTVRLYSIASTRYGDSFDGKTASLCVRRAVYYDPETGEEDPSKRGVCSNFLCGSKPGDKVQITGPSGKIMLLPEDDPNATHIMIATGTGVAPYRGYLRRMFMEDVPTFKFGGLAWLFLGVANSDSLLYDEEFTNYLQQYPDNFRYDKALSREQKNKSGGKMYVQDKIEEYSDEIFRLLDGGAHIYFCGLKGMMPGIQDTLKKVAEQRGESWDQKLSQLKKNKQWHVEVY

SEQ ID NO: 2552 - DNA, 1401 bp, Zea mays subsp. mays
  misc_feature (1)..(1401): Ceres Seq. ID no. 12410655
  misc_feature: MA Experiment ID: 108689 Result: Down-regulated in Transcription
  misc_feature: MA Experiment 108689 PARAMETER Experiment Name: Zm_Drought_Roots_P Parameter: Age (day) Value: 9
  misc_feature: MA Experiment 108689 PARAMETER Experiment Name: Zm_Drought_Roots_P Parameter: Organism Value: Zea mays
  misc_feature: MA Experiment 108689 PARAMETER Experiment Name: Zm_Drought_Roots_P Parameter: Plant Line Value: 35A19
  misc_feature: MA Experiment 108689 PARAMETER Experiment Name: Zm_Drought_Roots_P Parameter: Timepoint (hr) Value: 24
  misc_feature: MA Experiment 108689 PARAMETER Experiment Name: Zm_Drought_Roots_P Parameter: Tissue Value: Roots
  misc_feature: MA Experiment 108689 PARAMETER Experiment Name: Zm_Drought_Roots_P Parameter: Treatment Value: Drought vs. No Drought
aactttgggctgtcgccaccagaaagccctcacgagtcctttgcctcctcactccgtcaggctcgtcgccacagggttttgttcctaactttttagcttcaatttttgtcttgaatggcaacacctctggatgttccactggatgatttgattaagagcagagctgggaggggaacaggaagaggcaggggacaaggagggggtcgaggcagaggtgatggccaaaggttggctcgtggttcgtggcgtgggcgtggtactggcaacttccgtgaaaggggacttggggtgtcttcgcggaggccacttggtgttaatacttggtcctcatcatttgctattgccaagtcattcaataaagcaaaggattttgtgtggagacatgatctctttgaggatagcatggtagcagctgggctttctgggatagaatctggaacaaagctttacatttcaaatttgcactatggagtgacaagtgaagatctacaggagcttttttcagaaatgggtcatttgaagcactgtgctgttcattatgacagttatagacacccaactggttcggctgaggtgatattcaccaggagaagtgaagctctcgcagcactgaagcgatataataatatgcgccttgatgggaaggccatgaagattgaagtaataggagcagaattgggtctatcagctgctgccgtaccccagattagtgttgttcctggtgcaagcagaagagggcagagagaagttgttatgatgcctggtggaagtgggtttggacaaggtgcatctggcccatctagttcgcttcctgggtggaagcgtggaggctttgttcgaagaggacaagggcgtgttagttttcctcaaagagggcgagggcaagtgcgcagccgtggccgtggccgtggccgcagtagccttgttcagagccgtggacgtggctatgtgcgcaggggtaatgcagagaaatcagccaaacaattggacaatgaacttgacaactacaactctggtgcgatgaatgtcgactaagttaatccatcgtgacatcattcaatccaacctggaagttggaactatgttgaagctaagcttgttttctgtcggtattctgtcaaatgtgcacacttctgtcatgctctagtggcatcagttgaagattagatattccattattcctactgcaatagtcttgtgatatcagaatttgctgtaattgaatgatgaattatgttttcaaccgttgaaaggtttgctgtcaaaatttcaatattatcctagttattgtcagaattttcagtaggcattagccaaaaagattggtgctgactactggtatatcagaatttgctgtaattgaatgatgaattatgttttcaaccgttgaaaggtttggtg

SEQ ID NO: 2553 - protein, 306 aa, Zea mays subsp. mays
  peptide (1)..(306): Ceres Seq. ID no. 12410656
  misc_feature (111)..(181): Pfam Name: RNA recognition motif. (a.k.a. RRM, RBD, or RNP domain) Pfam Description: RNA recognition motif. (a.k.a. RRM, RBD, or RNP
  misc_feature (1)..(303): Homolog of NCBI NO: 11358209 NR Description: hypothetical protein T22P11.120 - Arabidopsis
  misc_feature (1)..(303): Homolog of NCBI NO: 30679669 NR Description: RNA and export factor binding protein, putative
  misc_feature (72)..(304): Homolog of NCBI NO: 9757981 NR Description: gene_id:K12B20.19~unknown protein [Arabidopsis
  misc_feature (1)..(305): Homolog of NCBI NO: 25404603 NR Description: hypothetical protein T6J19.1 [imported] -
  misc_feature (1)..(305): Homolog of NCBI NO: 9663023 NR Description: DIP1 protein [Arabidopsis thaliana]
  misc_feature (1)..(305): Homolog of NCBI NO: 18408471 NR Description: RNA and export factor binding protein, putative
  misc_feature (1)..(304): Homolog of NCBI NO: 9663025 NR Description: DIP2 protein [Arabidopsis thaliana]
  misc_feature (1)..(304): Homolog of NCBI NO: 30693141 NR Description: RNA and export factor binding protein, putative
  misc_feature (16)..(306): Homolog of NCBI NO: 38175495 NR Description: putative transcriptional coactivator(DIP2)
  misc_feature (1)..(256): Homolog of NCBI NO: 40644804 NR Description: putative DIP2 protein [Triticum aestivum]
MATPLDVPLDDLIKSRAGRGTGRGRGQGGGRGRGDGQRLARGSWRGRGTGNFRERGLGVSSRRPLGVNTWSSSFAIAKSFNKAKDFVWRHDLFEDSMVAAGLSGIESGTKLYISNLHYGVTSEDLQELFSEMGHLKHCAVHYDSYRHPTGSAEVIFTRRSEALAALKRYNNMRLDGKAMKIEVIGAELGLSAAAVPQISVVPGASRRGQREVVMMPGGSGFGQGASGPSSSLPGWKRGGFVRRGQGRVSFPQRGRGQVRSRGRGRGRSSLVQSRGRGYVRRGNAEKSAKQLDNELDNYNSGAMNVD

SEQ ID NO: 2554 - protein, 210 aa, Zea mays subsp. mays
  peptide (1)..(210): Ceres Seq. ID no. 12410657
  misc_feature (15)..(85): Pfam Name: RNA recognition motif. (a.k.a. RRM, RBD, or RNP domain) Pfam Description: RNA recognition motif. (a.k.a. RRM, RBD, or RNP
  misc_feature (1)..(207): Homolog of NCBI NO: 11358209 NR Description: hypothetical protein T22P11.120 - Arabidopsis
  misc_feature (1)..(207): Homolog of NCBI NO: 30679669 NR Description: RNA and export factor binding protein, putative
  misc_feature (1)..(208): Homolog of NCBI NO: 9757981 NR Description: gene_id:K12B20.19~unknown protein [Arabidopsis
  misc_feature (1)..(209): Homolog of NCBI NO: 25404603 NR Description: hypothetical protein T6J19.1 [imported] -
  misc_feature (1)..(209): Homolog of NCBI NO: 9663023 NR Description: DIP1 protein [Arabidopsis thaliana]
  misc_feature (1)..(209): Homolog of NCBI NO: 18408471 NR Description: RNA and export factor binding protein, putative
  misc_feature (1)..(208): Homolog of NCBI NO: 9663025 NR Description: DIP2 protein [Arabidopsis thaliana]
  misc_feature (1)..(208): Homolog of NCBI NO: 30693141 NR Description: RNA and export factor binding protein, putative
  misc_feature (1)..(210): Homolog of NCBI NO: 38175495 NR Description: putative transcriptional coactivator(DIP2)
  misc_feature (1)..(160): Homolog of NCBI NO: 40644804 NR Description: putative DIP2 protein [Triticum aestivum]
MVAAGLSGIESGTKLYISNLHYGVTSEDLQELFSEMGHLKHCAVHYDSYRHPTGSAEVIFTRRSEALAALKRYNNMRLDGKAMKIEVIGAELGLSAAAVPQISVVPGASRRGQREVVMMPGGSGFGQGASGPSSSLPGWKRGGFVRRGQGRVSFPQRGRGQVRSRGRGRGRSSLVQSRGRGYVRRGNAEKSAKQLDNELDNYNSGAMNVD

SEQ ID NO: 2555 - protein, 175 aa, Zea mays subsp. mays
  peptide (1)..(175): Ceres Seq. ID no. 12410658
  misc_feature (1)..(172): Homolog of NCBI NO: 11358209 NR Description: hypothetical protein T22P11.120 - Arabidopsis
  misc_feature (1)..(172): Homolog of NCBI NO: 30679669 NR Description: RNA and export factor binding protein, putative
  misc_feature (1)..(173): Homolog of NCBI NO: 9757981 NR Description: gene_id:K12B20.19~unknown protein [Arabidopsis
  misc_feature (1)..(174): Homolog of NCBI NO: 25404603 NR Description: hypothetical protein T6J19.1 [imported] -
  misc_feature (1)..(174): Homolog of NCBI NO: 9663023 NR Description: DIP1 protein [Arabidopsis thaliana]
  misc_feature (1)..(174): Homolog of NCBI NO: 18408471 NR Description: RNA and export factor binding protein, putative
  misc_feature (1)..(173): Homolog of NCBI NO: 9663025 NR Description: DIP2 protein [Arabidopsis thaliana]
  misc_feature (1)..(173): Homolog of NCBI NO: 30693141 NR Description: RNA and export factor binding protein, putative
  misc_feature (1)..(175): Homolog of NCBI NO: 38175495 NR Description: putative transcriptional coactivator(DIP2)
  misc_feature (1)..(125): Homolog of NCBI NO: 40644804 NR Description: putative DIP2 protein [Triticum aestivum]
MGHLKHCAVHYDSYRHPTGSAEVIFTRRSEALAALKRYNNMRLDGKAMKIEVIGAELGLSAAAVPQISVVPGASRRGQREVVMMPGGSGFGQGASGPSSSLPGWKRGGFVRRGQGRVSFPQRGRGQVRSRGRGRGRSSLVQSRGRGYVRRGNAEKSAKQLDNELDNYNSGAMNVD

SEQ ID NO: 2556 - DNA, 1911 bp, Zea mays subsp. mays
  misc_feature (1)..(1911): Ceres Seq. ID no. 13492653
  misc_feature: MA Experiment ID: 108556 Result: Down-regulated in Transcription
  misc_feature: MA Experiment 108556 PARAMETER Experiment Name: Zm_Drought_P Parameter: Age (day) Value: 9
  misc_feature: MA Experiment 108556 PARAMETER Experiment Name: Zm_Drought_P Parameter: Organism Value: Zea mays
  misc_feature: MA Experiment 108556 PARAMETER Experiment Name: Zm_Drought_P Parameter: Plant Line Value: 35A19
  misc_feature: MA Experiment 108556 PARAMETER Experiment Name: Zm_Drought_P Parameter: Timepoint (hr) Value: 24
  misc_feature: MA Experiment 108556 PARAMETER Experiment Name: Zm_Drought_P Parameter: Tissue Value: Aerial
  misc_feature: MA Experiment 108556 PARAMETER Experiment Name: Zm_Drought_P Parameter: Treatment Value: Drought vs. No Drought
  misc_feature: MA Experiment ID: 20000108 Result: Down-regulated in Transcription
  misc_feature: MA Experiment 20000108 PARAMETER Experiment Name: Zm_Root-Tips_P Parameter: Age (day) Value: 12
  misc_feature: MA Experiment 20000108 PARAMETER Experiment Name: Zm_Root-Tips_P Parameter: Organism Value: Zea mays
  misc_feature: MA Experiment 20000108 PARAMETER Experiment Name: Zm_Root-Tips_P Parameter: Tissue Value: Root tips vs. Root mid region    35
  misc_feature: MA Experiment 20000108 PARAMETER Experiment Name: Zm_Root-Tips_P Parameter: Tissue Value: Root tips vs. Root mid region   Sequence Listing-Misc Features (4)
  misc_feature: MA Experiment ID: 20000477 Result: Down-regulated in Transcription
  misc_feature: MA Experiment 20000477 PARAMETER Experiment Name: Zm_5mM_SA_P Parameter: Age (day) Value: 10
  misc_feature: MA Experiment 20000477 PARAMETER Experiment Name: Zm_5mM_SA_P Parameter: Organism Value: Zea mays
  misc_feature: MA Experiment 20000477 PARAMETER Experiment Name: Zm_5mM_SA_P Parameter: Plant Line Value: 35A19
  misc_feature: MA Experiment 20000477 PARAMETER Experiment Name: Zm_5mM_SA_P Parameter: Timepoint (hr) Value: 48
  misc_feature: MA Experiment 20000477 PARAMETER Experiment Name: Zm_5mM_SA_P Parameter: Tissue Value: Aerial
  misc_feature: MA Experiment 20000477 PARAMETER Experiment Name: Zm_5mM_SA_P Parameter: Treatment Value: 5mM SA vs. No Treatment
  misc_feature: MA Experiment ID: 20000535 Result: Down-regulated in Transcription
  misc_feature: MA Experiment 20000535 PARAMETER Experiment Name: Zm_Hybrid_Seed_Dev_P Parameter: DAP Value: 30 vs. 12
  misc_feature: MA Experiment 20000535 PARAMETER Experiment Name: Zm_Hybrid_Seed_Dev_P Parameter: Organism Value: Zea mays
  misc_feature: MA Experiment 20000535 PARAMETER Experiment Name: Zm_Hybrid_Seed_Dev_P Parameter: Plant Line Value: 35A19
  misc_feature: MA Experiment 20000535 PARAMETER Experiment Name: Zm_Hybrid_Seed_Dev_P Parameter: Tissue Value: Embryo vs. Unfert Floret
atcccacgccccctcggcgctgcgcctggacccggcacctacctcccccctccccacctcgccgccggcgggtggagtcgggctggagcagccgctctcctctgttacccccctaaccccctataaagaaaaaaaaaaaaaaacagagagagagagcgagcgaccggcggctcggcagccatggggcacggcgtcagctgcgcccgcaccggcgacgagcacgactacttccgcgcggcgcaggtcggggacctcgaggccctggacgcgctcctcgacgccgacccctctctcgcccgccgcgccacgctctacgaccgcctctccgcgctccacatcgccgccgcgaatggccgcctcgaggtgctgtcaatggtcttggatcacggggtgccgccggacgtggtgaatcggcacaagcagacgccgctgatgctcgcggcgatgcacggcaagactgactgcgtgctgaagctcctgcaggccggcgccaatatcctcatgttcgattcccagcacgggcggacctgcctgcaccacgcgtcctacttcggccacgtcggctgcctgcaggccatcctcacggcggcgcggaccacgccggtggccgactcatggggtttcgcccggttcgtcaacgtgagggacgaccacggcgccacgccgctccacctcgccgccaggcagggccgccccggctgcgtgcaggcgctgctggagaacggcgccatcgtctccgctttgaccggctcatacgggtttcctggtagcacagtcgctgcacctcgccgctcgcagcgggagcctggattgcacccggaagctgctcgcctggggagcggatcgtctccggagggattcagcagggaggatcccttacgccgtggcgctgaagcgcaaccacgaggcgtgcgcagcgctgctgaacccgtcggcggcggagcccatggtgtggccgtccccgctcaagttcatcagcgagctggagccggaggccaaggcgctcctggaagcggcgctgacggaagccaacagggagagggaggagaagatcctcaggggcaccaagcactctccgcctcctcccacctgggaccacgcgagcgacgccgccgacgccgacgccatcgacgacgcgtcctcagatgccagcgccagcgacgcggagctgtgctgcatctgcttcgaccaggcgtgcaccatggaggtgcaggactgcgggcaccagatgtgcgcgccgtgcacgctcgcgctgtgctgccacagcaagcccgacccggtgactctggcgctgccgtcgccagcctgcccgttctgccgcggcagcatctcgcggctgctcctggtggcccgggcaagcagcgacgacgcggacaccgagaagtcggcggcggcggcagcgggctgcctcctccccgcagctcgtccggcggcggtcccggcggtcgcacaacctcagcgacggcggcagcagcagcttcaaggggctgtcgtccgccgtggccggttccttctccaagatcgggcgcgggtcgagccggacgatggccgacagcgacggctgcggcgtggacaagcccgagcacgacccgtgatcggcattggatcctgcgcatgtggagccgagcgcggggccattgcggacatccaatcgaatccaagccaagcgtgactgcttgctgcgaaaataaccgcatccttttcttcttcttctccccatgtccctgtctgtcaatcctattcttgggcgtgccaggatttgttcacctggccattgccgtattccattgtcaccgaccggctatagtatatagtactagattccatttccaaaaaaaaaaaaaaaaaaaaaaaaaaaaaaaaaaaaaaagaaaaaaaaaaaaaaaaaacggcacgagaagccggcacgag

SEQ ID NO: 2557 - protein, 577 aa, Zea mays subsp. mays
  peptide (1)..(577): Ceres Seq. ID no. 13492654
  misc_feature (158)..(190): Pfam Name: Ankyrin repeat Pfam Description: Ankyrin repeat
  misc_feature (1)..(198): Homolog of NCBI NO: 30684032 NR Description: RING zinc finger ankyrin protein -related
  misc_feature (1)..(198): Homolog of NCBI NO: 34906062 NR Description: putative receptor-like kinase Xa21-binding
  misc_feature (150)..(201): Homolog of NCBI NO: 22122921 NR Description: hypothetical protein [Oryza sativa (japonica
  misc_feature (1)..(198): Homolog of NCBI NO: 16226319 NR Description: At2g28840/F8N16.13 [Arabidopsis thaliana]
  misc_feature (12)..(183): Homolog of NCBI NO: 25408016 NR Description: probable RING zinc finger ankyrin protein
  misc_feature (35)..(198): Homolog of NCBI NO: 25408016 NR Description: probable RING zinc finger ankyrin protein
  misc_feature (12)..(183): Homolog of NCBI NO: 30684032 NR Description: RING zinc finger ankyrin protein -related
  misc_feature (1)..(144): Homolog of NCBI NO: 22122921 NR Description: hypothetical protein [Oryza sativa (japonica
  misc_feature (1)..(199): Homolog of NCBI NO: 15240746 NR Description: expressed protein [Arabidopsis thaliana]
  misc_feature (1)..(198): Homolog of NCBI NO: 14279688 NR Description: receptor-like kinase Xa21-binding protein 3
MGHGVSCARTGDEHDYFRAAQVGDLEALDALLDADPSLARRATLYDRLSALHIAAANGRLEVLSMVLDHGVPPDVVNRHKQTPLMLAAMHGKTDCVLKLLQAGANILMFDSQHGRTCLHHASYFGHVGCLQAILTAARTTPVADSWGFARFVNVRDDHGATPLHLAARQGRPGCVQALLENGAIVSALTGSYGFPGSTVAAPRRSQREPGLHPEAARLGSGSSPEGFSREDPLRRGAEAQPRGVRSAAEPVGGGAHGVAVPAQVHQRAGAGGQGAPGSGADGSQQGEGGEDPQGHQALSASSHLGPRERRRRRRRHRRRVLRCQRQRRGAVLHLLRPGVHHGGAGLRAPDVRAVHARAVLPQQARPGDSGAAVASLPVLPRQHLAAAPGGPGKQRRRGHREVGGGGSGLPPPRSSSGGGPGGRTTSATAAAAASRGCRPPWPVPSPRSGAGRAGRWPTATAAAWTSPSTTRDRHWILRMWSRARGHCGHPIESKPSVTACCENNRILFFFFSPCPCLSILFLGVPGFVHLAIAVFHCHRPAIVYSTRFHFQKKKKKKKKKKKKRKKKKKNGTRSRHE

SEQ ID NO: 2558 - protein, 513 aa, Zea mays subsp. mays
  peptide (1)..(513): Ceres Seq. ID no. 13492655
  misc_feature (94)..(126): Pfam Name: Ankyrin repeat Pfam Description: Ankyrin repeat
  misc_feature (1)..(135): Homolog of NCBI NO: 15240746 NR Description: expressed protein [Arabidopsis thaliana]
  misc_feature (86)..(137): Homolog of NCBI NO: 22122921 NR Description: hypothetical protein [Oryza sativa (japonica
  misc_feature (1)..(80): Homolog of NCBI NO: 22122921 NR Description: hypothetical protein [Oryza sativa (japonica
  misc_feature (1)..(134): Homolog of NCBI NO: 16226319 NR Description: At2g28840/F8N16.13 [Arabidopsis thaliana]
  misc_feature (1)..(119): Homolog of NCBI NO: 30684032 NR Description: RING zinc finger ankyrin protein -related
  misc_feature (1)..(119): Homolog of NCBI NO: 25408016 NR Description: probable RING zinc finger ankyrin protein
  misc_feature (1)..(134): Homolog of NCBI NO: 25408016 NR Description: probable RING zinc finger ankyrin protein
  misc_feature (1)..(134): Homolog of NCBI NO: 30684032 NR Description: RING zinc finger ankyrin protein -related
  misc_feature (1)..(134): Homolog of NCBI NO: 34906062 NR Description: putative receptor-like kinase Xa21-binding
  misc_feature (1)..(134): Homolog of NCBI NO: 14279688 NR Description: receptor-like kinase Xa21-binding protein 3
MVLDHGVPPDVVNRHKQTPLMLAAMHGKTDCVLKLLQAGANILMFDSQHGRTCLHHASYFGHVGCLQAILTAARTTPVADSWGFARFVNVRDDHGATPLHLAARQGRPGCVQALLENGAIVSALTGSYGFPGSTVAAPRRSQREPGLHPEAARLGSGSSPEGFSREDPLRRGAEAQPRGVRSAAEPVGGGAHGVAVPAQVHQRAGAGGQGAPGSGADGSQQGEGGEDPQGHQALSASSHLGPRERRRRRRRHRRRVLRCQRQRRGAVLHLLRPGVHHGGAGLRAPDVRAVHARAVLPQQARPGDSGAAVASLPVLPRQHLAAAPGGPGKQRRRGHREVGGGGSGLPPPRSSSGGGPGGRTTSATAAAAASRGCRPPWPVPSPRSGAGRAGRWPTATAAAWTSPSTTRDRHWILRMWSRARGHCGHPIESKPSVTACCENNRILFFFFSPCPCLSILFLGVPGFVHLAIAVFHCHRPAIVYSTRFHFQKKKKKKKKKKKKRKKKKKNGTRSRHE

SEQ ID NO: 2559 - protein, 493 aa, Zea mays subsp. mays
  peptide (1)..(493): Ceres Seq. ID no. 13492656
  misc_feature (74)..(106): Pfam Name: Ankyrin repeat Pfam Description: Ankyrin repeat
  misc_feature (1)..(115): Homolog of NCBI NO: 15240746 NR Description: expressed protein [Arabidopsis thaliana]
  misc_feature (66)..(117): Homolog of NCBI NO: 22122921 NR Description: hypothetical protein [Oryza sativa (japonica
  misc_feature (1)..(60): Homolog of NCBI NO: 22122921 NR Description: hypothetical protein [Oryza sativa (japonica
  misc_feature (1)..(114): Homolog of NCBI NO: 16226319 NR Description: At2g28840/F8N16.13 [Arabidopsis thaliana]
  misc_feature (1)..(99): Homolog of NCBI NO: 30684032 NR Description: RING zinc finger ankyrin protein -related
  misc_feature (1)..(99): Homolog of NCBI NO: 25408016 NR Description: probable RING zinc finger ankyrin protein
  misc_feature (1)..(114): Homolog of NCBI NO: 25408016 NR Description: probable RING zinc finger ankyrin protein
  misc_feature (1)..(114): Homolog of NCBI NO: 30684032 NR Description: RING zinc finger ankyrin protein -related
  misc_feature (1)..(114): Homolog of NCBI NO: 34906062 NR Description: putative receptor-like kinase Xa21-binding
  misc_feature (1)..(114): Homolog of NCBI NO: 14279688 NR Description: receptor-like kinase Xa21-binding protein 3
MLAAMHGKTDCVLKLLQAGANILMFDSQHGRTCLHHASYFGHVGCLQAILTAARTTPVADSWGFARFVNVRDDHGATPLHLAARQGRPGCVQALLENGAIVSALTGSYGFPGSTVAAPRRSQREPGLHPEAARLGSGSSPEGFSREDPLRRGAEAQPRGVRSAAEPVGGGAHGVAVPAQVHQRAGAGGQGAPGSGADGSQQGEGGEDPQGHQALSASSHLGPRERRRRRRRHRRRVLRCQRQRRGAVLHLLRPGVHHGGAGLRAPDVRAVHARAVLPQQARPGDSGAAVASLPVLPRQHLAAAPGGPGKQRRRGHREVGGGGSGLPPPRSSSGGGPGGRTTSATAAAAASRGCRPPWPVPSPRSGAGRAGRWPTATAAAWTSPSTTRDRHWILRMWSRARGHCGHPIESKPSVTACCENNRILFFFFSPCPCLSILFLGVPGFVHLAIAVFHCHRPAIVYSTRFHFQKKKKKKKKKKKKRKKKKKNGTRSRHE

SEQ ID NO: 2560 - DNA, 1570 bp, Zea mays subsp. mays
  misc_feature (1)..(1570): Ceres Seq. ID no. 12352072
  misc_feature: MA Experiment ID: 108528 Result: Up-regulated in Transcription
  misc_feature: MA Experiment 108528 PARAMETER Experiment Name: Zm_Imbibed_Seeds_P Parameter: Age (day) Value: 5 vs. 2
  misc_feature: MA Experiment 108528 PARAMETER Experiment Name: Zm_Imbibed_Seeds_P Parameter: Organism Value: Zea mays
  misc_feature: MA Experiment 108528 PARAMETER Experiment Name: Zm_Imbibed_Seeds_P Parameter: Plant Line Value: 35A19
  misc_feature: MA Experiment 108528 PARAMETER Experiment Name: Zm_Imbibed_Seeds_P Parameter: Tissue Value: Aerial vs. Embryo
  misc_feature: MA Experiment ID: 108530 Result: Up-regulated in Transcription
  misc_feature: MA Experiment 108530 PARAMETER Experiment Name: Zm_Imbibed_Seeds_P Parameter: Age (day) Value: 6 vs. 2
  misc_feature: MA Experiment 108530 PARAMETER Experiment Name: Zm_Imbibed_Seeds_P Parameter: Organism Value: Zea mays
  misc_feature: MA Experiment 108530 PARAMETER Experiment Name: Zm_Imbibed_Seeds_P Parameter: Plant Line Value: 35A19
  misc_feature: MA Experiment 108530 PARAMETER Experiment Name: Zm_Imbibed_Seeds_P Parameter: Tissue Value: Aerial vs. Embryo
  misc_feature: MA Experiment ID: 108545 Result: Up-regulated in Transcription
  misc_feature: MA Experiment 108545 PARAMETER Experiment Name: Zm_Imbibed_Seeds_P Parameter: Age (day) Value: 3 vs. 2
  misc_feature: MA Experiment 108545 PARAMETER Experiment Name: Zm_Imbibed_Seeds_P Parameter: Organism Value: Zea mays
  misc_feature: MA Experiment 108545 PARAMETER Experiment Name: Zm_Imbibed_Seeds_P Parameter: Plant Line Value: 35A19
  misc_feature: MA Experiment 108545 PARAMETER Experiment Name: Zm_Imbibed_Seeds_P Parameter: Tissue Value: Aerial vs. Embryo
  misc_feature: MA Experiment ID: 108547 Result: Up-regulated in Transcription
  misc_feature: MA Experiment 108547 PARAMETER Experiment Name: Zm_Imbibed_Seeds_P Parameter: Age (day) Value: 4 vs. 2
  misc_feature: MA Experiment 108547 PARAMETER Experiment Name: Zm_Imbibed_Seeds_P Parameter: Organism Value: Zea mays
  misc_feature: MA Experiment 108547 PARAMETER Experiment Name: Zm_Imbibed_Seeds_P Parameter: Plant Line Value: 35A19
  misc_feature: MA Experiment 108547 PARAMETER Experiment Name: Zm_Imbibed_Seeds_P Parameter: Tissue Value: Aerial vs. Embryo
  misc_feature: MA Experiment ID: 20000630 Result: Down-regulated in Transcription
  misc_feature: MA Experiment 20000630 PARAMETER Experiment Name: Zm_Herbicide-Treatments_P Parameter: Timepoint (hr) Value: 4
  misc_feature: MA Experiment 20000630 PARAMETER Experiment Name: Zm_Herbicide-Treatments_P Parameter: Tissue Value: Aerial
  misc_feature: MA Experiment 20000630 PARAMETER Experiment Name: Zm_Herbicide-Treatments_P Parameter: Treatment Value: Roundup vs. No Treatment
aatcgaaaacctgaacacctctctctcgccacctcacctgaacacctgctcgccccacccattccctccgcatggctggcctccgccctcgcgccgccgtagcttcgaattgcctccgaccggcaattcggcgaggcgcccgtcacgcatcgggggcagcgtttggatactacacctgctggcagctacagggaaatattttgaattggagatctatatccgcaactaaaaagctctggagtacagtagctagtgcaaagcctgatgattctaaatttgaaagtgtggatgcaccacttgagccccaaacatgtgaaggcagcttcttgtgtggtctgttgaagaacctgccacacatttttctagctgcagcagagaagcagttgcaagaactgtcttaccaaagagaagagagcttaaaacgctgggagcatagtattggttctaaagaggattgccttcacaggaggattgctgaactcaaggaacacgagtgtcagagagctattgaggacatcatgtacatgttgattgtttataagttttttaagattgaagtaccaatggttcccaatctatcgaaactcatcagcaacagaaggttacagttatggccaccaagggagacagatcttgaatccattcatggacctgaggtgctagagctaattagggaacacttgaccagcattatcagatgggtgcacagaaatggtcccaagatcaatcgttcaacacttcgcattaaaagactgcaatttgttcggatatattctgcttcaataatgtacggatacttcctgaaatctgtcagcatcaggcatcgattggagctgacccttactcgctcagaaggagtgcctccgattcaatttctgaatgctcaactcacaaataaacaagagcaggaaggggccattggaggctctagtgaagcttcgtcttctttgagaccaagttctgtggtcaacccacacgacttgaggggctacataatgggattcgatccaaagaccttgcagctttgcgcgaagctgcgctcatctgaagcttctaatctcatcgagaggcacagctgggctctttttgggggcgacatggaactctcccaggagaatgatgaagcggttatacttgatccttcatccctgaaaagactactgcttgaagccattgcattcggttccttcctctgggacgtcgaggattatgtggacgagatcttcaagttatcggatagctgaagaaactgctacagaaagctcctacagcctttgtggttgtggatagatgaagccagctgaaaagaggagctgcagttcttttctctagatttgtatatatggctggctgttatgtacatgcatatacatcttcatctcaagtttgctttttggagggtacacaagtttttttttgtaagttatgtcatcttacactagtacacaatagcatcagcctatcaacgcagaggacgtgtgacataattttatggtcccaaaataactgggcattttgctaatctagaacgacattattttggaatgaaatgagttgtatcagcatttgt

SEQ ID NO: 2561 - protein, 390 aa, Zea mays subsp. mays
  peptide (1)..(390): Ceres Seq. ID no. 12352073
  misc_feature (67)..(262): Pfam Name: Protein of unknown function (DUF760) Pfam Description: Protein of unknown function (DUF760)
  misc_feature (146)..(382): Homolog of NCBI NO: 13561930 NR Description: unknown [Brassica napus]
  misc_feature (60)..(340): Homolog of NCBI NO: 15221185 NR Description: unknown protein
  misc_feature (58)..(382): Homolog of NCBI NO: 18398302 NR Description: expressed protein
  misc_feature (1)..(390): Homolog of NCBI NO: 32489097 NR Description: OSJNBa0093F12.3 [Oryza sativa (japonica
  misc_feature (5)..(382): Homolog of NCBI NO: 28301943 NR Description: unknown protein [Oryza sativa (japonica
  misc_feature (60)..(382): Homolog of NCBI NO: 18401645 NR Description: expressed protein
  misc_feature (60)..(382): Homolog of NCBI NO: 17064820 NR Description: Unknown protein [Arabidopsis thaliana]
  misc_feature (49)..(340): Homolog of NCBI NO: 18397912 NR Description: expressed protein
  misc_feature (304)..(390): Homolog of NCBI NO: 15239021 NR Description: putative protein
  misc_feature (67)..(262): Homolog of NCBI NO: 15239021 NR Description: putative protein
MAGLRPRAAVASNCLRPAIRRGARHASGAAFGYYTCWQLQGNILNWRSISATKKLWSTVASAKPDDSKFESVDAPLEPQTCEGSFLCGLLKNLPHIFLAAAEKQLQELSYQREESLKRWEHSIGSKEDCLHRRIAELKEHECQRAIEDIMYMLIVYKFFKIEVPMVPNLSKLISNRRLQLWPPRETDLESIHGPEVLELIREHLTSIIRWVHRNGPKINRSTLRIKRLQFVRIYSASIMYGYFLKSVSIRHRLELTLTRSEGVPPIQFLNAQLTNKQEQEGAIGGSSEASSSLRPSSVVNPHDLRGYIMGFDPKTLQLCAKLRSSEASNLIERHSWALFGGDMELSQENDEAVILDPSSLKRLLLEAIAFGSFLWDVEDYVDEIFKLSDS

SEQ ID NO: 2562 - protein, 241 aa, Zea mays subsp. mays
  peptide (1)..(241): Ceres Seq. ID no. 12352074
  misc_feature (1)..(113): Pfam Name: Protein of unknown function (DUF760) Pfam Description: Protein of unknown function (DUF760)
  misc_feature (1)..(233): Homolog of NCBI NO: 13561930 NR Description: unknown [Brassica napus]
  misc_feature (1)..(191): Homolog of NCBI NO: 15221185 NR Description: unknown protein
  misc_feature (1)..(233): Homolog of NCBI NO: 18398302 NR Description: expressed protein
  misc_feature (1)..(241): Homolog of NCBI NO: 32489097 NR Description: OSJNBa0093F12.3 [Oryza sativa (japonica
  misc_feature (1)..(233): Homolog of NCBI NO: 28301943 NR Description: unknown protein [Oryza sativa (japonica
  misc_feature (1)..(233): Homolog of NCBI NO: 18401645 NR Description: expressed protein
  misc_feature (1)..(233): Homolog of NCBI NO: 17064820 NR Description: Unknown protein [Arabidopsis thaliana]
  misc_feature (1)..(191): Homolog of NCBI NO: 18397912 NR Description: expressed protein
  misc_feature (155)..(241): Homolog of NCBI NO: 15239021 NR Description: putative protein
  misc_feature (1)..(113): Homolog of NCBI NO: 15239021 NR Description: putative protein
MYMLIVYKFFKIEVPMVPNLSKLISNRRLQLWPPRETDLESIHGPEVLELIREHLTSIIRWVHRNGPKINRSTLRIKRLQFVRIYSASIMYGYFLKSVSIRHRLELTLTRSEGVPPIQFLNAQLTNKQEQEGAIGGSSEASSSLRPSSVVNPHDLRGYIMGFDPKTLQLCAKLRSSEASNLIERHSWALFGGDMELSQENDEAVILDPSSLKRLLLEAIAFGSFLWDVEDYVDEIFKLSDS

SEQ ID NO: 2563 - protein, 239 aa, Zea mays subsp. mays
  peptide (1)..(239): Ceres Seq. ID no. 12352075
  misc_feature (1)..(111): Pfam Name: Protein of unknown function (DUF760) Pfam Description: Protein of unknown function (DUF760)
  misc_feature (1)..(231): Homolog of NCBI NO: 13561930 NR Description: unknown [Brassica napus]
  misc_feature (1)..(189): Homolog of NCBI NO: 15221185 NR Description: unknown protein
  misc_feature (1)..(231): Homolog of NCBI NO: 18398302 NR Description: expressed protein
  misc_feature (1)..(239): Homolog of NCBI NO: 32489097 NR Description: OSJNBa0093F12.3 [Oryza sativa (japonica
  misc_feature (1)..(231): Homolog of NCBI NO: 28301943 NR Description: unknown protein [Oryza sativa (japonica
  misc_feature (1)..(231): Homolog of NCBI NO: 18401645 NR Description: expressed protein
  misc_feature (1)..(231): Homolog of NCBI NO: 17064820 NR Description: Unknown protein [Arabidopsis thaliana]
  misc_feature (1)..(189): Homolog of NCBI NO: 18397912 NR Description: expressed protein
  misc_feature (153)..(239): Homolog of NCBI NO: 15239021 NR Description: putative protein
  misc_feature (1)..(111): Homolog of NCBI NO: 15239021 NR Description: putative protein
MLIVYKFFKIEVPMVPNLSKLISNRRLQLWPPRETDLESIHGPEVLELIREHLTSIIRWVHRNGPKINRSTLRIKRLQFVRIYSASIMYGYFLKSVSIRHRLELTLTRSEGVPPIQFLNAQLTNKQEQEGAIGGSSEASSSLRPSSVVNPHDLRGYIMGFDPKTLQLCAKLRSSEASNLIERHSWALFGGDMELSQENDEAVILDPSSLKRLLLEAIAFGSFLWDVEDYVDEIFKLSDS

SEQ ID NO: 2564 - DNA, 1084 bp, Zea mays subsp. mays
  misc_feature (1)..(1084): Ceres Seq. ID no. 12350953
  misc_feature: MA Experiment ID: 108529 Result: Up-regulated in Transcription
  misc_feature: MA Experiment 108529 PARAMETER Experiment Name: Zm_Imbibed_Seeds_P Parameter: Age (day) Value: 5 vs. 2
  misc_feature: MA Experiment 108529 PARAMETER Experiment Name: Zm_Imbibed_Seeds_P Parameter: Organism Value: Zea mays
  misc_feature: MA Experiment 108529 PARAMETER Experiment Name: Zm_Imbibed_Seeds_P Parameter: Plant Line Value: 35A19
  misc_feature: MA Experiment 108529 PARAMETER Experiment Name: Zm_Imbibed_Seeds_P Parameter: Tissue Value: Roots vs. Embryo
  misc_feature: MA Experiment ID: 108535 Result: Down-regulated in Transcription
  misc_feature: MA Experiment 108535 PARAMETER Experiment Name: Zm_Meristem_P Parameter: Age (day) Value: 8
  misc_feature: MA Experiment 108535 PARAMETER Experiment Name: Zm_Meristem_P Parameter: Organism Value: Zea mays
  misc_feature: MA Experiment 108535 PARAMETER Experiment Name: Zm_Meristem_P Parameter: Plant Line Value: 35A19
  misc_feature: MA Experiment 108535 PARAMETER Experiment Name: Zm_Meristem_P Parameter: Tissue Value: Root Meristem vs. Above Root Meristem
  misc_feature: MA Experiment ID: 108544 Result: Down-regulated in Transcription
  misc_feature: MA Experiment ID: 108546 Result: Up-regulated in Transcription
  misc_feature: MA Experiment 108546 PARAMETER Experiment Name: Zm_Imbibed_Seeds_P Parameter: Age (day) Value: 3 vs. 2
  misc_feature: MA Experiment 108546 PARAMETER Experiment Name: Zm_Imbibed_Seeds_P Parameter: Organism Value: Zea mays
  misc_feature: MA Experiment 108546 PARAMETER Experiment Name: Zm_Imbibed_Seeds_P Parameter: Plant Line Value: 35A19
  misc_feature: MA Experiment 108546 PARAMETER Experiment Name: Zm_Imbibed_Seeds_P Parameter: Tissue Value: Roots vs. Embryo
  misc_feature: MA Experiment ID: 108597 Result: Down-regulated in Transcription
  misc_feature: MA Experiment 108597 PARAMETER Experiment Name: Zm_100uM_ABA_P Parameter: Age (day) Value: 9
  misc_feature: MA Experiment 108597 PARAMETER Experiment Name: Zm_100uM_ABA_P Parameter: Organism Value: Zea mays
  misc_feature: MA Experiment 108597 PARAMETER Experiment Name: Zm_100uM_ABA_P Parameter: Plant Line Value: 35A19
  misc_feature: MA Experiment 108597 PARAMETER Experiment Name: Zm_100uM_ABA_P Parameter: Timepoint (hr) Value: 24
  misc_feature: MA Experiment 108597 PARAMETER Experiment Name: Zm_100uM_ABA_P Parameter: Tissue Value: Aerial
  misc_feature: MA Experiment 108597 PARAMETER Experiment Name: Zm_100uM_ABA_P Parameter: Treatment Value: 100uM ABA vs. No Treatment
  misc_feature: MA Experiment ID: 20000477 Result: Down-regulated in Transcription
  misc_feature: MA Experiment 20000477 PARAMETER Experiment Name: Zm_5mM_SA_P Parameter: Age (day) Value: 10
  misc_feature: MA Experiment 20000477 PARAMETER Experiment Name: Zm_5mM_SA_P Parameter: Organism Value: Zea mays
  misc_feature: MA Experiment 20000477 PARAMETER Experiment Name: Zm_5mM_SA_P Parameter: Plant Line Value: 35A19
  misc_feature: MA Experiment 20000477 PARAMETER Experiment Name: Zm_5mM_SA_P Parameter: Timepoint (hr) Value: 48
  misc_feature: MA Experiment 20000477 PARAMETER Experiment Name: Zm_5mM_SA_P Parameter: Tissue Value: Aerial
  misc_feature: MA Experiment 20000477 PARAMETER Experiment Name: Zm_5mM_SA_P Parameter: Treatment Value: 5mM SA vs. No Treatment
  misc_feature: MA Experiment ID: 20000480 Result: Down-regulated in Transcription
  misc_feature: MA Experiment 20000480 PARAMETER Experiment Name: Zm_Drought_P Parameter: Age (day) Value: 11
  misc_feature: MA Experiment 20000480 PARAMETER Experiment Name: Zm_Drought_P Parameter: Organism Value: Zea mays
  misc_feature: MA Experiment 20000480 PARAMETER Experiment Name: Zm_Drought_P Parameter: Plant Line Value: 35A19
  misc_feature: MA Experiment 20000480 PARAMETER Experiment Name: Zm_Drought_P Parameter: Timepoint (hr) Value: 72
  misc_feature: MA Experiment 20000480 PARAMETER Experiment Name: Zm_Drought_P Parameter: Tissue Value: Aerial
  misc_feature: MA Experiment 20000480 PARAMETER Experiment Name: Zm_Drought_P Parameter: Treatment Value: Drought vs. No Drought
gaaaagaaagcattagtatatttgcatttgcttcgttctccaccgccagcgaggtgctcgtgcggtgtgtatatatatatgcacggggttgcattgcacccagctgcagatgatatataccttaagccagcagaaaattaggtataggcgtagagactagagagcgagcgagctcagtccgtgttcagtcgagagagctcgtttagcttggccatcgacgagctagcagagcagtagctaggatagatccatggcgaacgcgggcatgaagccggtggccggactcctgctggtgctcaacttgtgcatgtacgtcatcgtggcggcggtgggcggctgggccatcaaccacgccatcaactacggcttcttcatcggcaccggcctgcacctcccggctcacttctccccgatcaacttccccatcgggaacgcggcgaccgggttcttcgtcatcttcgccgtgatcgccggggtggtcggcgcgggctcggcgctggcggggctcaaccacgtccgcgcctggagcaccgagagcctgccggcggcggcctccgccgggttcattgcgtggacgctcaccctgctcgccatggggttggcggtgaaggagattgaactgcacggcaggaatgccagactgatatgcatggagtccttcaccatcatcctgtcggcgacgcagctcttctacctgctcgccattcacggaggcttgagataaaatcgatcaccgtgttggccggaggcactgaggcagtgactgatgaatggagacttgtcgtcggttccgtacgtgtgtgtctgtcggattgagtgggcgtgcatcggattcacggggcagcgcgtgtactatatatgtgacttcattcggttcgctgtgtcgttgtgggctgggctgtcttccaagatgcatggagaggcagtacgtatgtacacgtacgtgtatctatctgttcgtgtgtgtgcgcccgctgctgcttgatttatcttgtgcgtccgattggttacgtcattccgtgtcattcattgattgtttcggagatggagagtcaatatgtctacacgtcatgatgacgtggtg

SEQ ID NO: 2565 - protein, 157 aa, Zea mays subsp. mays
  peptide (1)..(157): Ceres Seq. ID no. 12350954
  misc_feature (15)..(155): Pfam Name: AWPM-19-like family Pfam Description: AWPM-19-like family
  misc_feature (1)..(155): Homolog of NCBI NO: 18390408 NR Description: expressed protein
  misc_feature (1)..(156): Homolog of NCBI NO: 4097340 NR Description: hydrophobic LEA-like protein [Oryza sativa]
  misc_feature (1)..(156): Homolog of NCBI NO: 7489659 NR Description: ABA-induced plasma membrane protein PM 19 - wheat
  misc_feature (1)..(156): Homolog of NCBI NO: 6851373 NR Description: plasma membrane associated protein [Hordeum
  misc_feature (1)..(156): Homolog of NCBI NO: 15239619 NR Description: plasma membrane associated protein -like
  misc_feature (43)..(154): Homolog of NCBI NO: 15237455 NR Description: putative protein; protein id: At5g46530.1
  misc_feature (134)..(157): Homolog of NCBI NO: 34904644 NR Description: putative ABA-induced plasma membrane protein
  misc_feature (6)..(140): Homolog of NCBI NO: 34904644 NR Description: putative ABA-induced plasma membrane protein
  misc_feature (1)..(154): Homolog of NCBI NO: 15218953 NR Description: plasma membrane associated protein, putative
  misc_feature (1)..(155): Homolog of NCBI NO: 34911480 NR Description: putative plasma membrane associated protein
MANAGMKPVAGLLLVLNLCMYVIVAAVGGWAINHAINYGFFIGTGLHLPAHFSPINFPIGNAATGFFVIFAVIAGVVGAGSALAGLNHVRAWSTESLPAAASAGFIAWTLTLLAMGLAVKEIELHGRNARLICMESFTIILSATQLFYLLAIHGGLR

SEQ ID NO: 2566 - protein, 152 aa, Zea mays subsp. mays
  peptide (1)..(152): Ceres Seq. ID no. 12350955
  misc_feature (10)..(150): Pfam Name: AWPM-19-like family Pfam Description: AWPM-19-like family
  misc_feature (1)..(149): Homolog of NCBI NO: 15218953 NR Description: plasma membrane associated protein, putative
  misc_feature (1)..(150): Homolog of NCBI NO: 18390408 NR Description: expressed protein
  misc_feature (1)..(151): Homolog of NCBI NO: 7489659 NR Description: ABA-induced plasma membrane protein PM 19 - wheat
  misc_feature (1)..(151): Homolog of NCBI NO: 15239619 NR Description: plasma membrane associated protein -like
  misc_feature (129)..(152): Homolog of NCBI NO: 34904644 NR Description: putative ABA-induced plasma membrane protein
  misc_feature (1)..(135): Homolog of NCBI NO: 34904644 NR Description: putative ABA-induced plasma membrane protein
  misc_feature (38)..(149): Homolog of NCBI NO: 15237455 NR Description: putative protein; protein id: At5g46530.1
  misc_feature (1)..(151): Homolog of NCBI NO: 6851373 NR Description: plasma membrane associated protein [Hordeum
  misc_feature (1)..(151): Homolog of NCBI NO: 4097340 NR Description: hydrophobic LEA-like protein [Oryza sativa]
  misc_feature (1)..(150): Homolog of NCBI NO: 34911480 NR Description: putative plasma membrane associated protein
MKPVAGLLLVLNLCMYVIVAAVGGWAINHAINYGFFIGTGLHLPAHFSPINFPIGNAATGFFVIFAVIAGVVGAGSALAGLNHVRAWSTESLPAAASAGFIAWTLTLLAMGLAVKEIELHGRNARLICMESFTIILSATQLFYLLAIHGGLR

SEQ ID NO: 2567 - protein, 138 aa, Zea mays subsp. mays
  peptide (1)..(138): Ceres Seq. ID no. 12350956
  misc_feature (1)..(136): Pfam Name: AWPM-19-like family Pfam Description: AWPM-19-like family
  misc_feature (1)..(136): Homolog of NCBI NO: 18390408 NR Description: expressed protein
  misc_feature (1)..(137): Homolog of NCBI NO: 4097340 NR Description: hydrophobic LEA-like protein [Oryza sativa]
  misc_feature (1)..(137): Homolog of NCBI NO: 7489659 NR Description: ABA-induced plasma membrane protein PM 19 - wheat
  misc_feature (1)..(137): Homolog of NCBI NO: 6851373 NR Description: plasma membrane associated protein [Hordeum
  misc_feature (1)..(137): Homolog of NCBI NO: 15239619 NR Description: plasma membrane associated protein -like
  misc_feature (24)..(135): Homolog of NCBI NO: 15237455 NR Description: putative protein; protein id: At5g46530.1
  misc_feature (115)..(138): Homolog of NCBI NO: 34904644 NR Description: putative ABA-induced plasma membrane protein
  misc_feature (1)..(121): Homolog of NCBI NO: 34904644 NR Description: putative ABA-induced plasma membrane protein
  misc_feature (1)..(135): Homolog of NCBI NO: 15218953 NR Description: plasma membrane associated protein, putative
  misc_feature (1)..(136): Homolog of NCBI NO: 34911480 NR Description: putative plasma membrane associated protein
MYVIVAAVGGWAINHAINYGFFIGTGLHLPAHFSPINFPIGNAATGFFVIFAVIAGVVGAGSALAGLNHVRAWSTESLPAAASAGFIAWTLTLLAMGLAVKEIELHGRNARLICMESFTIILSATQLFYLLAIHGGLR

SEQ ID NO: 2568 - DNA, 1328 bp, Zea mays subsp. mays
  misc_feature (1)..(1328): Ceres Seq. ID no. 12410649
  misc_feature: MA Experiment ID: 108535 Result: Up-regulated in Transcription
  misc_feature: MA Experiment 108535 PARAMETER Experiment Name: Zm_Meristem_P Parameter: Age (day) Value: 8
  misc_feature: MA Experiment 108535 PARAMETER Experiment Name: Zm_Meristem_P Parameter: Organism Value: Zea mays
  misc_feature: MA Experiment 108535 PARAMETER Experiment Name: Zm_Meristem_P Parameter: Plant Line Value: 35A19
  misc_feature: MA Experiment 108535 PARAMETER Experiment Name: Zm_Meristem_P Parameter: Tissue Value: Root Meristem vs. Above Root Meristem
  misc_feature: MA Experiment ID: 108544 Result: Down-regulated in Transcription
  misc_feature: MA Experiment ID: 20000487 Result: Up-regulated in Transcription
  misc_feature: MA Experiment 20000487 PARAMETER Experiment Name: Zm_50mM_NH4NO3_L_to_H_P Parameter: Organism Value: Zea mays
  misc_feature: MA Experiment 20000487 PARAMETER Experiment Name: Zm_50mM_NH4NO3_L_to_H_P Parameter: Timepoint (hr) Value: 4
  misc_feature: MA Experiment 20000487 PARAMETER Experiment Name: Zm_50mM_NH4NO3_L_to_H_P Parameter: Tissue Value: Leaves
  misc_feature: MA Experiment 20000487 PARAMETER Experiment Name: Zm_50mM_NH4NO3_L_to_H_P Parameter: Treatment Value: 50mM NH4NO3 vs. 100mM Mannitol
  misc_feature: MA Experiment ID: 20000492 Result: Up-regulated in Transcription
  misc_feature: MA Experiment 20000492 PARAMETER Experiment Name: Zm_Hybrid_Seed_Dev_P Parameter: DAP Value: 12
  misc_feature: MA Experiment 20000492 PARAMETER Experiment Name: Zm_Hybrid_Seed_Dev_P Parameter: Organism Value: Zea mays
  misc_feature: MA Experiment 20000492 PARAMETER Experiment Name: Zm_Hybrid_Seed_Dev_P Parameter: Plant Line Value: 35A19
  misc_feature: MA Experiment 20000492 PARAMETER Experiment Name: Zm_Hybrid_Seed_Dev_P Parameter: Tissue Value: Fert Kernel vs. Unfert Floret
  misc_feature: MA Experiment ID: 20000626 Result: Up-regulated in Transcription
  misc_feature: MA Experiment 20000626 PARAMETER Experiment Name: Zm_Herbicide-Treatments_P Parameter: Timepoint (hr) Value: 12
  misc_feature: MA Experiment 20000626 PARAMETER Experiment Name: Zm_Herbicide-Treatments_P Parameter: Tissue Value: Aerial
  misc_feature: MA Experiment 20000626 PARAMETER Experiment Name: Zm_Herbicide-Treatments_P Parameter: Treatment Value: Roundup vs. No Treatment
accaaagccctagctcggctcacttgctttcctggccgccgtctcctccgcggctcttaacgccgcatccactcgccggttcttaacgccgcccgccgcctcctccgcggctctgccctcccgccgctgccgccgcctacccaggaatcaggatgcgggtgaagaagcggtcgaagcaccgcaaagcggtcaagttctacgccacatgcttcggcttccgcgagccctataaagtcctcatcgacggcaccttcgtccaccacctcctcacccagcgcctcctcccggccgacgaggctctccgagacctcctctcggcctccaggacgccagccctcttcacctccaagtgcatcctcgcagagctcagacgtctcggcaagtcacatgccgaatcatttgacgccgcgcagcttctcaccacaaccaagtgtgagcatgacaaggtggtcggtgcagttaactgtgtccagtcactgataggtgataaaaatcctgaacatttcttcgttgccacccaggatcctggtctccgagaaaacttacgagagattcctggggttcctgtgatatatggtctgaagaactctttatgcatagaacggccctctatgcagcaacgcaagtttgctcaattggatgaggagaagcgtctcaatatggatatctctgaatacaagaagttactgaaggctgcatcagaaggaaagacaattgccagtgaaaatggaagtggcgaagaacaacatgagatgcctattagttctcttgtaaaaaatgcacttcatgttactgataaaaccaagtttaagaggaacaaagcaaagggtccaaacccactctcctgtaagaagaagaaaccaaagctccccacggctattcaaaagcaggcaggtacggctgatggcgaggcaaagaggaagagggttcggaagcggaagagaggccaaaaagataacaagcaattggaggctgcgaactagaaggatgggcttgcgtaggaagtttcagtgctcttgctagacatccatcctgactccggagcaagtcaactatggaggagttcctttctcccacacaggattcagtatgccatgccataccatgctcattatatgttgaagatgcttcttgcaacgtaacacttgattggttatggtgatcgtgaatccttctctagaggatgttattggatgtttcttttgtcgcaagatgcaactttaaatgttttttgaagcaaaagtttgatgccagtagctctaccaggttcttgcttgccctgctacatgtgtgatcccattcttcaattgtaagatgtgtttgttgag

SEQ ID NO: 2569 - protein, 276 aa, Zea mays subsp. mays
  peptide (1)..(276): Ceres Seq. ID no. 12410650
  misc_feature (62)..(152): Pfam Name: Protein of unknown function, DUF652 Pfam Description: Protein of unknown function, DUF652
  misc_feature (4)..(227): Homolog of NCBI NO: 39586538 NR Description: Hypothetical protein CBG21174 [Caenorhabditis
  misc_feature (1)..(226): Homolog of NCBI NO: 17552478 NR Description: Protein required for cell viability like (26.3
  misc_feature (1)..(236): Homolog of NCBI NO: 6324577 NR Description: Protein required for cell viability; Yor004wp
  misc_feature (1)..(248): Homolog of NCBI NO: 24580927 NR Description: CG17652-PA [Drosophila melanogaster]
  misc_feature (6)..(218): Homolog of NCBI NO: 14150118 NR Description: hypothetical protein MGC14595 [Homo sapiens]
  misc_feature (6)..(238): Homolog of NCBI NO: 26335161 NR Description: unnamed protein product [Mus musculus]
  misc_feature (6)..(238): Homolog of NCBI NO: 21313442 NR Description: RIKEN cDNA D530033C11 [Mus musculus]
  misc_feature (1)..(263): Homolog of NCBI NO: 19075891 NR Description: conserved protein; putative tRNA synthetase class
  misc_feature (1)..(259): Homolog of NCBI NO: 25408336 NR Description: hypothetical protein At2g34570 [imported] -
  misc_feature (1)..(267): Homolog of NCBI NO: 30686117 NR Description: expressed protein [Arabidopsis thaliana]
MRVKKRSKHRKAVKFYATCFGFREPYKVLIDGTFVHHLLTQRLLPADEALRDLLSASRTPALFTSKCILAELRRLGKSHAESFDAAQLLTTTKCEHDKVVGAVNCVQSLIGDKNPEHFFVATQDPGLRENLREIPGVPVIYGLKNSLCIERPSMQQRKFAQLDEEKRLNMDISEYKKLLKAASEGKTIASENGSGEEQHEMPISSLVKNALHVTDKTKFKRNKAKGPNPLSCKKKKPKLPTAIQKQAGTADGEAKRKRVRKRKRGQKDNKQLEAAN

SEQ ID NO: 2570 - DNA, 1271 bp, Zea mays subsp. mays
  misc_feature (1)..(1271): Ceres Seq. ID no. 12369155
  misc_feature: MA Experiment ID: 108523 Result: Down-regulated in Transcription
  misc_feature: MA Experiment 108523 PARAMETER Experiment Name: Zm_42deg_Heat_P Parameter: Age (day) Value: 8
  misc_feature: MA Experiment 108523 PARAMETER Experiment Name: Zm_42deg_Heat_P Parameter: Organism Value: Zea mays
  misc_feature: MA Experiment 108523 PARAMETER Experiment Name: Zm_42deg_Heat_P Parameter: Plant Line Value: 35A19
  misc_feature: MA Experiment 108523 PARAMETER Experiment Name: Zm_42deg_Heat_P Parameter: Temperature (deg C) Value: 42 vs. 22
  misc_feature: MA Experiment 108523 PARAMETER Experiment Name: Zm_42deg_Heat_P Parameter: Timepoint (hr) Value: 6
  misc_feature: MA Experiment 108523 PARAMETER Experiment Name: Zm_42deg_Heat_P Parameter: Tissue Value: Aerial
  misc_feature: MA Experiment ID: 108529 Result: Down-regulated in Transcription
  misc_feature: MA Experiment 108529 PARAMETER Experiment Name: Zm_Imbibed_Seeds_P Parameter: Age (day) Value: 5 vs. 2
  misc_feature: MA Experiment 108529 PARAMETER Experiment Name: Zm_Imbibed_Seeds_P Parameter: Organism Value: Zea mays
  misc_feature: MA Experiment 108529 PARAMETER Experiment Name: Zm_Imbibed_Seeds_P Parameter: Plant Line Value: 35A19
  misc_feature: MA Experiment 108529 PARAMETER Experiment Name: Zm_Imbibed_Seeds_P Parameter: Tissue Value: Roots vs. Embryo
  misc_feature: MA Experiment ID: 108535 Result: Down-regulated in Transcription
  misc_feature: MA Experiment 108535 PARAMETER Experiment Name: Zm_Meristem_P Parameter: Age (day) Value: 8
  misc_feature: MA Experiment 108535 PARAMETER Experiment Name: Zm_Meristem_P Parameter: Organism Value: Zea mays
  misc_feature: MA Experiment 108535 PARAMETER Experiment Name: Zm_Meristem_P Parameter: Plant Line Value: 35A19
  misc_feature: MA Experiment 108535 PARAMETER Experiment Name: Zm_Meristem_P Parameter: Tissue Value: Root Meristem vs. Above Root Meristem
  misc_feature: MA Experiment ID: 108536 Result: Down-regulated in Transcription
  misc_feature: MA Experiment 108536 PARAMETER Experiment Name: Zm_Meristem_P Parameter: Age (day) Value: 8
  misc_feature: MA Experiment 108536 PARAMETER Experiment Name: Zm_Meristem_P Parameter: Organism Value: Zea mays
  misc_feature: MA Experiment 108536 PARAMETER Experiment Name: Zm_Meristem_P Parameter: Plant Line Value: 35A19
  misc_feature: MA Experiment 108536 PARAMETER Experiment Name: Zm_Meristem_P Parameter: Tissue Value: Shoot Meristem vs. Above Shoot Meristem
  misc_feature: MA Experiment ID: 108543 Result: Up-regulated in Transcription
  misc_feature: MA Experiment ID: 108544 Result: Up-regulated in Transcription
  misc_feature: MA Experiment ID: 108546 Result: Down-regulated in Transcription
  misc_feature: MA Experiment 108546 PARAMETER Experiment Name: Zm_Imbibed_Seeds_P Parameter: Age (day) Value: 3 vs. 2
  misc_feature: MA Experiment 108546 PARAMETER Experiment Name: Zm_Imbibed_Seeds_P Parameter: Organism Value: Zea mays
  misc_feature: MA Experiment 108546 PARAMETER Experiment Name: Zm_Imbibed_Seeds_P Parameter: Plant Line Value: 35A19
  misc_feature: MA Experiment 108546 PARAMETER Experiment Name: Zm_Imbibed_Seeds_P Parameter: Tissue Value: Roots vs. Embryo
  misc_feature: MA Experiment ID: 108688 Result: Down-regulated in Transcription
  misc_feature: MA Experiment 108688 PARAMETER Experiment Name: Zm_Embryos-Flowers__P Parameter: Tissue Value: Immature Flowers vs. Aerial+
  misc_feature: MA Experiment ID: 108689 Result: Down-regulated in Transcription
  misc_feature: MA Experiment 108689 PARAMETER Experiment Name: Zm_Drought_Roots_P Parameter: Age (day) Value: 9
  misc_feature: MA Experiment 108689 PARAMETER Experiment Name: Zm_Drought_Roots_P Parameter: Organism Value: Zea mays
  misc_feature: MA Experiment 108689 PARAMETER Experiment Name: Zm_Drought_Roots_P Parameter: Plant Line Value: 35A19
  misc_feature: MA Experiment 108689 PARAMETER Experiment Name: Zm_Drought_Roots_P Parameter: Timepoint (hr) Value: 24
  misc_feature: MA Experiment 108689 PARAMETER Experiment Name: Zm_Drought_Roots_P Parameter: Tissue Value: Roots
  misc_feature: MA Experiment 108689 PARAMETER Experiment Name: Zm_Drought_Roots_P Parameter: Treatment Value: Drought vs. No Drought
  misc_feature: MA Experiment ID: 20000480 Result: Down-regulated in Transcription
  misc_feature: MA Experiment 20000480 PARAMETER Experiment Name: Zm_Drought_P Parameter: Age (day) Value: 11
  misc_feature: MA Experiment 20000480 PARAMETER Experiment Name: Zm_Drought_P Parameter: Organism Value: Zea mays
  misc_feature: MA Experiment 20000480 PARAMETER Experiment Name: Zm_Drought_P Parameter: Plant Line Value: 35A19
  misc_feature: MA Experiment 20000480 PARAMETER Experiment Name: Zm_Drought_P Parameter: Timepoint (hr) Value: 72
  misc_feature: MA Experiment 20000480 PARAMETER Experiment Name: Zm_Drought_P Parameter: Tissue Value: Aerial
  misc_feature: MA Experiment 20000480 PARAMETER Experiment Name: Zm_Drought_P Parameter: Treatment Value: Drought vs. No Drought
  misc_feature: MA Experiment ID: 20000492 Result: Down-regulated in Transcription
  misc_feature: MA Experiment 20000492 PARAMETER Experiment Name: Zm_Hybrid_Seed_Dev_P Parameter: DAP Value: 12
  misc_feature: MA Experiment 20000492 PARAMETER Experiment Name: Zm_Hybrid_Seed_Dev_P Parameter: Organism Value: Zea mays
  misc_feature: MA Experiment 20000492 PARAMETER Experiment Name: Zm_Hybrid_Seed_Dev_P Parameter: Plant Line Value: 35A19
  misc_feature: MA Experiment 20000492 PARAMETER Experiment Name: Zm_Hybrid_Seed_Dev_P Parameter: Tissue Value: Fert Kernel vs. Unfert Floret
  misc_feature: MA Experiment ID: 20000535 Result: Down-regulated in Transcription
  misc_feature: MA Experiment 20000535 PARAMETER Experiment Name: Zm_Hybrid_Seed_Dev_P Parameter: DAP Value: 30 vs. 12
  misc_feature: MA Experiment 20000535 PARAMETER Experiment Name: Zm_Hybrid_Seed_Dev_P Parameter: Organism Value: Zea mays
  misc_feature: MA Experiment 20000535 PARAMETER Experiment Name: Zm_Hybrid_Seed_Dev_P Parameter: Plant Line Value: 35A19
  misc_feature: MA Experiment 20000535 PARAMETER Experiment Name: Zm_Hybrid_Seed_Dev_P Parameter: Tissue Value: Embryo vs. Unfert Floret
  misc_feature: MA Experiment ID: 20000626 Result: Up-regulated in Transcription
  misc_feature: MA Experiment 20000626 PARAMETER Experiment Name: Zm_Herbicide-Treatments_P Parameter: Timepoint (hr) Value: 12
  misc_feature: MA Experiment 20000626 PARAMETER Experiment Name: Zm_Herbicide-Treatments_P Parameter: Tissue Value: Aerial
  misc_feature: MA Experiment 20000626 PARAMETER Experiment Name: Zm_Herbicide-Treatments_P Parameter: Treatment Value: Roundup vs. No Treatment
  misc_feature: MA Experiment ID: 20001612 Result: Up-regulated in Transcription
  misc_feature: MA Experiment 20001612 PARAMETER Experiment Name: Zm_50ppm_KNO3_L-to-H_P Parameter: Age (day) Value: 19
  misc_feature: MA Experiment 20001612 PARAMETER Experiment Name: Zm_50ppm_KNO3_L-to-H_P Parameter: Organism Value: Zea mays
  misc_feature: MA Experiment 20001612 PARAMETER Experiment Name: Zm_50ppm_KNO3_L-to-H_P Parameter: Plant Line Value: 35A19
  misc_feature: MA Experiment 20001612 PARAMETER Experiment Name: Zm_50ppm_KNO3_L-to-H_P Parameter: Timepoint (hr) Value: 8
  misc_feature: MA Experiment 20001612 PARAMETER Experiment Name: Zm_50ppm_KNO3_L-to-H_P Parameter: Tissue Value: Roots
  misc_feature: MA Experiment 20001612 PARAMETER Experiment Name: Zm_50ppm_KNO3_L-to-H_P Parameter: Treatment Value: 50ppm KNO3 vs. 50ppm KCl
  misc_feature: MA Experiment ID: 20001613 Result: Up-regulated in Transcription
  misc_feature: MA Experiment 20001613 PARAMETER Experiment Name: Zm_50ppm_KNO3_L-to-H_P Parameter: Age (day) Value: 20
  misc_feature: MA Experiment 20001613 PARAMETER Experiment Name: Zm_50ppm_KNO3_L-to-H_P Parameter: Organism Value: Zea mays
  misc_feature: MA Experiment 20001613 PARAMETER Experiment Name: Zm_50ppm_KNO3_L-to-H_P Parameter: Plant Line Value: 35A19
  misc_feature: MA Experiment 20001613 PARAMETER Experiment Name: Zm_50ppm_KNO3_L-to-H_P Parameter: Timepoint (hr) Value: 24
  misc_feature: MA Experiment 20001613 PARAMETER Experiment Name: Zm_50ppm_KNO3_L-to-H_P Parameter: Tissue Value: Roots
  misc_feature: MA Experiment 20001613 PARAMETER Experiment Name: Zm_50ppm_KNO3_L-to-H_P Parameter: Treatment Value: 50ppm KNO3 vs. 50ppm KCl
accgagttcgtcggtcgtcacctgatattttttccgacggacacacaagcatatatacatacacgccgacatagggatgatggcttcctctagtcctcagcgtgcagccggcgccgccgtcgccggcgtgctgctggtggcggctgccgccctgtgctcgtgcggcgccatggcgcagctgaccgcggactactacgactgcacatgccctgacgcctacaacatcgtgaagcaggtcctgatcgaggcgcacaagtccgacgtgcgcatctacgccagcctcacccgcctccacttccacgactgcttcgtccagggctgcgatggctcggtgctcctggacgccgttccgggggtggccaactccactgagaagctggcgccggccaacaacaactcggcgcgagggttcccggtggtggacaaagtgaaggcggcgctggaggacgcctgccccggcgtcgtctcctgcgccgacatcctcgccctcgccgcagagatctcggtcgaactgtccggaggaccaaagtgggcagtgcttcttgggaggctagacagcaagaaggccgacttcaagagcgcggagaacctgccgtcgccgttcgacaacctgacggtgctggagcagaagttcgcggccgtgggcctccacaccgtggacctggtggccctctcgggagctcacacgttcgggcgggtccagtgccagttcgtcacggggcggctgtacaacttcagcggcacgaaccggccggaccccacgctcaactccggctaccgggcgttcctggcccagaggtgcccccagaacggcagcccctcggccctcaacgacctggaccccacgacgccgaacctgttcgacaaccactactacaccaacctggaggtgaaccggggcttcctcggctcggaccaggagctcaagtcggcgccgcaggcgcagggcgtcaccgcgcccgtcgtcgaccagttcgccaccagccaggccgccttcttcagcagcttcgcgcagtccatgatcaacatgggcaacatccagccgctcaccgacccggccaagggagaggtccgctgcgactgccgggtggctaatgatgattaatccacgacgacgacgtgtgtagttagaaacggacgtgaatgcatgtgcatgtgcccggccgggtcgttagtacaccgacaagcaagagtgcactagcgctatggatcggactatatggtgcacaactgcacatgcatgcatataatatcagggcctcgtcgtttcg

SEQ ID NO: 2571 - protein, 342 aa, Zea mays subsp. mays
  peptide (1)..(342): Ceres Seq. ID no. 12369156
  misc_feature (51)..(303): Pfam Name: Peroxidase Pfam Description: Peroxidase
  misc_feature (34)..(337): Homolog of NCBI NO: 1730490 NR Description: Peroxidase A2
  misc_feature (19)..(340): Homolog of NCBI NO: 21593262 NR Description: peroxidase [Arabidopsis thaliana]
  misc_feature (10)..(340): Homolog of NCBI NO: 20330758 NR Description: Putative peroxidase [Oryza sativa (japonica
  misc_feature (31)..(341): Homolog of NCBI NO: 1279654 NR Description: peroxidase [Populus balsamifera subsp.
  misc_feature (13)..(340): Homolog of NCBI NO: 8546851 NR Description: peroxidase [Ipomoea batatas]
  misc_feature (31)..(342): Homolog of NCBI NO: 2129513 NR Description: peroxidase (EC 1.11.1.7) A3a precursor - Japanese
  misc_feature (1)..(342): Homolog of NCBI NO: 15240141 NR Description: peroxidase, putative
  misc_feature (1)..(342): Homolog of NCBI NO: 21594792 NR Description: peroxidase [Arabidopsis thaliana]
  misc_feature (15)..(340): Homolog of NCBI NO: 5002348 NR Description: peroxidase 5 precursor [Phaseolus vulgaris]
  misc_feature (2)..(340): Homolog of NCBI NO: 37530466 NR Description: putative peroxidase [Oryza sativa (japonica
MMASSSPQRAAGAAVAGVLLVAAAALCSCGAMAQLTADYYDCTCPDAYNIVKQVLIEAHKSDVRIYASLTRLHFHDCFVQGCDGSVLLDAVPGVANSTEKLAPANNNSARGFPVVDKVKAALEDACPGVVSCADILALAAEISVELSGGPKWAVLLGRLDSKKADFKSAENLPSPFDNLTVLEQKFAAVGLHTVDLVALSGAHTFGRVQCQFVTGRLYNFSGTNRPDPTLNSGYRAFLAQRCPQNGSPSALNDLDPTTPNLFDNHYYTNLEVNRGFLGSDQELKSAPQAQGVTAPVVDQFATSQAAFFSSFAQSMINMGNIQPLTDPAKGEVRCDCRVANDD

SEQ ID NO: 2572 - protein, 341 aa, Zea mays subsp. mays
  peptide (1)..(341): Ceres Seq. ID no. 12369157
  misc_feature (50)..(302): Pfam Name: Peroxidase Pfam Description: Peroxidase
  misc_feature (33)..(336): Homolog of NCBI NO: 1730490 NR Description: Peroxidase A2
  misc_feature (18)..(339): Homolog of NCBI NO: 21593262 NR Description: peroxidase [Arabidopsis thaliana]
  misc_feature (9)..(339): Homolog of NCBI NO: 20330758 NR Description: Putative peroxidase [Oryza sativa (japonica
  misc_feature (30)..(340): Homolog of NCBI NO: 1279654 NR Description: peroxidase [Populus balsamifera subsp.
  misc_feature (12)..(339): Homolog of NCBI NO: 8546851 NR Description: peroxidase [Ipomoea batatas]
  misc_feature (30)..(341): Homolog of NCBI NO: 2129513 NR Description: peroxidase (EC 1.11.1.7) A3a precursor - Japanese
  misc_feature (1)..(341): Homolog of NCBI NO: 15240141 NR Description: peroxidase, putative
  misc_feature (1)..(341): Homolog of NCBI NO: 21594792 NR Description: peroxidase [Arabidopsis thaliana]
  misc_feature (14)..(339): Homolog of NCBI NO: 5002348 NR Description: peroxidase 5 precursor [Phaseolus vulgaris]
  misc_feature (1)..(339): Homolog of NCBI NO: 37530466 NR Description: putative peroxidase [Oryza sativa (japonica
MASSSPQRAAGAAVAGVLLVAAAALCSCGAMAQLTADYYDCTCPDAYNIVKQVLIEAHKSDVRIYASLTRLHFHDCFVQGCDGSVLLDAVPGVANSTEKLAPANNNSARGFPVVDKVKAALEDACPGVVSCADILALAAEISVELSGGPKWAVLLGRLDSKKADFKSAENLPSPFDNLTVLEQKFAAVGLHTVDLVALSGAHTFGRVQCQFVTGRLYNFSGTNRPDPTLNSGYRAFLAQRCPQNGSPSALNDLDPTTPNLFDNHYYTNLEVNRGFLGSDQELKSAPQAQGVTAPVVDQFATSQAAFFSSFAQSMINMGNIQPLTDPAKGEVRCDCRVANDD

SEQ ID NO: 2573 - protein, 311 aa, Zea mays subsp. mays
  peptide (1)..(311): Ceres Seq. ID no. 12369158
  misc_feature (20)..(272): Pfam Name: Peroxidase Pfam Description: Peroxidase
  misc_feature (3)..(306): Homolog of NCBI NO: 1730490 NR Description: Peroxidase A2
  misc_feature (1)..(309): Homolog of NCBI NO: 21593262 NR Description: peroxidase [Arabidopsis thaliana]
  misc_feature (1)..(309): Homolog of NCBI NO: 20330758 NR Description: Putative peroxidase [Oryza sativa (japonica
  misc_feature (1)..(310): Homolog of NCBI NO: 1279654 NR Description: peroxidase [Populus balsamifera subsp.
  misc_feature (1)..(309): Homolog of NCBI NO: 8546851 NR Description: peroxidase [Ipomoea batatas]
  misc_feature (1)..(311): Homolog of NCBI NO: 2129513 NR Description: peroxidase (EC 1.11.1.7) A3a precursor - Japanese
  misc_feature (1)..(311): Homolog of NCBI NO: 15240141 NR Description: peroxidase, putative
  misc_feature (1)..(311): Homolog of NCBI NO: 21594792 NR Description: peroxidase [Arabidopsis thaliana]
  misc_feature (1)..(309): Homolog of NCBI NO: 5002348 NR Description: peroxidase 5 precursor [Phaseolus vulgaris]
  misc_feature (1)..(309): Homolog of NCBI NO: 37530466 NR Description: putative peroxidase [Oryza sativa (japonica
MAQLTADYYDCTCPDAYNIVKQVLIEAHKSDVRIYASLTRLHFHDCFVQGCDGSVLLDAVPGVANSTEKLAPANNNSARGFPVVDKVKAALEDACPGVVSCADILALAAEISVELSGGPKWAVLLGRLDSKKADFKSAENLPSPFDNLTVLEQKFAAVGLHTVDLVALSGAHTFGRVQCQFVTGRLYNFSGTNRPDPTLNSGYRAFLAQRCPQNGSPSALNDLDPTTPNLFDNHYYTNLEVNRGFLGSDQELKSAPQAQGVTAPVVDQFATSQAAFFSSFAQSMINMGNIQPLTDPAKGEVRCDCRVANDD

SEQ ID NO: 2574 - DNA, 1502 bp, Zea mays subsp. mays
  misc_feature (1)..(1502): Ceres Seq. ID no. 12357279
  misc_feature: MA Experiment ID: 108515 Result: Up-regulated in Transcription
  misc_feature: MA Experiment 108515 PARAMETER Experiment Name: Zm_2mM_SA_P Parameter: Age (day) Value: 8
  misc_feature: MA Experiment 108515 PARAMETER Experiment Name: Zm_2mM_SA_P Parameter: Organism Value: Zea mays
  misc_feature: MA Experiment 108515 PARAMETER Experiment Name: Zm_2mM_SA_P Parameter: Plant Line Value: 35A19
  misc_feature: MA Experiment 108515 PARAMETER Experiment Name: Zm_2mM_SA_P Parameter: Timepoint (hr) Value: 12
  misc_feature: MA Experiment 108515 PARAMETER Experiment Name: Zm_2mM_SA_P Parameter: Tissue Value: Aerial
  misc_feature: MA Experiment 108515 PARAMETER Experiment Name: Zm_2mM_SA_P Parameter: Treatment Value: 2mM SA vs. No Treatment
  misc_feature: MA Experiment ID: 108527 Result: Up-regulated in Transcription
  misc_feature: MA Experiment 108527 PARAMETER Experiment Name: Zm_5mM_NO_P Parameter: Age (day) Value: 8
  misc_feature: MA Experiment 108527 PARAMETER Experiment Name: Zm_5mM_NO_P Parameter: Organism Value: Zea mays
  misc_feature: MA Experiment 108527 PARAMETER Experiment Name: Zm_5mM_NO_P Parameter: Plant Line Value: 35A19
  misc_feature: MA Experiment 108527 PARAMETER Experiment Name: Zm_5mM_NO_P Parameter: Timepoint (hr) Value: 6
  misc_feature: MA Experiment 108527 PARAMETER Experiment Name: Zm_5mM_NO_P Parameter: Tissue Value: Aerial
  misc_feature: MA Experiment 108527 PARAMETER Experiment Name: Zm_5mM_NO_P Parameter: Treatment Value: 5mM NO vs. No Treatment
  misc_feature: MA Experiment ID: 20000492 Result: Down-regulated in Transcription
  misc_feature: MA Experiment 20000492 PARAMETER Experiment Name: Zm_Hybrid_Seed_Dev_P Parameter: DAP Value: 12
  misc_feature: MA Experiment 20000492 PARAMETER Experiment Name: Zm_Hybrid_Seed_Dev_P Parameter: Organism Value: Zea mays
  misc_feature: MA Experiment 20000492 PARAMETER Experiment Name: Zm_Hybrid_Seed_Dev_P Parameter: Plant Line Value: 35A19
  misc_feature: MA Experiment 20000492 PARAMETER Experiment Name: Zm_Hybrid_Seed_Dev_P Parameter: Tissue Value: Fert Kernel vs. Unfert Floret
  misc_feature: MA Experiment ID: 20000534 Result: Down-regulated in Transcription
  misc_feature: MA Experiment 20000534 PARAMETER Experiment Name: Zm_Hybrid_Pollen_P Parameter: Age (day) Value: 8
  misc_feature: MA Experiment 20000534 PARAMETER Experiment Name: Zm_Hybrid_Pollen_P Parameter: Organism Value: Zea mays
  misc_feature: MA Experiment 20000534 PARAMETER Experiment Name: Zm_Hybrid_Pollen_P Parameter: Plant Line Value: 35A19
  misc_feature: MA Experiment 20000534 PARAMETER Experiment Name: Zm_Hybrid_Pollen_P Parameter: Tissue Value: Pollen vs. Aerial
  misc_feature: MA Experiment ID: 20000535 Result: Down-regulated in Transcription
  misc_feature: MA Experiment 20000535 PARAMETER Experiment Name: Zm_Hybrid_Seed_Dev_P Parameter: DAP Value: 30 vs. 12
  misc_feature: MA Experiment 20000535 PARAMETER Experiment Name: Zm_Hybrid_Seed_Dev_P Parameter: Organism Value: Zea mays
  misc_feature: MA Experiment 20000535 PARAMETER Experiment Name: Zm_Hybrid_Seed_Dev_P Parameter: Plant Line Value: 35A19
  misc_feature: MA Experiment 20000535 PARAMETER Experiment Name: Zm_Hybrid_Seed_Dev_P Parameter: Tissue Value: Embryo vs. Unfert Floret
attatagccacggccggccggtggacgacagcaccacaccacctccaactacccgagaccatcgacgagcatcttcctgcatctgcaatggctgccgctaccgtgtccgtcccccgcatcaagctgggctcccaggggctagaggtctccgcgcagggcctcggctgcatgggcatgtccgccttctacggtccgcccaaacccgagcctgacatgatcaagctcatccaccacgccgtcgccgccggggtcaccctccttgacacctccgacatgtacggcccgcacaccaacgagatcctgctaggcaaggcgcttcaaggcggtgtaaaggagaaggtcgagctggccaccaagtttgccgtctccttcgccgacggcaagcgcgagatccgcggtgacccggcgtatgtacgggcagcctgcgaagccagcctcaagcggctcggcatcgactgcatcgacctctactaccagcaccgcatcgacaagaaggtgcccatcgaggtcacgattggtgaactcaagaagctagtggaagaaggaaaggttaagtacattgggttatccgaagcatctgcatcaacaatccgaagagctcacgcagtccatcctattactgcagtacagcttgaatggtcattatggtctagagatgcggaagaagatataattcccacttgcagagaacttggaattggaattgtagcttacagtccactaggcagagggtttttttgtagtggagcaaaactagttgactcactgtcagagcaggacttccgcaagcatatgcctagacttcaaccagagaatattgtcaagaatgctaagatattcgagcatgtgaatgcaatggcagctaaaaaaggatgcacaccatcacagctagcattggcatgggttcaccatcagggaaacgatgtttgccccatacctggaacaacaaaaatcgagaacttcaaccagaacgtgggggcgctttctgtgaagttgacaccagatgagatggccgaactcgagtcctgtgctgctgcaggtgaaatcttgggtgaccgttatcctcaaatggccaacacctggaaggactctgagaccccgccattgtcttcttggaaatctgagtagccaatctggtgtctcttcaattctgccaccgtcacattggtgtatctccaaattgtcggactgcagaagatactcaggtgcactttgcaaaagcgtccatatgatgtgcttgccttttgcaagctatgatgtttggtacttggtgtgtattgcatgcctcaatttgtatcaagagtatttacccatgagtatagcttgaaggttaaaaccactggttcgacgaataaccatatgcatttgtatcgagagtatttaccatgagtagcaaactgaattttgtaataatagtcaaaagtgtgattgtaaaatgtacttagggaatgtggtacgctatattagcgtgcaaacataagtatagccagttaagcccctcc

SEQ ID NO: 2575 - protein, 375 aa, Zea mays subsp. mays
  peptide (1)..(375): Ceres Seq. ID no. 12357280
  misc_feature (30)..(325): Homolog of NCBI NO: 728744 NR Description: AUXIN-INDUCED PROTEIN PCNT115
  misc_feature (30)..(374): Homolog of NCBI NO: 15220214 NR Description: putative auxin-induced protein
  misc_feature (37)..(374): Homolog of NCBI NO: 7447933 NR Description: auxin-induced protein - common sunflower
  misc_feature (32)..(374): Homolog of NCBI NO: 25316216 NR Description: hypothetical protein F8A5.24 [imported] -
  misc_feature (32)..(374): Homolog of NCBI NO: 15219786 NR Description: auxin-induced protein, putative; protein id:
  misc_feature (32)..(374): Homolog of NCBI NO: 30696459 NR Description: aldo/keto reductase family [Arabidopsis thaliana]
  misc_feature (30)..(283): Homolog of NCBI NO: 1352461 NR Description: IN2-2 PROTEIN
  misc_feature (32)..(374): Homolog of NCBI NO: 6562980 NR Description: auxin-induced atb2 [Arabidopsis thaliana]
  misc_feature (32)..(374): Homolog of NCBI NO: 18406861 NR Description: auxin-induced protein, putative
  misc_feature (28)..(375): Homolog of NCBI NO: 38344997 NR Description: OSJNBa0008A08.11 [Oryza sativa (japonica
IIATAGRWTTAPHHLQLPETIDEHLPASAMAAATVSVPRIKLGSQGLEVSAQGLGCMGMSAFYGPPKPEPDMIKLIHHAVAAGVTLLDTSDMYGPHTNEILLGKALQGGVKEKVELATKFAVSFADGKREIRGDPAYVRAACEASLKRLGIDCIDLYYQHRIDKKVPIEVTIGELKKLVEEGKVKYIGLSEASASTIRRAHAVHPITAVQLEWSLWSRDAEEDIIPTCRELGIGIVAYSPLGRGFFCSGAKLVDSLSEQDFRKHMPRLQPENIVKNAKIFEHVNAMAAKKGCTPSQLALAWVHHQGNDVCPIPGTTKIENFNQNVGALSVKLTPDEMAELESCAAAGEILGDRYPQMANTWKDSETPPLSSWKSE

SEQ ID NO: 2576 - protein, 346 aa, Zea mays subsp. mays
  peptide (1)..(346): Ceres Seq. ID no. 12357281
  misc_feature (1)..(296): Homolog of NCBI NO: 728744 NR Description: AUXIN-INDUCED PROTEIN PCNT115
  misc_feature (1)..(345): Homolog of NCBI NO: 15220214 NR Description: putative auxin-induced protein
  misc_feature (8)..(345): Homolog of NCBI NO: 7447933 NR Description: auxin-induced protein - common sunflower
  misc_feature (3)..(345): Homolog of NCBI NO: 25316216 NR Description: hypothetical protein F8A5.24 [imported] -
  misc_feature (3)..(345): Homolog of NCBI NO: 15219786 NR Description: auxin-induced protein, putative; protein id:
  misc_feature (3)..(345): Homolog of NCBI NO: 30696459 NR Description: aldo/keto reductase family [Arabidopsis thaliana]
  misc_feature (1)..(254): Homolog of NCBI NO: 1352461 NR Description: IN2-2 PROTEIN
  misc_feature (3)..(345): Homolog of NCBI NO: 6562980 NR Description: auxin-induced atb2 [Arabidopsis thaliana]
  misc_feature (3)..(345): Homolog of NCBI NO: 18406861 NR Description: auxin-induced protein, putative
  misc_feature (1)..(346): Homolog of NCBI NO: 38344997 NR Description: OSJNBa0008A08.11 [Oryza sativa (japonica
MAAATVSVPRIKLGSQGLEVSAQGLGCMGMSAFYGPPKPEPDMIKLIHHAVAAGVTLLDTSDMYGPHTNEILLGKALQGGVKEKVELATKFAVSFADGKREIRGDPAYVRAACEASLKRLGIDCIDLYYQHRIDKKVPIEVTIGELKKLVEEGKVKYIGLSEASASTIRRAHAVHPITAVQLEWSLWSRDAEEDIIPTCRELGIGIVAYSPLGRGFFCSGAKLVDSLSEQDFRKHMPRLQPENIVKNAKIFEHVNAMAAKKGCTPSQLALAWVHHQGNDVCPIPGTTKIENFNQNVGALSVKLTPDEMAELESCAAAGEILGDRYPQMANTWKDSETPPLSSWKSE

SEQ ID NO: 2577 - protein, 319 aa, Zea mays subsp. mays
  peptide (1)..(319): Ceres Seq. ID no. 12357282
  misc_feature (1)..(318): Homolog of NCBI NO: 15219786 NR Description: auxin-induced protein, putative; protein id:
  misc_feature (1)..(318): Homolog of NCBI NO: 30696459 NR Description: aldo/keto reductase family [Arabidopsis thaliana]
  misc_feature (1)..(227): Homolog of NCBI NO: 1352461 NR Description: IN2-2 PROTEIN
  misc_feature (1)..(318): Homolog of NCBI NO: 6562980 NR Description: auxin-induced atb2 [Arabidopsis thaliana]
  misc_feature (1)..(318): Homolog of NCBI NO: 18406861 NR Description: auxin-induced protein, putative
  misc_feature (1)..(319): Homolog of NCBI NO: 38344997 NR Description: OSJNBa0008A08.11 [Oryza sativa (japonica
  misc_feature (1)..(269): Homolog of NCBI NO: 728744 NR Description: AUXIN-INDUCED PROTEIN PCNT115
  misc_feature (1)..(318): Homolog of NCBI NO: 15220214 NR Description: putative auxin-induced protein
  misc_feature (1)..(318): Homolog of NCBI NO: 7447933 NR Description: auxin-induced protein - common sunflower
  misc_feature (1)..(318): Homolog of NCBI NO: 25316216 NR Description: hypothetical protein F8A5.24 [imported] -
MGMSAFYGPPKPEPDMIKLIHHAVAAGVTLLDTSDMYGPHTNEILLGKALQGGVKEKVELATKFAVSFADGKREIRGDPAYVRAACEASLKRLGIDCIDLYYQHRIDKKVPIEVTIGELKKLVEEGKVKYIGLSEASASTIRRAHAVHPITAVQLEWSLWSRDAEEDIIPTCRELGIGIVAYSPLGRGFFCSGAKLVDSLSEQDFRKHMPRLQPENIVKNAKIFEHVNAMAAKKGCTPSQLALAWVHHQGNDVCPIPGTTKIENFNQNVGALSVKLTPDEMAELESCAAAGEILGDRYPQMANTWKDSETPPLSSWKSE

SEQ ID NO: 2578 - DNA, 1461 bp, Zea mays subsp. mays
  misc_feature (1)..(1461): Ceres Seq. ID no. 12414242
  misc_feature: MA Experiment ID: 108523 Result: Down-regulated in Transcription
  misc_feature: MA Experiment 108523 PARAMETER Experiment Name: Zm_42deg_Heat_P Parameter: Age (day) Value: 8
  misc_feature: MA Experiment 108523 PARAMETER Experiment Name: Zm_42deg_Heat_P Parameter: Organism Value: Zea mays
  misc_feature: MA Experiment 108523 PARAMETER Experiment Name: Zm_42deg_Heat_P Parameter: Plant Line Value: 35A19
  misc_feature: MA Experiment 108523 PARAMETER Experiment Name: Zm_42deg_Heat_P Parameter: Temperature (deg C) Value: 42 vs. 22
  misc_feature: MA Experiment 108523 PARAMETER Experiment Name: Zm_42deg_Heat_P Parameter: Timepoint (hr) Value: 6
  misc_feature: MA Experiment 108523 PARAMETER Experiment Name: Zm_42deg_Heat_P Parameter: Tissue Value: Aerial
  misc_feature: MA Experiment ID: 108529 Result: Up-regulated in Transcription
  misc_feature: MA Experiment 108529 PARAMETER Experiment Name: Zm_Imbibed_Seeds_P Parameter: Age (day) Value: 5 vs. 2
  misc_feature: MA Experiment 108529 PARAMETER Experiment Name: Zm_Imbibed_Seeds_P Parameter: Organism Value: Zea mays
  misc_feature: MA Experiment 108529 PARAMETER Experiment Name: Zm_Imbibed_Seeds_P Parameter: Plant Line Value: 35A19
  misc_feature: MA Experiment 108529 PARAMETER Experiment Name: Zm_Imbibed_Seeds_P Parameter: Tissue Value: Roots vs. Embryo
  misc_feature: MA Experiment ID: 108535 Result: Down-regulated in Transcription
  misc_feature: MA Experiment 108535 PARAMETER Experiment Name: Zm_Meristem_P Parameter: Age (day) Value: 8
  misc_feature: MA Experiment 108535 PARAMETER Experiment Name: Zm_Meristem_P Parameter: Organism Value: Zea mays
  misc_feature: MA Experiment 108535 PARAMETER Experiment Name: Zm_Meristem_P Parameter: Plant Line Value: 35A19
  misc_feature: MA Experiment 108535 PARAMETER Experiment Name: Zm_Meristem_P Parameter: Tissue Value: Root Meristem vs. Above Root Meristem
  misc_feature: MA Experiment ID: 108543 Result: Up-regulated in Transcription
  misc_feature: MA Experiment ID: 108559 Result: Down-regulated in Transcription
  misc_feature: MA Experiment 108559 PARAMETER Experiment Name: Zm_5mM_NO_P Parameter: Age (day) Value: 8
  misc_feature: MA Experiment 108559 PARAMETER Experiment Name: Zm_5mM_NO_P Parameter: Organism Value: Zea mays
  misc_feature: MA Experiment 108559 PARAMETER Experiment Name: Zm_5mM_NO_P Parameter: Plant Line Value: 35A19
  misc_feature: MA Experiment 108559 PARAMETER Experiment Name: Zm_5mM_NO_P Parameter: Timepoint (hr) Value: 12
  misc_feature: MA Experiment 108559 PARAMETER Experiment Name: Zm_5mM_NO_P Parameter: Tissue Value: Aerial
  misc_feature: MA Experiment 108559 PARAMETER Experiment Name: Zm_5mM_NO_P Parameter: Treatment Value: 5mM NO vs. No Treatment
  misc_feature: MA Experiment ID: 20000487 Result: Down-regulated in Transcription
  misc_feature: MA Experiment 20000487 PARAMETER Experiment Name: Zm_50mM_NH4NO3_L_to_H_P Parameter: Organism Value: Zea mays
  misc_feature: MA Experiment 20000487 PARAMETER Experiment Name: Zm_50mM_NH4NO3_L_to_H_P Parameter: Timepoint (hr) Value: 4
  misc_feature: MA Experiment 20000487 PARAMETER Experiment Name: Zm_50mM_NH4NO3_L_to_H_P Parameter: Tissue Value: Leaves
  misc_feature: MA Experiment 20000487 PARAMETER Experiment Name: Zm_50mM_NH4NO3_L_to_H_P Parameter: Treatment Value: 50mM NH4NO3 vs. 100mM Mannitol
  misc_feature: MA Experiment ID: 20000632 Result: Down-regulated in Transcription
  misc_feature: MA Experiment 20000632 PARAMETER Experiment Name: Zm_Herbicide-Treatments_P Parameter: Timepoint (hr) Value: 4
  misc_feature: MA Experiment 20000632 PARAMETER Experiment Name: Zm_Herbicide-Treatments_P Parameter: Tissue Value: Aerial
  misc_feature: MA Experiment 20000632 PARAMETER Experiment Name: Zm_Herbicide-Treatments_P Parameter: Treatment Value: Glean vs. No Treatment
aaaaggggatctcagggtcagagcgcatcagcacacagacagcgcggtgctctccagtccccaccaattaagctcagggtctagtgagcagccagagagcctcgtcccgttcccacccccattgcttgctctgactgctccgccgtgcgtgcgtcacccgcgctcgggaggtgagtggtttggttgcgcagccaactgccggcccggcaccgtaccgcttgttcgcttctgaggttgtgcggagtggttgctggcctggccgtggccggcataccgataaaggcgagagacaaggcgttgtctcactctcatccgtcgtccgtctcgtctcggctttctcgcctcctcgggcggcagcggtgttccactcccatcgcgtcgggacatagaaagggggagcgcgggcgacacgcgagcgttagttgccatggacgcgcccttcttccacgagctcaggcggcaggcctcctcctacctcaccggcaagatccgctccgcgcggctggcgctcaccgacgtcaccccgacgcagctcatgacggaggaggcgacgaacggggacgcgtcgccgccgaacgtcaagacgatgggcctcatagcccggcaggcgttcgaggtcgacgagtacgtcaggatcacggacatcctgcacaggcgcttcgcgagcttcgaccccaggcaggggcaggggcagtggcagtggcgggaggcgtacaaggcgctgctcctcctggaccacctcctcacgcacgggccccgcagcgtcgcggtcgagttccagaaggacagggaggccatcgagcggatggccaccttccaacacatcgacgagagaggcttcaactggggacggacggtgacgagcaagtcggagcgcgtgctcaagctgctggagcgcggcccgttcctggaggaggagcgcgagcgggcacgcaagatcgcgcgcgagatcaagggcttcggcagcttcaacctcagcagcgcctcccacgccgcgccacagccaccaccaggtgacgagggaagccgcggctacggccggagcaactcgcagttcgagcagcggtggaggcacaaggacggcgacgacagcgacaaggagaatctgatccagagcccggagccagcacgggtcgcgcgggaagtcgaggccgagccggaggagccgcaccaccacccgttccacgggctcgggcaaaaacagcggccggaggcgatgctgctcctgagccagtgacgggatcagtcggttcgtgtcatggtgatatgaaaaagaaccgtgtgctctgctcgactcaactagcttttctccattcctcaaggctgcaggggtcggaggcagtgatgggatcagtcagtactttactgacactgcttggtgcaccatgcatgagaactttgatgtctcatgtagtagtcatgtctgcttcgccttgtaaataattctatgcttcagttcgc

SEQ ID NO: 2579 - protein, 269 aa, Zea mays subsp. mays
  peptide (1)..(269): Ceres Seq. ID no. 12414243
  misc_feature (31)..(137): Pfam Name: ENTH domain Pfam Description: ENTH domain
  misc_feature (21)..(262): Homolog of NCBI NO: 6323235 NR Description: epsin N-terminal homology-containing protein;
  misc_feature (1)..(78): Homolog of NCBI NO: 15229428 NR Description: hypothetical protein; protein id: At3g23350.1
  misc_feature (1)..(37): Homolog of NCBI NO: 7485982 NR Description: hypothetical protein F22O13.16 - Arabidopsis
  misc_feature (91)..(200): Homolog of NCBI NO: 7485982 NR Description: hypothetical protein F22O13.16 - Arabidopsis
  misc_feature (1)..(200): Homolog of NCBI NO: 22329424 NR Description: hypothetical protein
  misc_feature (1)..(187): Homolog of NCBI NO: 11994320 NR Description: gene_id:MLM24.8~unknown protein [Arabidopsis
  misc_feature (1)..(262): Homolog of NCBI NO: 21536910 NR Description: unknown [Arabidopsis thaliana]
  misc_feature (1)..(262): Homolog of NCBI NO: 15231451 NR Description: putative protein
  misc_feature (138)..(269): Homolog of NCBI NO: 34908158 NR Description: P0408C03.22 [Oryza sativa (japonica
  misc_feature (1)..(137): Homolog of NCBI NO: 34908158 NR Description: P0408C03.22 [Oryza sativa (japonica
MDAPFFHELRRQASSYLTGKIRSARLALTDVTPTQLMTEEATNGDASPPNVKTMGLIARQAFEVDEYVRITDILHRRFASFDPRQGQGQWQWREAYKALLLLDHLLTHGPRSVAVEFQKDREAIERMATFQHIDERGFNWGRTVTSKSERVLKLLERGPFLEEERERARKIAREIKGFGSFNLSSASHAAPQPPPGDEGSRGYGRSNSQFEQRWRHKDGDDSDKENLIQSPEPARVAREVEAEPEEPHHHPFHGLGQKQRPEAMLLLSQ

SEQ ID NO: 2580 - protein, 233 aa, Zea mays subsp. mays
  peptide (1)..(233): Ceres Seq. ID no. 12414244
  misc_feature (1)..(101): Pfam Name: ENTH domain Pfam Description: ENTH domain
  misc_feature (1)..(210): Homolog of NCBI NO: 6322585 NR Description: epsin N-terminal homology-containing protein;
  misc_feature (1)..(226): Homolog of NCBI NO: 6323235 NR Description: epsin N-terminal homology-containing protein;
  misc_feature (1)..(42): Homolog of NCBI NO: 15229428 NR Description: hypothetical protein; protein id: At3g23350.1
  misc_feature (55)..(164): Homolog of NCBI NO: 7485982 NR Description: hypothetical protein F22O13.16 - Arabidopsis
  misc_feature (1)..(164): Homolog of NCBI NO: 22329424 NR Description: hypothetical protein
  misc_feature (1)..(151): Homolog of NCBI NO: 11994320 NR Description: gene_id:MLM24.8~unknown protein [Arabidopsis
  misc_feature (1)..(226): Homolog of NCBI NO: 21536910 NR Description: unknown [Arabidopsis thaliana]
  misc_feature (1)..(226): Homolog of NCBI NO: 15231451 NR Description: putative protein
  misc_feature (102)..(233): Homolog of NCBI NO: 34908158 NR Description: P0408C03.22 [Oryza sativa (japonica
  misc_feature (1)..(101): Homolog of NCBI NO: 34908158 NR Description: P0408C03.22 [Oryza sativa (japonica
MTEEATNGDASPPNVKTMGLIARQAFEVDEYVRITDILHRRFASFDPRQGQGQWQWREAYKALLLLDHLLTHGPRSVAVEFQKDREAIERMATFQHIDERGFNWGRTVTSKSERVLKLLERGPFLEEERERARKIAREIKGFGSFNLSSASHAAPQPPPGDEGSRGYGRSNSQFEQRWRHKDGDDSDKENLIQSPEPARVAREVEAEPEEPHHHPFHGLGQKQRPEAMLLLSQ

SEQ ID NO: 2581 - protein, 216 aa, Zea mays subsp. mays
  peptide (1)..(216): Ceres Seq. ID no. 12414245
  misc_feature (1)..(84): Pfam Name: ENTH domain Pfam Description: ENTH domain
  misc_feature (1)..(193): Homolog of NCBI NO: 6322585 NR Description: epsin N-terminal homology-containing protein;
  misc_feature (1)..(209): Homolog of NCBI NO: 6323235 NR Description: epsin N-terminal homology-containing protein;
  misc_feature (1)..(25): Homolog of NCBI NO: 15229428 NR Description: hypothetical protein; protein id: At3g23350.1
  misc_feature (38)..(147): Homolog of NCBI NO: 7485982 NR Description: hypothetical protein F22O13.16 - Arabidopsis
  misc_feature (1)..(147): Homolog of NCBI NO: 22329424 NR Description: hypothetical protein
  misc_feature (1)..(134): Homolog of NCBI NO: 11994320 NR Description: gene_id:MLM24.8~unknown protein [Arabidopsis
  misc_feature (1)..(209): Homolog of NCBI NO: 21536910 NR Description: unknown [Arabidopsis thaliana]
  misc_feature (1)..(209): Homolog of NCBI NO: 15231451 NR Description: putative protein
  misc_feature (85)..(216): Homolog of NCBI NO: 34908158 NR Description: P0408C03.22 [Oryza sativa (japonica
  misc_feature (1)..(84): Homolog of NCBI NO: 34908158 NR Description: P0408C03.22 [Oryza sativa (japonica
MGLIARQAFEVDEYVRITDILHRRFASFDPRQGQGQWQWREAYKALLLLDHLLTHGPRSVAVEFQKDREAIERMATFQHIDERGFNWGRTVTSKSERVLKLLERGPFLEEERERARKIAREIKGFGSFNLSSASHAAPQPPPGDEGSRGYGRSNSQFEQRWRHKDGDDSDKENLIQSPEPARVAREVEAEPEEPHHHPFHGLGQKQRPEAMLLLSQ

SEQ ID NO: 2582 - DNA, 902 bp, Zea mays subsp. mays
  misc_feature (1)..(902): Ceres Seq. ID no. 12387230
  misc_feature: MA Experiment ID: 108504 Result: Up-regulated in Transcription
  misc_feature: MA Experiment 108504 PARAMETER Experiment Name: Zm_Drought_P Parameter: Age (day) Value: 8
  misc_feature: MA Experiment 108504 PARAMETER Experiment Name: Zm_Drought_P Parameter: Organism Value: Zea mays
  misc_feature: MA Experiment 108504 PARAMETER Experiment Name: Zm_Drought_P Parameter: Plant Line Value: 35A19
  misc_feature: MA Experiment 108504 PARAMETER Experiment Name: Zm_Drought_P Parameter: Timepoint (hr) Value: 12
  misc_feature: MA Experiment 108504 PARAMETER Experiment Name: Zm_Drought_P Parameter: Tissue Value: Aerial
  misc_feature: MA Experiment 108504 PARAMETER Experiment Name: Zm_Drought_P Parameter: Treatment Value: Drought vs. No Drought
  misc_feature: MA Experiment ID: 108513 Result: Up-regulated in Transcription
  misc_feature: MA Experiment 108513 PARAMETER Experiment Name: Zm_100uM_ABA_P Parameter: Age (day) Value: 8
  misc_feature: MA Experiment 108513 PARAMETER Experiment Name: Zm_100uM_ABA_P Parameter: Organism Value: Zea mays
  misc_feature: MA Experiment 108513 PARAMETER Experiment Name: Zm_100uM_ABA_P Parameter: Plant Line Value: 35A19
  misc_feature: MA Experiment 108513 PARAMETER Experiment Name: Zm_100uM_ABA_P Parameter: Timepoint (hr) Value: 6
  misc_feature: MA Experiment 108513 PARAMETER Experiment Name: Zm_100uM_ABA_P Parameter: Tissue Value: Aerial
  misc_feature: MA Experiment 108513 PARAMETER Experiment Name: Zm_100uM_ABA_P Parameter: Treatment Value: 100uM ABA vs. No Treatment
  misc_feature: MA Experiment ID: 108515 Result: Up-regulated in Transcription
  misc_feature: MA Experiment 108515 PARAMETER Experiment Name: Zm_2mM_SA_P Parameter: Age (day) Value: 8
  misc_feature: MA Experiment 108515 PARAMETER Experiment Name: Zm_2mM_SA_P Parameter: Organism Value: Zea mays
  misc_feature: MA Experiment 108515 PARAMETER Experiment Name: Zm_2mM_SA_P Parameter: Plant Line Value: 35A19
  misc_feature: MA Experiment 108515 PARAMETER Experiment Name: Zm_2mM_SA_P Parameter: Timepoint (hr) Value: 12
  misc_feature: MA Experiment 108515 PARAMETER Experiment Name: Zm_2mM_SA_P Parameter: Tissue Value: Aerial
  misc_feature: MA Experiment 108515 PARAMETER Experiment Name: Zm_2mM_SA_P Parameter: Treatment Value: 2mM SA vs. No Treatment
  misc_feature: MA Experiment ID: 108522 Result: Down-regulated in Transcription
  misc_feature: MA Experiment 108522 PARAMETER Experiment Name: Zm_42deg_Heat_P Parameter: Age (day) Value: 8
  misc_feature: MA Experiment 108522 PARAMETER Experiment Name: Zm_42deg_Heat_P Parameter: Organism Value: Zea mays
  misc_feature: MA Experiment 108522 PARAMETER Experiment Name: Zm_42deg_Heat_P Parameter: Plant Line Value: 35A19
  misc_feature: MA Experiment 108522 PARAMETER Experiment Name: Zm_42deg_Heat_P Parameter: Temperature (deg C) Value: 42 vs. 22
  misc_feature: MA Experiment 108522 PARAMETER Experiment Name: Zm_42deg_Heat_P Parameter: Timepoint (hr) Value: 1
  misc_feature: MA Experiment 108522 PARAMETER Experiment Name: Zm_42deg_Heat_P Parameter: Tissue Value: Aerial
  misc_feature: MA Experiment ID: 108523 Result: Down-regulated in Transcription
  misc_feature: MA Experiment 108523 PARAMETER Experiment Name: Zm_42deg_Heat_P Parameter: Age (day) Value: 8
  misc_feature: MA Experiment 108523 PARAMETER Experiment Name: Zm_42deg_Heat_P Parameter: Organism Value: Zea mays
  misc_feature: MA Experiment 108523 PARAMETER Experiment Name: Zm_42deg_Heat_P Parameter: Plant Line Value: 35A19
  misc_feature: MA Experiment 108523 PARAMETER Experiment Name: Zm_42deg_Heat_P Parameter: Temperature (deg C) Value: 42 vs. 22
  misc_feature: MA Experiment 108523 PARAMETER Experiment Name: Zm_42deg_Heat_P Parameter: Timepoint (hr) Value: 6
  misc_feature: MA Experiment 108523 PARAMETER Experiment Name: Zm_42deg_Heat_P Parameter: Tissue Value: Aerial
  misc_feature: MA Experiment ID: 108528 Result: Down-regulated in Transcription
  misc_feature: MA Experiment 108528 PARAMETER Experiment Name: Zm_Imbibed_Seeds_P Parameter: Age (day) Value: 5 vs. 2
  misc_feature: MA Experiment 108528 PARAMETER Experiment Name: Zm_Imbibed_Seeds_P Parameter: Organism Value: Zea mays
  misc_feature: MA Experiment 108528 PARAMETER Experiment Name: Zm_Imbibed_Seeds_P Parameter: Plant Line Value: 35A19
  misc_feature: MA Experiment 108528 PARAMETER Experiment Name: Zm_Imbibed_Seeds_P Parameter: Tissue Value: Aerial vs. Embryo
  misc_feature: MA Experiment ID: 108529 Result: Down-regulated in Transcription
  misc_feature: MA Experiment 108529 PARAMETER Experiment Name: Zm_Imbibed_Seeds_P Parameter: Age (day) Value: 5 vs. 2
  misc_feature: MA Experiment 108529 PARAMETER Experiment Name: Zm_Imbibed_Seeds_P Parameter: Organism Value: Zea mays
  misc_feature: MA Experiment 108529 PARAMETER Experiment Name: Zm_Imbibed_Seeds_P Parameter: Plant Line Value: 35A19
  misc_feature: MA Experiment 108529 PARAMETER Experiment Name: Zm_Imbibed_Seeds_P Parameter: Tissue Value: Roots vs. Embryo
  misc_feature: MA Experiment ID: 108530 Result: Down-regulated in Transcription
  misc_feature: MA Experiment 108530 PARAMETER Experiment Name: Zm_Imbibed_Seeds_P Parameter: Age (day) Value: 6 vs. 2
  misc_feature: MA Experiment 108530 PARAMETER Experiment Name: Zm_Imbibed_Seeds_P Parameter: Organism Value: Zea mays
  misc_feature: MA Experiment 108530 PARAMETER Experiment Name: Zm_Imbibed_Seeds_P Parameter: Plant Line Value: 35A19
  misc_feature: MA Experiment 108530 PARAMETER Experiment Name: Zm_Imbibed_Seeds_P Parameter: Tissue Value: Aerial vs. Embryo
  misc_feature: MA Experiment ID: 108533 Result: Down-regulated in Transcription
  misc_feature: MA Experiment 108533 PARAMETER Experiment Name: Zm_4deg_Cold_P Parameter: Age (hr) Value: 8
  misc_feature: MA Experiment 108533 PARAMETER Experiment Name: Zm_4deg_Cold_P Parameter: Organism Value: Zea mays
  misc_feature: MA Experiment 108533 PARAMETER Experiment Name: Zm_4deg_Cold_P Parameter: Plant Line Value: 35A19
  misc_feature: MA Experiment 108533 PARAMETER Experiment Name: Zm_4deg_Cold_P Parameter: Temperature (deg C) Value: 4 vs. 22
  misc_feature: MA Experiment 108533 PARAMETER Experiment Name: Zm_4deg_Cold_P Parameter: Timepoint (hr) Value: 1
  misc_feature: MA Experiment 108533 PARAMETER Experiment Name: Zm_4deg_Cold_P Parameter: Tissue Value: Aerial
  misc_feature: MA Experiment ID: 108534 Result: Down-regulated in Transcription
  misc_feature: MA Experiment 108534 PARAMETER Experiment Name: Zm_4deg_Cold_P Parameter: Age (hr) Value: 8
  misc_feature: MA Experiment 108534 PARAMETER Experiment Name: Zm_4deg_Cold_P Parameter: Organism Value: Zea mays
  misc_feature: MA Experiment 108534 PARAMETER Experiment Name: Zm_4deg_Cold_P Parameter: Plant Line Value: 35A19
  misc_feature: MA Experiment 108534 PARAMETER Experiment Name: Zm_4deg_Cold_P Parameter: Temperature (deg C) Value: 4 vs. 22
  misc_feature: MA Experiment 108534 PARAMETER Experiment Name: Zm_4deg_Cold_P Parameter: Timepoint (hr) Value: 6
  misc_feature: MA Experiment 108534 PARAMETER Experiment Name: Zm_4deg_Cold_P Parameter: Tissue Value: Aerial
  misc_feature: MA Experiment ID: 108536 Result: Down-regulated in Transcription
  misc_feature: MA Experiment 108536 PARAMETER Experiment Name: Zm_Meristem_P Parameter: Age (day) Value: 8
  misc_feature: MA Experiment 108536 PARAMETER Experiment Name: Zm_Meristem_P Parameter: Organism Value: Zea mays
  misc_feature: MA Experiment 108536 PARAMETER Experiment Name: Zm_Meristem_P Parameter: Plant Line Value: 35A19
  misc_feature: MA Experiment 108536 PARAMETER Experiment Name: Zm_Meristem_P Parameter: Tissue Value: Shoot Meristem vs. Above Shoot Meristem
  misc_feature: MA Experiment ID: 108542 Result: Up-regulated in Transcription
  misc_feature: MA Experiment 108542 PARAMETER Experiment Name: Zm_150mM_NaCl_P Parameter: Age (day) Value: 8
  misc_feature: MA Experiment 108542 PARAMETER Experiment Name: Zm_150mM_NaCl_P Parameter: Organism Value: Zea mays
  misc_feature: MA Experiment 108542 PARAMETER Experiment Name: Zm_150mM_NaCl_P Parameter: Plant Line Value: 35A19
  misc_feature: MA Experiment 108542 PARAMETER Experiment Name: Zm_150mM_NaCl_P Parameter: Timepoint (hr) Value: 6
  misc_feature: MA Experiment 108542 PARAMETER Experiment Name: Zm_150mM_NaCl_P Parameter: Tissue Value: Aerial
  misc_feature: MA Experiment 108542 PARAMETER Experiment Name: Zm_150mM_NaCl_P Parameter: Treatment Value: 150mM NaCl vs. No Treatment
  misc_feature: MA Experiment ID: 108543 Result: Up-regulated in Transcription
  misc_feature: MA Experiment ID: 108546 Result: Down-regulated in Transcription
  misc_feature: MA Experiment 108546 PARAMETER Experiment Name: Zm_Imbibed_Seeds_P Parameter: Age (day) Value: 3 vs. 2
  misc_feature: MA Experiment 108546 PARAMETER Experiment Name: Zm_Imbibed_Seeds_P Parameter: Organism Value: Zea mays
  misc_feature: MA Experiment 108546 PARAMETER Experiment Name: Zm_Imbibed_Seeds_P Parameter: Plant Line Value: 35A19
  misc_feature: MA Experiment 108546 PARAMETER Experiment Name: Zm_Imbibed_Seeds_P Parameter: Tissue Value: Roots vs. Embryo
  misc_feature: MA Experiment ID: 108547 Result: Down-regulated in Transcription
  misc_feature: MA Experiment 108547 PARAMETER Experiment Name: Zm_Imbibed_Seeds_P Parameter: Age (day) Value: 4 vs. 2
  misc_feature: MA Experiment 108547 PARAMETER Experiment Name: Zm_Imbibed_Seeds_P Parameter: Organism Value: Zea mays
  misc_feature: MA Experiment 108547 PARAMETER Experiment Name: Zm_Imbibed_Seeds_P Parameter: Plant Line Value: 35A19
  misc_feature: MA Experiment 108547 PARAMETER Experiment Name: Zm_Imbibed_Seeds_P Parameter: Tissue Value: Aerial vs. Embryo
  misc_feature: MA Experiment ID: 108559 Result: Up-regulated in Transcription
  misc_feature: MA Experiment 108559 PARAMETER Experiment Name: Zm_5mM_NO_P Parameter: Age (day) Value: 8
  misc_feature: MA Experiment 108559 PARAMETER Experiment Name: Zm_5mM_NO_P Parameter: Organism Value: Zea mays
  misc_feature: MA Experiment 108559 PARAMETER Experiment Name: Zm_5mM_NO_P Parameter: Plant Line Value: 35A19
  misc_feature: MA Experiment 108559 PARAMETER Experiment Name: Zm_5mM_NO_P Parameter: Timepoint (hr) Value: 12
  misc_feature: MA Experiment 108559 PARAMETER Experiment Name: Zm_5mM_NO_P Parameter: Tissue Value: Aerial
  misc_feature: MA Experiment 108559 PARAMETER Experiment Name: Zm_5mM_NO_P Parameter: Treatment Value: 5mM NO vs. No Treatment
  misc_feature: MA Experiment ID: 108597 Result: Up-regulated in Transcription
  misc_feature: MA Experiment 108597 PARAMETER Experiment Name: Zm_100uM_ABA_P Parameter: Age (day) Value: 9
  misc_feature: MA Experiment 108597 PARAMETER Experiment Name: Zm_100uM_ABA_P Parameter: Organism Value: Zea mays
  misc_feature: MA Experiment 108597 PARAMETER Experiment Name: Zm_100uM_ABA_P Parameter: Plant Line Value: 35A19
  misc_feature: MA Experiment 108597 PARAMETER Experiment Name: Zm_100uM_ABA_P Parameter: Timepoint (hr) Value: 24
  misc_feature: MA Experiment 108597 PARAMETER Experiment Name: Zm_100uM_ABA_P Parameter: Tissue Value: Aerial
  misc_feature: MA Experiment 108597 PARAMETER Experiment Name: Zm_100uM_ABA_P Parameter: Treatment Value: 100uM ABA vs. No Treatment
  misc_feature: MA Experiment ID: 20000478 Result: Up-regulated in Transcription
  misc_feature: MA Experiment 20000478 PARAMETER Experiment Name: Zm_5mM_SA_P Parameter: Age (day) Value: 11
  misc_feature: MA Experiment 20000478 PARAMETER Experiment Name: Zm_5mM_SA_P Parameter: Organism Value: Zea mays
  misc_feature: MA Experiment 20000478 PARAMETER Experiment Name: Zm_5mM_SA_P Parameter: Plant Line Value: 35A19
  misc_feature: MA Experiment 20000478 PARAMETER Experiment Name: Zm_5mM_SA_P Parameter: Timepoint (hr) Value: 72
  misc_feature: MA Experiment 20000478 PARAMETER Experiment Name: Zm_5mM_SA_P Parameter: Tissue Value: Aerial
  misc_feature: MA Experiment 20000478 PARAMETER Experiment Name: Zm_5mM_SA_P Parameter: Treatment Value: 5mM SA vs. No Treatment
  misc_feature: MA Experiment ID: 20000479 Result: Up-regulated in Transcription
  misc_feature: MA Experiment 20000479 PARAMETER Experiment Name: Zm_Drought_P Parameter: Age (day) Value: 10
  misc_feature: MA Experiment 20000479 PARAMETER Experiment Name: Zm_Drought_P Parameter: Organism Value: Zea mays
  misc_feature: MA Experiment 20000479 PARAMETER Experiment Name: Zm_Drought_P Parameter: Plant Line Value: 35A19
  misc_feature: MA Experiment 20000479 PARAMETER Experiment Name: Zm_Drought_P Parameter: Timepoint (hr) Value: 48
  misc_feature: MA Experiment 20000479 PARAMETER Experiment Name: Zm_Drought_P Parameter: Tissue Value: Aerial
  misc_feature: MA Experiment 20000479 PARAMETER Experiment Name: Zm_Drought_P Parameter: Treatment Value: Drought vs. No Drought
  misc_feature: MA Experiment ID: 20000535 Result: Down-regulated in Transcription
  misc_feature: MA Experiment 20000535 PARAMETER Experiment Name: Zm_Hybrid_Seed_Dev_P Parameter: DAP Value: 30 vs. 12
  misc_feature: MA Experiment 20000535 PARAMETER Experiment Name: Zm_Hybrid_Seed_Dev_P Parameter: Organism Value: Zea mays
  misc_feature: MA Experiment 20000535 PARAMETER Experiment Name: Zm_Hybrid_Seed_Dev_P Parameter: Plant Line Value: 35A19
  misc_feature: MA Experiment 20000535 PARAMETER Experiment Name: Zm_Hybrid_Seed_Dev_P Parameter: Tissue Value: Embryo vs. Unfert Floret
  misc_feature: MA Experiment ID: 20000626 Result: Up-regulated in Transcription
  misc_feature: MA Experiment 20000626 PARAMETER Experiment Name: Zm_Herbicide-Treatments_P Parameter: Timepoint (hr) Value: 12
  misc_feature: MA Experiment 20000626 PARAMETER Experiment Name: Zm_Herbicide-Treatments_P Parameter: Tissue Value: Aerial
  misc_feature: MA Experiment 20000626 PARAMETER Experiment Name: Zm_Herbicide-Treatments_P Parameter: Treatment Value: Roundup vs. No Treatment
atacacagcaaagcctcaaaacctgatcatcagagaaacgaaaaggaagaggagcgtgggagaaaaaacaaaagaaaggaaaagagatatagccctgagaagaatgtcccttacaactgatgaactcaaggccaaggccgaggtatactacggtgacgagatctgccatctgtgtacccagctcctgctcagggaagcaggcctccccaatggcctgcttccattgaaggacctaatcgagtgcggctatgtccaggaaactggattcgtgtggctgaagcaaagcaacagggttgaccacatcttccatagtctaggaaggctggtctcttacggcacggagatcaccggctatgccgagaagggcaggatcaggaaggtcaaagggataaagaccagggagctcatgctgtgggtcccggtggaggagattgctcttgatgatgatccagcgactgggaagcttgtctgcaagagcattgctgggattaccaaaaccttccctgcatcggctttccatatcccggagaaggagaacaatgtgaaggcgaactgtgctgcactgaagccggtggtcctcatggagagagctccacgagttgttaaaaacagctgatccgccttcaattctgcatccactggtatttggagttgacgtacggccgccatatcagcccttaatcctacgtatttaaataatggttgaactagtgtcctttactattttccgttcatgtacttgggaaatgataacacaaagttcttccgcctatatatatactgcggttgtacgattgccctggcatctatataatattgtcctgtaaggtaaccacccaacttcctttcatgtactacgtagctctatattactaatacaaagcatgttgtggacttctatg

SEQ ID NO: 2583 - protein, 204 aa, Zea mays subsp. mays
  peptide (1)..(204): Ceres Seq. ID no. 12387231
  misc_feature (37)..(178): Pfam Name: Protein of unknown function, DUF538 Pfam Description: Protein of unknown function, DUF538
  misc_feature (35)..(172): Homolog of NCBI NO: 34915418 NR Description: hypothetical protein~similar to Arabidopsis
  misc_feature (43)..(176): Homolog of NCBI NO: 34915410 NR Description: hypothetical protein~similar to Arabidopsis
  misc_feature (35)..(176): Homolog of NCBI NO: 33146557 NR Description: unknown protein [Oryza sativa (japonica
  misc_feature (35)..(176): Homolog of NCBI NO: 34915376 NR Description: hypothetical protein~similar to Oryza sativa
  misc_feature (46)..(180): Homolog of NCBI NO: 15233705 NR Description: putative protein; protein id: At4g24130.1
  misc_feature (35)..(172): Homolog of NCBI NO: 34915416 NR Description: hypothetical protein~similar to Arabidopsis
  misc_feature (35)..(172): Homolog of NCBI NO: 34915378 NR Description: hypothetical protein~similar to Oryza sativa
  misc_feature (52)..(172): Homolog of NCBI NO: 34911878 NR Description: OSJNBb0032K15.16 [Oryza sativa (japonica
  misc_feature (35)..(177): Homolog of NCBI NO: 18391006 NR Description: expressed protein
  misc_feature (35)..(178): Homolog of NCBI NO: 18405887 NR Description: expressed protein
YTAKPQNLIIRETKRKRSVGEKTKERKRDIALRRMSLTTDELKAKAEVYYGDEICHLCTQLLLREAGLPNGLLPLKDLIECGYVQETGFVWLKQSNRVDHIFHSLGRLVSYGTEITGYAEKGRIRKVKGIKTRELMLWVPVEEIALDDDPATGKLVCKSIAGITKTFPASAFHIPEKENNVKANCAALKPVVLMERAPRVVKNS

SEQ ID NO: 2584 - protein, 170 aa, Zea mays subsp. mays
  peptide (1)..(170): Ceres Seq. ID no. 12387232
  misc_feature (3)..(144): Pfam Name: Protein of unknown function, DUF538 Pfam Description: Protein of unknown function, DUF538
  misc_feature (1)..(138): Homolog of NCBI NO: 34915418 NR Description: hypothetical protein~similar to Arabidopsis
  misc_feature (9)..(142): Homolog of NCBI NO: 34915410 NR Description: hypothetical protein~similar to Arabidopsis
  misc_feature (1)..(142): Homolog of NCBI NO: 33146557 NR Description: unknown protein [Oryza sativa (japonica
  misc_feature (1)..(142): Homolog of NCBI NO: 34915376 NR Description: hypothetical protein~similar to Oryza sativa
  misc_feature (12)..(146): Homolog of NCBI NO: 15233705 NR Description: putative protein; protein id: At4g24130.1
  misc_feature (1)..(138): Homolog of NCBI NO: 34915416 NR Description: hypothetical protein~similar to Arabidopsis
  misc_feature (1)..(138): Homolog of NCBI NO: 34915378 NR Description: hypothetical protein~similar to Oryza sativa
  misc_feature (18)..(138): Homolog of NCBI NO: 34911878 NR Description: OSJNBb0032K15.16 [Oryza sativa (japonica
  misc_feature (1)..(143): Homolog of NCBI NO: 18391006 NR Description: expressed protein
  misc_feature (1)..(144): Homolog of NCBI NO: 18405887 NR Description: expressed protein
MSLTTDELKAKAEVYYGDEICHLCTQLLLREAGLPNGLLPLKDLIECGYVQETGFVWLKQSNRVDHIFHSLGRLVSYGTEITGYAEKGRIRKVKGIKTRELMLWVPVEEIALDDDPATGKLVCKSIAGITKTFPASAFHIPEKENNVKANCAALKPVVLMERAPRVVKNS

SEQ ID NO: 2585 - DNA, 1843 bp, Zea mays subsp. mays
  misc_feature (1)..(1843): Ceres Seq. ID no. 12410645
  misc_feature: MA Experiment ID: 108535 Result: Up-regulated in Transcription
  misc_feature: MA Experiment 108535 PARAMETER Experiment Name: Zm_Meristem_P Parameter: Age (day) Value: 8
  misc_feature: MA Experiment 108535 PARAMETER Experiment Name: Zm_Meristem_P Parameter: Organism Value: Zea mays
  misc_feature: MA Experiment 108535 PARAMETER Experiment Name: Zm_Meristem_P Parameter: Plant Line Value: 35A19
  misc_feature: MA Experiment 108535 PARAMETER Experiment Name: Zm_Meristem_P Parameter: Tissue Value: Root Meristem vs. Above Root Meristem
  misc_feature: MA Experiment ID: 20000534 Result: Down-regulated in Transcription
  misc_feature: MA Experiment 20000534 PARAMETER Experiment Name: Zm_Hybrid_Pollen_P Parameter: Age (day) Value: 8
  misc_feature: MA Experiment 20000534 PARAMETER Experiment Name: Zm_Hybrid_Pollen_P Parameter: Organism Value: Zea mays
  misc_feature: MA Experiment 20000534 PARAMETER Experiment Name: Zm_Hybrid_Pollen_P Parameter: Plant Line Value: 35A19
  misc_feature: MA Experiment 20000534 PARAMETER Experiment Name: Zm_Hybrid_Pollen_P Parameter: Tissue Value: Pollen vs. Aerial
aggaagccatccgctccctctcgaacattggatcctatgctctcctctccctgctcgcagtcagggcacagggactgcctccggagaccggagcaggccgcaagcgtccaggttcgagacgccagcacgctctcgcagtacagcagcattatcagggagcgtgccgtgggagtgggaggttgcctcaggtgcggagcagtcgccggcggcgaccatcggtgtctgagatgaaggagagaggcggctccagggcggcagtggacgagcgctacgcgcagtggaagtcgctcatccccgttctctacgactggtttgccaaccacaacctcgtttggccatccctctcctgccggtgggggccacagtttgagaaagctacctacaagaatcgtcaacgcctttacctatctgaacagaccgatgggagtgtgcctaatactctggttatcgcaaactgtgaagttgtgaaaccaagggttgcagctgctgaacatatctcgcagtttaacgaggaagcacgatcaccttttgtaaagaagtacaagactatagttcatcctggtgaagttaacagaatcagggagcttccacagaacagtaagatcatagccacacacactgacagtccagatgtacttgtttgggatgttgaagcacaaccaaatagacatgctgtcttaggagcttctgaatctcgtcctgatctgatattaacgggacaccaggaaaatgcagaatttgcgcttgccatgtgtccagcagaaccatatgtcctgtcaggaggaaaggacaaatttgttgtcttgtggagcatccaagaccacatatctgcccttggggattcctcgtcttctcccggagcatctggcagcaagcagtctggcaaaattgcaaatgaaaaggagagtcctaaagttgatcctagaggtatattccatggccatgacagtactgttgaagatgttcagttctgcccttccagtgcgcaggagttttgtagtgtgggtgatgatgcttgtcttattctgtgggatgctcgaactggcactgacccagctgttaaggttgagaaagctcacagtggagatgttcattgtgttgattggaatccccttgatgttaactatatcttaactggttctgccgataactctgtccgaatgtgggatcgtcgcaatctgggttcgggaggagctggttctccaattcacaaatttgagggccataaagctgctgttctttgtgttcagtggtcacctgacagagcatctgtttttggaagttctgcagaagatggtttcttaaatgtttgggaccatgagaaggttgggaagaagaaaaattctaatgtcccagctgggcttttctttcagcatgctggtcatagggataagatcgtagacttccactggaattcgtcagatccttggacaattgtcagtgtctcagatgatggtgagagcactggtggaggtggaacactgcagatatggcgaatgagtgatttgatctaccgcccagaggatgaagttcttacagagctggagaatttcaaggctcacctggccagttgcgctccgaggaattgagtcatgtgaaaactctgagtaggttatgtagtttcctggccctaagtagtttcctggccataagtatggccccaattgacattggatctgtcttctcatgctcctagagctgtacccttcgaggtgcttgtgcctttgtgagcttgtgttgaaccatgttgtatgactaaatagtccgcaaacgagtcagctggatggctaatctgtaggccaactattgggatattgttggatattatcaacaaccggttcag

SEQ ID NO: 2586 - protein, 528 aa, Zea mays subsp. mays
  peptide (1)..(528): Ceres Seq. ID no. 12410646
  misc_feature (77)..(526): Homolog of NCBI NO: 5701951 NR Description: Y1 protein [Silene latifolia]
  misc_feature (77)..(526): Homolog of NCBI NO: 17902570 NR Description: putative WD-repeat protein [Silene latifolia]
  misc_feature (77)..(526): Homolog of NCBI NO: 5701955 NR Description: X1 protein [Silene latifolia]
  misc_feature (76)..(527): Homolog of NCBI NO: 2599092 NR Description: WD-40 repeat protein MSI4 [Arabidopsis thaliana]
  misc_feature (76)..(527): Homolog of NCBI NO: 20197482 NR Description: putative WD-40 repeat protein, MSI4 [Arabidopsis
  misc_feature (58)..(527): Homolog of NCBI NO: 30680701 NR Description: WD-40 repeat protein (MSI4) [Arabidopsis
  misc_feature (76)..(528): Homolog of NCBI NO: 34910476 NR Description: putative WD-repeat protein RBAP1
  misc_feature (76)..(528): Homolog of NCBI NO: 14550114 NR Description: nucleosome/chromatin assembly factor C [Zea mays]
  misc_feature (76)..(528): Homolog of NCBI NO: 9716495 NR Description: WD-repeat protein RBAP1 [Zea mays]
  misc_feature (76)..(528): Homolog of NCBI NO: 21898564 NR Description: nucleosome/chromatin assembly factor group C [Zea
EAIRSLSNIGSYALLSLLAVRAQGLPPETGAGRKRPGSRRQHALAVQQHYQGACRGSGRLPQVRSSRRRRPSVSEMKERGGSRAAVDERYAQWKSLIPVLYDWFANHNLVWPSLSCRWGPQFEKATYKNRQRLYLSEQTDGSVPNTLVIANCEVVKPRVAAAEHISQFNEEARSPFVKKYKTIVHPGEVNRIRELPQNSKIIATHTDSPDVLVWDVEAQPNRHAVLGASESRPDLILTGHQENAEFALAMCPAEPYVLSGGKDKFVVLWSIQDHISALGDSSSSPGASGSKQSGKIANEKESPKVDPRGIFHGHDSTVEDVQFCPSSAQEFCSVGDDACLILWDARTGTDPAVKVEKAHSGDVHCVDWNPLDVNYILTGSADNSVRMWDRRNLGSGGAGSPIHKFEGHKAAVLCVQWSPDRASVFGSSAEDGFLNVWDHEKVGKKKNSNVPAGLFFQHAGHRDKIVDFHWNSSDPWTIVSVSDDGESTGGGGTLQIWRMSDLIYRPEDEVLTELENFKAHLASCAPRN

SEQ ID NO: 2587 - protein, 453 aa, Zea mays subsp. mays
  peptide (1)..(453): Ceres Seq. ID no. 12410647
  misc_feature (2)..(451): Homolog of NCBI NO: 5701951 NR Description: Y1 protein [Silene latifolia]
  misc_feature (2)..(451): Homolog of NCBI NO: 17902570 NR Description: putative WD-repeat protein [Silene latifolia]
  misc_feature (2)..(451): Homolog of NCBI NO: 5701955 NR Description: X1 protein [Silene latifolia]
  misc_feature (1)..(452): Homolog of NCBI NO: 2599092 NR Description: WD-40 repeat protein MSI4 [Arabidopsis thaliana]
  misc_feature (1)..(452): Homolog of NCBI NO: 20197482 NR Description: putative WD-40 repeat protein, MSI4 [Arabidopsis
  misc_feature (1)..(452): Homolog of NCBI NO: 30680701 NR Description: WD-40 repeat protein (MSI4) [Arabidopsis
  misc_feature (1)..(453): Homolog of NCBI NO: 34910476 NR Description: putative WD-repeat protein RBAP1
  misc_feature (1)..(453): Homolog of NCBI NO: 14550114 NR Description: nucleosome/chromatin assembly factor C [Zea mays]
  misc_feature (1)..(453): Homolog of NCBI NO: 9716495 NR Description: WD-repeat protein RBAP1 [Zea mays]
  misc_feature (1)..(453): Homolog of NCBI NO: 21898564 NR Description: nucleosome/chromatin assembly factor group C [Zea
MKERGGSRAAVDERYAQWKSLIPVLYDWFANHNLVWPSLSCRWGPQFEKATYKNRQRLYLSEQTDGSVPNTLVIANCEVVKPRVAAAEHISQFNEEARSPFVKKYKTIVHPGEVNRIRELPQNSKIIATHTDSPDVLVWDVEAQPNRHAVLGASESRPDLILTGHQENAEFALAMCPAEPYVLSGGKDKFVVLWSIQDHISALGDSSSSPGASGSKQSGKIANEKESPKVDPRGIFHGHDSTVEDVQFCPSSAQEFCSVGDDACLILWDARTGTDPAVKVEKAHSGDVHCVDWNPLDVNYILTGSADNSVRMWDRRNLGSGGAGSPIHKFEGHKAAVLCVQWSPDRASVFGSSAEDGFLNVWDHEKVGKKKNSNVPAGLFFQHAGHRDKIVDFHWNSSDPWTIVSVSDDGESTGGGGTLQIWRMSDLIYRPEDEVLTELENFKAHLASCAPRN

SEQ ID NO: 2588 - protein, 279 aa, Zea mays subsp. mays
  peptide (1)..(279): Ceres Seq. ID no. 12410648
  misc_feature (1)..(277): Homolog of NCBI NO: 5701951 NR Description: Y1 protein [Silene latifolia]
  misc_feature (1)..(277): Homolog of NCBI NO: 17902570 NR Description: putative WD-repeat protein [Silene latifolia]
  misc_feature (1)..(277): Homolog of NCBI NO: 5701955 NR Description: X1 protein [Silene latifolia]
  misc_feature (1)..(278): Homolog of NCBI NO: 2599092 NR Description: WD-40 repeat protein MSI4 [Arabidopsis thaliana]
  misc_feature (1)..(278): Homolog of NCBI NO: 20197482 NR Description: putative WD-40 repeat protein, MSI4 [Arabidopsis
  misc_feature (1)..(278): Homolog of NCBI NO: 30680701 NR Description: WD-40 repeat protein (MSI4) [Arabidopsis
  misc_feature (1)..(279): Homolog of NCBI NO: 34910476 NR Description: putative WD-repeat protein RBAP1
  misc_feature (1)..(279): Homolog of NCBI NO: 14550114 NR Description: nucleosome/chromatin assembly factor C [Zea mays]
  misc_feature (1)..(279): Homolog of NCBI NO: 9716495 NR Description: WD-repeat protein RBAP1 [Zea mays]
  misc_feature (1)..(279): Homolog of NCBI NO: 21898564 NR Description: nucleosome/chromatin assembly factor group C [Zea
MCPAEPYVLSGGKDKFVVLWSIQDHISALGDSSSSPGASGSKQSGKIANEKESPKVDPRGIFHGHDSTVEDVQFCPSSAQEFCSVGDDACLILWDARTGTDPAVKVEKAHSGDVHCVDWNPLDVNYILTGSADNSVRMWDRRNLGSGGAGSPIHKFEGHKAAVLCVQWSPDRASVFGSSAEDGFLNVWDHEKVGKKKNSNVPAGLFFQHAGHRDKIVDFHWNSSDPWTIVSVSDDGESTGGGGTLQIWRMSDLIYRPEDEVLTELENFKAHLASCAPRN

SEQ ID NO: 2589 - DNA, 670 bp, Zea mays subsp. mays
  misc_feature (1)..(670): Ceres Seq. ID no. 12482970
  misc_feature: MA Experiment ID: 108522 Result: Up-regulated in Transcription
  misc_feature: MA Experiment 108522 PARAMETER Experiment Name: Zm_42deg_Heat_P Parameter: Age (day) Value: 8
  misc_feature: MA Experiment 108522 PARAMETER Experiment Name: Zm_42deg_Heat_P Parameter: Organism Value: Zea mays
  misc_feature: MA Experiment 108522 PARAMETER Experiment Name: Zm_42deg_Heat_P Parameter: Plant Line Value: 35A19
  misc_feature: MA Experiment 108522 PARAMETER Experiment Name: Zm_42deg_Heat_P Parameter: Temperature (deg C) Value: 42 vs. 22
  misc_feature: MA Experiment 108522 PARAMETER Experiment Name: Zm_42deg_Heat_P Parameter: Timepoint (hr) Value: 1
  misc_feature: MA Experiment 108522 PARAMETER Experiment Name: Zm_42deg_Heat_P Parameter: Tissue Value: Aerial
gtttctgttcggacttccgccgcgcttcgccctctcgctccagccgcttcacagcgccgccgctcgcctctccgaccgccgcgagaatgccgttcaagaggttcgtggagatcgggcgcgtggccctggtgaactacggcaaagactatggccgcctcgtcgtcatcgtcgatgtggtcgaccagaacagggcacttgtggacgcggcggcggtgggtacggtggtggccgtggaggcggcggctacggcggtggcgggcgccgtgatggcggtggcggctacggcggtggcggcggctacggtggcggcggcggctacggtggtggtggcggcggctaccgcggtggcaaccgtggcggcggctacggcaactccgacgggaactggaggaactgagcggtggggcccgcgcggccaagttatcctgttcgctaccgtgatgtttaccctagtccagagggtttatcttcgttcgtgtcgtgtttgttgttgcccatctgtgtttttgattgcaaggtcgctctgtgtcagttgttagtgctgtgttcatcctcggtttcagcagacccatgcatcaaacagcatggactgcggatcgatggatgctgttacccccgtcaggctttattctaagttaatcttaaggaaaaaatggtgcttcttggtgct

SEQ ID NO: 2590 - protein, 178 aa, Zea mays subsp. mays
  peptide (1)..(178): Ceres Seq. ID no. 12482971
  misc_feature (35)..(67): Pfam Name: KOW motif Pfam Description: KOW motif
  misc_feature (10)..(68): Homolog of NCBI NO: 7488810 NR Description: hydroxyproline-rich glycoprotein 1 - garden pea
  misc_feature (92)..(162): Homolog of NCBI NO: 18103931 NR Description: glycine rich RNA binding protein [Oryza sativa]
FCSDFRRASPSRSSRFTAPPLASPTAARMPFKRFVEIGRVALVNYGKDYGRLVVIVDVVDQNRALVDAAAVGTVVAVEAAATAVAGAVMAVAATAVAAATVAAAATVVVAAATAVATVAAATATPTGTGGTERWGPRGQVILFATVMFTLVQRVYLRSCRVCCCPSVFLIARSLCVSC

SEQ ID NO: 2591 - protein, 150 aa, Zea mays subsp. mays
  peptide (1)..(150): Ceres Seq. ID no. 12482972
  misc_feature (7)..(39): Pfam Name: KOW motif Pfam Description: KOW motif
  misc_feature (64)..(134): Homolog of NCBI NO: 18103931 NR Description: glycine rich RNA binding protein [Oryza sativa]
  misc_feature (1)..(40): Homolog of NCBI NO: 7488810 NR Description: hydroxyproline-rich glycoprotein 1 - garden pea
MPFKRFVEIGRVALVNYGKDYGRLVVIVDVVDQNRALVDAAAVGTVVAVEAAATAVAGAVMAVAATAVAAATVAAAATVVVAAATAVATVAAATATPTGTGGTERWGPRGQVILFATVMFTLVQRVYLRSCRVCCCPSVFLIARSLCVSC

SEQ ID NO: 2592 - protein, 131 aa, Zea mays subsp. mays
  peptide (1)..(131): Ceres Seq. ID no. 12482973
  misc_feature (64)..(131): Pfam Name: Herpesvirus latent membrane protein 1 (LMP1) Pfam Description: Herpesvirus latent membrane protein 1 (LMP1)
  misc_feature (64)..(131): Homolog of NCBI NO: 2331131 NR Description: glycine-rich protein [Oryza sativa]
  misc_feature (75)..(131): Homolog of NCBI NO: 20257691 NR Description: glycine-rich RNA binding protein [Zea mays]
  misc_feature (75)..(131): Homolog of NCBI NO: 20257687 NR Description: glycine-rich RNA binding protein [Zea mays]
  misc_feature (75)..(131): Homolog of NCBI NO: 20257683 NR Description: glycine-rich RNA binding protein [Zea mays]
  misc_feature (75)..(131): Homolog of NCBI NO: 20257693 NR Description: glycine-rich RNA binding protein [Zea mays]
  misc_feature (75)..(131): Homolog of NCBI NO: 20257709 NR Description: glycine-rich RNA binding protein [Zea mays]
  misc_feature (75)..(131): Homolog of NCBI NO: 20257699 NR Description: glycine-rich RNA binding protein [Zea mays]
  misc_feature (75)..(131): Homolog of NCBI NO: 20257675 NR Description: glycine-rich RNA binding protein [Zea mays]
  misc_feature (64)..(131): Homolog of NCBI NO: 544421 NR Description: Glycine-rich RNA-binding protein 1
  misc_feature (63)..(131): Homolog of NCBI NO: 82696 NR Description: glycine-rich protein - maize
FLFGLPPRFALSLQPLHSAAARLSDRRENAVQEVRGDRARGPGELRQRLWPPRRHRRCGRPEQGTCGRGGGGYGGGRGGGGYGGGGRRDGGGGYGGGGGYGGGGGYGGGGGGYRGGNRGGGYGNSDGNWRN

SEQ ID NO: 2593 - DNA, 1400 bp, Zea mays subsp. mays
  misc_feature (1)..(1400): Ceres Seq. ID no. 13589375
  misc_feature: MA Experiment ID: 108522 Result: Up-regulated in Transcription
  misc_feature: MA Experiment 108522 PARAMETER Experiment Name: Zm_42deg_Heat_P Parameter: Age (day) Value: 8
  misc_feature: MA Experiment 108522 PARAMETER Experiment Name: Zm_42deg_Heat_P Parameter: Organism Value: Zea mays
  misc_feature: MA Experiment 108522 PARAMETER Experiment Name: Zm_42deg_Heat_P Parameter: Plant Line Value: 35A19
  misc_feature: MA Experiment 108522 PARAMETER Experiment Name: Zm_42deg_Heat_P Parameter: Temperature (deg C) Value: 42 vs. 22
  misc_feature: MA Experiment 108522 PARAMETER Experiment Name: Zm_42deg_Heat_P Parameter: Timepoint (hr) Value: 1
  misc_feature: MA Experiment 108522 PARAMETER Experiment Name: Zm_42deg_Heat_P Parameter: Tissue Value: Aerial
  misc_feature: MA Experiment ID: 108535 Result: Down-regulated in Transcription
  misc_feature: MA Experiment 108535 PARAMETER Experiment Name: Zm_Meristem_P Parameter: Age (day) Value: 8
  misc_feature: MA Experiment 108535 PARAMETER Experiment Name: Zm_Meristem_P Parameter: Organism Value: Zea mays
  misc_feature: MA Experiment 108535 PARAMETER Experiment Name: Zm_Meristem_P Parameter: Plant Line Value: 35A19
  misc_feature: MA Experiment 108535 PARAMETER Experiment Name: Zm_Meristem_P Parameter: Tissue Value: Root Meristem vs. Above Root Meristem
  misc_feature: MA Experiment ID: 108543 Result: Up-regulated in Transcription
  misc_feature: MA Experiment ID: 108544 Result: Up-regulated in Transcription
  misc_feature: MA Experiment ID: 20000535 Result: Down-regulated in Transcription
  misc_feature: MA Experiment 20000535 PARAMETER Experiment Name: Zm_Hybrid_Seed_Dev_P Parameter: DAP Value: 30 vs. 12
  misc_feature: MA Experiment 20000535 PARAMETER Experiment Name: Zm_Hybrid_Seed_Dev_P Parameter: Organism Value: Zea mays
  misc_feature: MA Experiment 20000535 PARAMETER Experiment Name: Zm_Hybrid_Seed_Dev_P Parameter: Plant Line Value: 35A19
  misc_feature: MA Experiment 20000535 PARAMETER Experiment Name: Zm_Hybrid_Seed_Dev_P Parameter: Tissue Value: Embryo vs. Unfert Floret
tcttccttgctcactctcctcaccactacctgacctgctcccaagctccctctgcctgcctttataaatcaccggggcagagcnactcactgacacacgccgctgctccaagaaaccaccgccgagcccaaccgcacaagcgcgcgaggcaggagagagagagaggcggggagcaaaacaatggaggggaaagaggaggacgtgcgcctgggcgccaacaagttctcggagcgccagcccatcgggacggcggcgcagggcgccgctgacgacaaggactacaaggagcccccgccggcgccgctgttcgagcccggggagctcaagtcctggtccttctaccgcgcgggcatcgccgagttcgtcgccaccttcctcttcctctacatcaccatcctcaccgtcatgggcgtctccaagtccacctccaagtgcgccaccgtcggcatccagggcatcgcctggtccttcggaggaatgatcttcgcgctcgtctactgcaccgccggcatctccggaggacacatcaacccagctgtgactttcgggctgttcttagccaggaagctgtccctgactagggccctcttctacatcatcatgcaatgcctgggtgccgtctgtggagctggagtggtgaagggcttccagcagggactttacatgggcaacggtggtggcgccaatgttgtcgcacctggctacaccaagggtgatggccttggcgctgagattgttggcaccttcatcctagtctacaccgtcttctcagccaccgatgccaagaggaatgccagggactcccatgttcctatccttgccccactgccaattgggttcgcggtgttcctggtccaccttgccaccatccccattactggcactggcatcaacccagctaggagccttggcgctgccatcatctacaacagggatcacgcctggaacgaccattggatcttctgggtcggccccttcattggcgctgccctggctgccatctaccaccaggtgatcatcagagccatcccgttcaagagcaggtcttaagctgccgtggccgtgccgagacatgccagtccgaagaacgggcgtcttcctgtgatgtcttcttgtctgcccacgcctagtttctctgtcgattcctattcgtcgtctcttcagggctggtgctcactgctgcgccgttctgttaaccgaaacaagaactctgtgtattcctgtaccgagctgtgcatgttttttttttctttccattgtggagaatttaagttattatccatttgctgcaaggtttgccgtctcattttatgcgttgggatgttggcaagaaagggcagatgtcatgtgagaatttaagttaagtgaaatcgattcagggttttcttgatttcagtttc

SEQ ID NO: 2594 - protein, 289 aa, Zea mays subsp. mays
  peptide (1)..(289): Ceres Seq. ID no. 13589376
  misc_feature (47)..(276): Pfam Name: Major intrinsic protein Pfam Description: Major intrinsic protein
  misc_feature (1)..(288): Homolog of NCBI NO: 13235338 NR Description: plasma membrane intrinsic protein [Zea mays]
  misc_feature (1)..(289): Homolog of NCBI NO: 542126 NR Description: transmembrane protein - barley
  misc_feature (1)..(289): Homolog of NCBI NO: 7441250 NR Description: transmembrane protein - rice
  misc_feature (1)..(289): Homolog of NCBI NO: 4388774 NR Description: transmembrane protein [Hordeum vulgare subsp.
  misc_feature (1)..(289): Homolog of NCBI NO: 6692753 NR Description: bpw3 [Hordeum vulgare subsp. vulgare]
  misc_feature (1)..(289): Homolog of NCBI NO: 29650725 NR Description: plasma membrane intrinsic protein [Zea mays]
  misc_feature (1)..(289): Homolog of NCBI NO: 2696804 NR Description: water channel protein [Oryza sativa (japonica
  misc_feature (1)..(289): Homolog of NCBI NO: 2894534 NR Description: aquaporin [Oryza sativa]
  misc_feature (1)..(289): Homolog of NCBI NO: 13447793 NR Description: plasma membrane integral protein ZmPIP1-3 [Zea
  misc_feature (1)..(289): Homolog of NCBI NO: 4768911 NR Description: plasma membrane MIP protein [Zea mays]
MEGKEEDVRLGANKFSERQPIGTAAQGAADDKDYKEPPPAPLFEPGELKSWSFYRAGIAEFVATFLFLYITILTVMGVSKSTSKCATVGIQGIAWSFGGMIFALVYCTAGISGGHINPAVTFGLFLARKLSLTRALFYIIMQCLGAVCGAGVVKGFQQGLYMGNGGGANVVAPGYTKGDGLGAEIVGTFILVYTVFSATDAKRNARDSHVPILAPLPIGFAVFLVHLATIPITGTGINPARSLGAAIIYNRDHAWNDHWIFWVGPFIGAALAAIYHQVIIRAIPFKSRS

SEQ ID NO: 2595 - protein, 214 aa, Zea mays subsp. mays
  peptide (1)..(214): Ceres Seq. ID no. 13589377
  misc_feature (1)..(201): Pfam Name: Major intrinsic protein Pfam Description: Major intrinsic protein
  misc_feature (1)..(213): Homolog of NCBI NO: 13235338 NR Description: plasma membrane intrinsic protein [Zea mays]
  misc_feature (1)..(214): Homolog of NCBI NO: 542126 NR Description: transmembrane protein - barley
  misc_feature (1)..(214): Homolog of NCBI NO: 7441250 NR Description: transmembrane protein - rice
  misc_feature (1)..(214): Homolog of NCBI NO: 4388774 NR Description: transmembrane protein [Hordeum vulgare subsp.
  misc_feature (1)..(214): Homolog of NCBI NO: 6692753 NR Description: bpw3 [Hordeum vulgare subsp. vulgare]
  misc_feature (1)..(214): Homolog of NCBI NO: 29650725 NR Description: plasma membrane intrinsic protein [Zea mays]
  misc_feature (1)..(214): Homolog of NCBI NO: 2696804 NR Description: water channel protein [Oryza sativa (japonica
  misc_feature (1)..(214): Homolog of NCBI NO: 2894534 NR Description: aquaporin [Oryza sativa]
  misc_feature (1)..(214): Homolog of NCBI NO: 13447793 NR Description: plasma membrane integral protein ZmPIP1-3 [Zea
  misc_feature (1)..(214): Homolog of NCBI NO: 4768911 NR Description: plasma membrane MIP protein [Zea mays]
MGVSKSTSKCATVGIQGIAWSFGGMIFALVYCTAGISGGHINPAVTFGLFLARKLSLTRALFYIIMQCLGAVCGAGVVKGFQQGLYMGNGGGANVVAPGYTKGDGLGAEIVGTFILVYTVFSATDAKRNARDSHVPILAPLPIGFAVFLVHLATIPITGTGINPARSLGAAIIYNRDHAWNDHWIFWVGPFIGAALAAIYHQVIIRAIPFKSRS

SEQ ID NO: 2596 - protein, 190 aa, Zea mays subsp. mays
  peptide (1)..(190): Ceres Seq. ID no. 13589378
  misc_feature (1)..(177): Pfam Name: Major intrinsic protein Pfam Description: Major intrinsic protein
  misc_feature (1)..(189): Homolog of NCBI NO: 13235338 NR Description: plasma membrane intrinsic protein [Zea mays]
  misc_feature (1)..(190): Homolog of NCBI NO: 542126 NR Description: transmembrane protein - barley
  misc_feature (1)..(190): Homolog of NCBI NO: 7441250 NR Description: transmembrane protein - rice
  misc_feature (1)..(190): Homolog of NCBI NO: 4388774 NR Description: transmembrane protein [Hordeum vulgare subsp.
  misc_feature (1)..(190): Homolog of NCBI NO: 6692753 NR Description: bpw3 [Hordeum vulgare subsp. vulgare]
  misc_feature (1)..(190): Homolog of NCBI NO: 29650725 NR Description: plasma membrane intrinsic protein [Zea mays]
  misc_feature (1)..(190): Homolog of NCBI NO: 2696804 NR Description: water channel protein [Oryza sativa (japonica
  misc_feature (1)..(190): Homolog of NCBI NO: 2894534 NR Description: aquaporin [Oryza sativa]
  misc_feature (1)..(190): Homolog of NCBI NO: 13447793 NR Description: plasma membrane integral protein ZmPIP1-3 [Zea
  misc_feature (1)..(190): Homolog of NCBI NO: 4768911 NR Description: plasma membrane MIP protein [Zea mays]
MIFALVYCTAGISGGHINPAVTFGLFLARKLSLTRALFYIIMQCLGAVCGAGVVKGFQQGLYMGNGGGANVVAPGYTKGDGLGAEIVGTFILVYTVFSATDAKRNARDSHVPILAPLPIGFAVFLVHLATIPITGTGINPARSLGAAIIYNRDHAWNDHWIFWVGPFIGAALAAIYHQVIIRAIPFKSRS

SEQ ID NO: 2597 - DNA, 1839 bp, Zea mays subsp. mays
  misc_feature (1)..(1839): Ceres Seq. ID no. 12362107
  misc_feature: MA Experiment ID: 108504 Result: Down-regulated in Transcription
  misc_feature: MA Experiment 108504 PARAMETER Experiment Name: Zm_Drought_P Parameter: Age (day) Value: 8
  misc_feature: MA Experiment 108504 PARAMETER Experiment Name: Zm_Drought_P Parameter: Organism Value: Zea mays
  misc_feature: MA Experiment 108504 PARAMETER Experiment Name: Zm_Drought_P Parameter: Plant Line Value: 35A19
  misc_feature: MA Experiment 108504 PARAMETER Experiment Name: Zm_Drought_P Parameter: Timepoint (hr) Value: 12
  misc_feature: MA Experiment 108504 PARAMETER Experiment Name: Zm_Drought_P Parameter: Tissue Value: Aerial
  misc_feature: MA Experiment 108504 PARAMETER Experiment Name: Zm_Drought_P Parameter: Treatment Value: Drought vs. No Drought
  misc_feature: MA Experiment ID: 108528 Result: Up-regulated in Transcription
  misc_feature: MA Experiment 108528 PARAMETER Experiment Name: Zm_Imbibed_Seeds_P Parameter: Age (day) Value: 5 vs. 2
  misc_feature: MA Experiment 108528 PARAMETER Experiment Name: Zm_Imbibed_Seeds_P Parameter: Organism Value: Zea mays
  misc_feature: MA Experiment 108528 PARAMETER Experiment Name: Zm_Imbibed_Seeds_P Parameter: Plant Line Value: 35A19
  misc_feature: MA Experiment 108528 PARAMETER Experiment Name: Zm_Imbibed_Seeds_P Parameter: Tissue Value: Aerial vs. Embryo
  misc_feature: MA Experiment ID: 108529 Result: Up-regulated in Transcription
  misc_feature: MA Experiment 108529 PARAMETER Experiment Name: Zm_Imbibed_Seeds_P Parameter: Age (day) Value: 5 vs. 2
  misc_feature: MA Experiment 108529 PARAMETER Experiment Name: Zm_Imbibed_Seeds_P Parameter: Organism Value: Zea mays
  misc_feature: MA Experiment 108529 PARAMETER Experiment Name: Zm_Imbibed_Seeds_P Parameter: Plant Line Value: 35A19
  misc_feature: MA Experiment 108529 PARAMETER Experiment Name: Zm_Imbibed_Seeds_P Parameter: Tissue Value: Roots vs. Embryo
  misc_feature: MA Experiment ID: 108535 Result: Down-regulated in Transcription
  misc_feature: MA Experiment 108535 PARAMETER Experiment Name: Zm_Meristem_P Parameter: Age (day) Value: 8
  misc_feature: MA Experiment 108535 PARAMETER Experiment Name: Zm_Meristem_P Parameter: Organism Value: Zea mays
  misc_feature: MA Experiment 108535 PARAMETER Experiment Name: Zm_Meristem_P Parameter: Plant Line Value: 35A19
  misc_feature: MA Experiment 108535 PARAMETER Experiment Name: Zm_Meristem_P Parameter: Tissue Value: Root Meristem vs. Above Root Meristem
  misc_feature: MA Experiment ID: 108544 Result: Up-regulated in Transcription
  misc_feature: MA Experiment ID: 108545 Result: Down-regulated in Transcription
  misc_feature: MA Experiment 108545 PARAMETER Experiment Name: Zm_Imbibed_Seeds_P Parameter: Age (day) Value: 3 vs. 2
  misc_feature: MA Experiment 108545 PARAMETER Experiment Name: Zm_Imbibed_Seeds_P Parameter: Organism Value: Zea mays
  misc_feature: MA Experiment 108545 PARAMETER Experiment Name: Zm_Imbibed_Seeds_P Parameter: Plant Line Value: 35A19
  misc_feature: MA Experiment 108545 PARAMETER Experiment Name: Zm_Imbibed_Seeds_P Parameter: Tissue Value: Aerial vs. Embryo
  misc_feature: MA Experiment ID: 108546 Result: Up-regulated in Transcription
  misc_feature: MA Experiment 108546 PARAMETER Experiment Name: Zm_Imbibed_Seeds_P Parameter: Age (day) Value: 3 vs. 2
  misc_feature: MA Experiment 108546 PARAMETER Experiment Name: Zm_Imbibed_Seeds_P Parameter: Organism Value: Zea mays
  misc_feature: MA Experiment 108546 PARAMETER Experiment Name: Zm_Imbibed_Seeds_P Parameter: Plant Line Value: 35A19
  misc_feature: MA Experiment 108546 PARAMETER Experiment Name: Zm_Imbibed_Seeds_P Parameter: Tissue Value: Roots vs. Embryo
  misc_feature: MA Experiment ID: 108559 Result: Down-regulated in Transcription
  misc_feature: MA Experiment 108559 PARAMETER Experiment Name: Zm_5mM_NO_P Parameter: Age (day) Value: 8
  misc_feature: MA Experiment 108559 PARAMETER Experiment Name: Zm_5mM_NO_P Parameter: Organism Value: Zea mays
  misc_feature: MA Experiment 108559 PARAMETER Experiment Name: Zm_5mM_NO_P Parameter: Plant Line Value: 35A19
  misc_feature: MA Experiment 108559 PARAMETER Experiment Name: Zm_5mM_NO_P Parameter: Timepoint (hr) Value: 12
  misc_feature: MA Experiment 108559 PARAMETER Experiment Name: Zm_5mM_NO_P Parameter: Tissue Value: Aerial
  misc_feature: MA Experiment 108559 PARAMETER Experiment Name: Zm_5mM_NO_P Parameter: Treatment Value: 5mM NO vs. No Treatment
  misc_feature: MA Experiment ID: 108688 Result: Down-regulated in Transcription
  misc_feature: MA Experiment 108688 PARAMETER Experiment Name: Zm_Embryos-Flowers__P Parameter: Tissue Value: Immature Flowers vs. Aerial+
  misc_feature: MA Experiment ID: 108689 Result: Down-regulated in Transcription
  misc_feature: MA Experiment 108689 PARAMETER Experiment Name: Zm_Drought_Roots_P Parameter: Age (day) Value: 9
  misc_feature: MA Experiment 108689 PARAMETER Experiment Name: Zm_Drought_Roots_P Parameter: Organism Value: Zea mays
  misc_feature: MA Experiment 108689 PARAMETER Experiment Name: Zm_Drought_Roots_P Parameter: Plant Line Value: 35A19
  misc_feature: MA Experiment 108689 PARAMETER Experiment Name: Zm_Drought_Roots_P Parameter: Timepoint (hr) Value: 24
  misc_feature: MA Experiment 108689 PARAMETER Experiment Name: Zm_Drought_Roots_P Parameter: Tissue Value: Roots
  misc_feature: MA Experiment 108689 PARAMETER Experiment Name: Zm_Drought_Roots_P Parameter: Treatment Value: Drought vs. No Drought
  misc_feature: MA Experiment ID: 20000108 Result: Down-regulated in Transcription
  misc_feature: MA Experiment 20000108 PARAMETER Experiment Name: Zm_Root-Tips_P Parameter: Age (day) Value: 12
  misc_feature: MA Experiment 20000108 PARAMETER Experiment Name: Zm_Root-Tips_P Parameter: Organism Value: Zea mays
  misc_feature: MA Experiment 20000108 PARAMETER Experiment Name: Zm_Root-Tips_P Parameter: Tissue Value: Root tips vs. Root mid region    35
  misc_feature: MA Experiment 20000108 PARAMETER Experiment Name: Zm_Root-Tips_P Parameter: Tissue Value: Root tips vs. Root mid region   Sequence Listing-Misc Features (4)
  misc_feature: MA Experiment ID: 20000479 Result: Down-regulated in Transcription
  misc_feature: MA Experiment 20000479 PARAMETER Experiment Name: Zm_Drought_P Parameter: Age (day) Value: 10
  misc_feature: MA Experiment 20000479 PARAMETER Experiment Name: Zm_Drought_P Parameter: Organism Value: Zea mays
  misc_feature: MA Experiment 20000479 PARAMETER Experiment Name: Zm_Drought_P Parameter: Plant Line Value: 35A19
  misc_feature: MA Experiment 20000479 PARAMETER Experiment Name: Zm_Drought_P Parameter: Timepoint (hr) Value: 48
  misc_feature: MA Experiment 20000479 PARAMETER Experiment Name: Zm_Drought_P Parameter: Tissue Value: Aerial
  misc_feature: MA Experiment 20000479 PARAMETER Experiment Name: Zm_Drought_P Parameter: Treatment Value: Drought vs. No Drought
  misc_feature: MA Experiment ID: 20000488 Result: Up-regulated in Transcription
  misc_feature: MA Experiment 20000488 PARAMETER Experiment Name: Zm_50mM_NH4NO3_L_to_H_P Parameter: Organism Value: Zea mays
  misc_feature: MA Experiment 20000488 PARAMETER Experiment Name: Zm_50mM_NH4NO3_L_to_H_P Parameter: Timepoint (hr) Value: 8
  misc_feature: MA Experiment 20000488 PARAMETER Experiment Name: Zm_50mM_NH4NO3_L_to_H_P Parameter: Tissue Value: Leaves
  misc_feature: MA Experiment 20000488 PARAMETER Experiment Name: Zm_50mM_NH4NO3_L_to_H_P Parameter: Treatment Value: 50mM NH4NO3 vs. 100mM Mannitol
  misc_feature: MA Experiment ID: 20000492 Result: Up-regulated in Transcription
  misc_feature: MA Experiment 20000492 PARAMETER Experiment Name: Zm_Hybrid_Seed_Dev_P Parameter: DAP Value: 12
  misc_feature: MA Experiment 20000492 PARAMETER Experiment Name: Zm_Hybrid_Seed_Dev_P Parameter: Organism Value: Zea mays
  misc_feature: MA Experiment 20000492 PARAMETER Experiment Name: Zm_Hybrid_Seed_Dev_P Parameter: Plant Line Value: 35A19
  misc_feature: MA Experiment 20000492 PARAMETER Experiment Name: Zm_Hybrid_Seed_Dev_P Parameter: Tissue Value: Fert Kernel vs. Unfert Floret
  misc_feature: MA Experiment ID: 20000535 Result: Up-regulated in Transcription
  misc_feature: MA Experiment 20000535 PARAMETER Experiment Name: Zm_Hybrid_Seed_Dev_P Parameter: DAP Value: 30 vs. 12
  misc_feature: MA Experiment 20000535 PARAMETER Experiment Name: Zm_Hybrid_Seed_Dev_P Parameter: Organism Value: Zea mays
  misc_feature: MA Experiment 20000535 PARAMETER Experiment Name: Zm_Hybrid_Seed_Dev_P Parameter: Plant Line Value: 35A19
  misc_feature: MA Experiment 20000535 PARAMETER Experiment Name: Zm_Hybrid_Seed_Dev_P Parameter: Tissue Value: Embryo vs. Unfert Floret
  misc_feature: MA Experiment ID: 20000629 Result: Down-regulated in Transcription
  misc_feature: MA Experiment 20000629 PARAMETER Experiment Name: Zm_Herbicide-Treatments_P Parameter: Timepoint (hr) Value: 12
  misc_feature: MA Experiment 20000629 PARAMETER Experiment Name: Zm_Herbicide-Treatments_P Parameter: Tissue Value: Aerial
  misc_feature: MA Experiment 20000629 PARAMETER Experiment Name: Zm_Herbicide-Treatments_P Parameter: Treatment Value: Trimec vs. No Treatment
  misc_feature: MA Experiment ID: 20000630 Result: Down-regulated in Transcription
  misc_feature: MA Experiment 20000630 PARAMETER Experiment Name: Zm_Herbicide-Treatments_P Parameter: Timepoint (hr) Value: 4
  misc_feature: MA Experiment 20000630 PARAMETER Experiment Name: Zm_Herbicide-Treatments_P Parameter: Tissue Value: Aerial
  misc_feature: MA Experiment 20000630 PARAMETER Experiment Name: Zm_Herbicide-Treatments_P Parameter: Treatment Value: Roundup vs. No Treatment
  misc_feature: MA Experiment ID: 20001610 Result: Up-regulated in Transcription
  misc_feature: MA Experiment 20001610 PARAMETER Experiment Name: Zm_50ppm_KNO3_L-to-H_P Parameter: Age (day) Value: 19
  misc_feature: MA Experiment 20001610 PARAMETER Experiment Name: Zm_50ppm_KNO3_L-to-H_P Parameter: Organism Value: Zea mays
  misc_feature: MA Experiment 20001610 PARAMETER Experiment Name: Zm_50ppm_KNO3_L-to-H_P Parameter: Plant Line Value: 35A19
  misc_feature: MA Experiment 20001610 PARAMETER Experiment Name: Zm_50ppm_KNO3_L-to-H_P Parameter: Timepoint (hr) Value: 2
  misc_feature: MA Experiment 20001610 PARAMETER Experiment Name: Zm_50ppm_KNO3_L-to-H_P Parameter: Tissue Value: Roots
  misc_feature: MA Experiment 20001610 PARAMETER Experiment Name: Zm_50ppm_KNO3_L-to-H_P Parameter: Treatment Value: 50ppm KNO3 vs. 50ppm KCl
gactggtcactgtgccattgccgccgtccgtcctaggctcctagctagctagctagcaagctccgccgacgacggtacgtcaatcgagctagccctgcccatccactacactaccgcagcggcaagcaatggcgtgcggctctgctaccgccgctcgaccagcagcccgcctctggctgctggcggcggtggtggtggcgacctccttcctcgccgtcgcggcgccgccgggcgcgctggtgacgagcgtcccggggttcggcaacaagcagcagctgccgtcgaagcactacgccgggtacgtgacggtggacgagcggcacggcaggcggctgttctactacctggtggagtcggagcgcgacccggcccgggaccccgtcgtgctctggctcaacggcgggcccggctgctccagcttcgacggcttcgtctacgagcacgggccattcagctttgagccatcaggagggtcagctgggagcctgccaaagcttcatctcaacccttatagctggtctaaggtgtcgagtgtgatatacttggactcccctgccggcgtcgggctttcctactcaaacaacgtttcggactacgagactggcgacttcaagaccgccgccgattcgcacactttcctgctcaagtggttccagctctaccctgagttcttggcaaatccgttctacatagccggagagtcgtacgctggcgtttatgtccctaccctttcaagcgaagtcgtcaaaggaatccacaaaggagtgaagccagttataaactttaagggctacatggtcggcaatggtgtgtgcgacaccgtctttgatggtaatgctcttgtgccgtttgcgcacgggatggctctcatttcagagagtatatacaaggaagccagcactgcatgtcaagggaattactggaactctagcagtgcaaaatgcgacgaggcgctgtcaaaagtcgagacagaaatcgacggattaaatatctacgacatccttgagccatgttaccacgccccagctgataccaaacaagcagcagtgaccccacaggcacagagtactagcgagctgcctcagagtttcaaagacctcggcgtgaccagcaacaagcctctccctgtaaggacaagaatgcacggacgggcgtggcctttgagagctccggtaagagacggccgcgttccgtcgtggcaggagctggcggctgatgtagcttcgacttccagtggagttccgtgtatgagcgatgaggttgcgacagcgtggctaaacaacaatagcgtcagatccgctatccatgccgaaccagtcagttcaatcggaccctgggaattatgcacggataaactggattttgatcatgatgccggcagcatgatcatctatcacaagaacctcacgagtcagggctaccgtgctttcatctacagcggcgaccatgacatgtgtgtaccttacaccgggactgaagcatggactgcgtctttaggctacgccgtcgttgatccgtggcgacagtggattgtcgacgaacaagttgccgggtacacccaaggatatgaaaagggccttacttttgccactattaagggtgctgggcacacagttcctgagtacaaaccacaggaagcactagctttctacagccgttggcttgccggtgctaaactgtgaggaggcctattttgtgtgcaaaggtcatgcagtactgaatcaaacagaagttggataaagcatgcagcaataaggcagtcgaaggatcaaagtatccaacgcgccaactacaatgttgcattcattttcacatgttataccaatgcagttgctaatt

SEQ ID NO: 2598 - protein, 517 aa, Zea mays subsp. mays
  peptide (1)..(517): Ceres Seq. ID no. 12362108
  misc_feature (42)..(514): Pfam Name: Serine carboxypeptidase Pfam Description: Serine carboxypeptidase
  misc_feature (15)..(266): Homolog of NCBI NO: 25289790 NR Description: hypothetical protein AT4g12910 [imported] -
  misc_feature (17)..(517): Homolog of NCBI NO: 9279723 NR Description: serine carboxypeptidase I [Arabidopsis thaliana]
  misc_feature (17)..(517): Homolog of NCBI NO: 15230836 NR Description: serine carboxypeptidase, putative; protein id:
  misc_feature (15)..(498): Homolog of NCBI NO: 30682276 NR Description: serine carboxypeptidase -related [Arabidopsis
  misc_feature (5)..(517): Homolog of NCBI NO: 38346978 NR Description: OSJNBb0062H02.3 [Oryza sativa (japonica
  misc_feature (15)..(517): Homolog of NCBI NO: 22531054 NR Description: serine carboxypeptidase 1 precursor-like protein
  misc_feature (17)..(517): Homolog of NCBI NO: 7271957 NR Description: wound-inducible carboxypeptidase [Lycopersicon
  misc_feature (91)..(517): Homolog of NCBI NO: 167012 NR Description: carboxypeptidase I precursor
  misc_feature (3)..(517): Homolog of NCBI NO: 2815493 NR Description: Serine carboxypeptidase I precursor
  misc_feature (31)..(517): Homolog of NCBI NO: 584892 NR Description: Serine carboxypeptidase I precursor
MACGSATAARPAARLWLLAAVVVATSFLAVAAPPGALVTSVPGFGNKQQLPSKHYAGYVTVDERHGRRLFYYLVESERDPARDPVVLWLNGGPGCSSFDGFVYEHGPFSFEPSGGSAGSLPKLHLNPYSWSKVSSVIYLDSPAGVGLSYSNNVSDYETGDFKTAADSHTFLLKWFQLYPEFLANPFYIAGESYAGVYVPTLSSEVVKGIHKGVKPVINFKGYMVGNGVCDTVFDGNALVPFAHGMALISESIYKEASTACQGNYWNSSSAKCDEALSKVETEIDGLNIYDILEPCYHAPADTKQAAVTPQAQSTSELPQSFKDLGVTSNKPLPVRTRMHGRAWPLRAPVRDGRVPSWQELAADVASTSSGVPCMSDEVATAWLNNNSVRSAIHAEPVSSIGPWELCTDKLDFDHDAGSMIIYHKNLTSQGYRAFIYSGDHDMCVPYTGTEAWTASLGYAVVDPWRQWIVDEQVAGYTQGYEKGLTFATIKGAGHTVPEYKPQEALAFYSRWLAGAKL

SEQ ID NO: 2599 - protein, 295 aa, Zea mays subsp. mays
  peptide (1)..(295): Ceres Seq. ID no. 12362109
  misc_feature (1)..(292): Pfam Name: Serine carboxypeptidase Pfam Description: Serine carboxypeptidase
  misc_feature (1)..(44): Homolog of NCBI NO: 25289790 NR Description: hypothetical protein AT4g12910 [imported] -
  misc_feature (1)..(295): Homolog of NCBI NO: 9279723 NR Description: serine carboxypeptidase I [Arabidopsis thaliana]
  misc_feature (1)..(295): Homolog of NCBI NO: 15230836 NR Description: serine carboxypeptidase, putative; protein id:
  misc_feature (1)..(276): Homolog of NCBI NO: 30682276 NR Description: serine carboxypeptidase -related [Arabidopsis
  misc_feature (1)..(295): Homolog of NCBI NO: 38346978 NR Description: OSJNBb0062H02.3 [Oryza sativa (japonica
  misc_feature (1)..(295): Homolog of NCBI NO: 22531054 NR Description: serine carboxypeptidase 1 precursor-like protein
  misc_feature (1)..(295): Homolog of NCBI NO: 7271957 NR Description: wound-inducible carboxypeptidase [Lycopersicon
  misc_feature (1)..(295): Homolog of NCBI NO: 167012 NR Description: carboxypeptidase I precursor
  misc_feature (1)..(295): Homolog of NCBI NO: 2815493 NR Description: Serine carboxypeptidase I precursor
  misc_feature (1)..(295): Homolog of NCBI NO: 584892 NR Description: Serine carboxypeptidase I precursor
MVGNGVCDTVFDGNALVPFAHGMALISESIYKEASTACQGNYWNSSSAKCDEALSKVETEIDGLNIYDILEPCYHAPADTKQAAVTPQAQSTSELPQSFKDLGVTSNKPLPVRTRMHGRAWPLRAPVRDGRVPSWQELAADVASTSSGVPCMSDEVATAWLNNNSVRSAIHAEPVSSIGPWELCTDKLDFDHDAGSMIIYHKNLTSQGYRAFIYSGDHDMCVPYTGTEAWTASLGYAVVDPWRQWIVDEQVAGYTQGYEKGLTFATIKGAGHTVPEYKPQEALAFYSRWLAGAKL

SEQ ID NO: 2600 - protein, 273 aa, Zea mays subsp. mays
  peptide (1)..(273): Ceres Seq. ID no. 12362110
  misc_feature (1)..(270): Pfam Name: Serine carboxypeptidase Pfam Description: Serine carboxypeptidase
  misc_feature (1)..(22): Homolog of NCBI NO: 25289790 NR Description: hypothetical protein AT4g12910 [imported] -
  misc_feature (1)..(273): Homolog of NCBI NO: 9279723 NR Description: serine carboxypeptidase I [Arabidopsis thaliana]
  misc_feature (1)..(273): Homolog of NCBI NO: 15230836 NR Description: serine carboxypeptidase, putative; protein id:
  misc_feature (1)..(254): Homolog of NCBI NO: 30682276 NR Description: serine carboxypeptidase -related [Arabidopsis
  misc_feature (1)..(273): Homolog of NCBI NO: 38346978 NR Description: OSJNBb0062H02.3 [Oryza sativa (japonica
  misc_feature (1)..(273): Homolog of NCBI NO: 22531054 NR Description: serine carboxypeptidase 1 precursor-like protein
  misc_feature (1)..(273): Homolog of NCBI NO: 7271957 NR Description: wound-inducible carboxypeptidase [Lycopersicon
  misc_feature (1)..(273): Homolog of NCBI NO: 167012 NR Description: carboxypeptidase I precursor
  misc_feature (1)..(273): Homolog of NCBI NO: 2815493 NR Description: Serine carboxypeptidase I precursor
  misc_feature (1)..(273): Homolog of NCBI NO: 584892 NR Description: Serine carboxypeptidase I precursor
MALISESIYKEASTACQGNYWNSSSAKCDEALSKVETEIDGLNIYDILEPCYHAPADTKQAAVTPQAQSTSELPQSFKDLGVTSNKPLPVRTRMHGRAWPLRAPVRDGRVPSWQELAADVASTSSGVPCMSDEVATAWLNNNSVRSAIHAEPVSSIGPWELCTDKLDFDHDAGSMIIYHKNLTSQGYRAFIYSGDHDMCVPYTGTEAWTASLGYAVVDPWRQWIVDEQVAGYTQGYEKGLTFATIKGAGHTVPEYKPQEALAFYSRWLAGAKL

SEQ ID NO: 2601 - DNA, 1706 bp, Zea mays subsp. mays
  misc_feature (1)..(1706): Ceres Seq. ID no. 12408837
  misc_feature: MA Experiment ID: 108504 Result: Down-regulated in Transcription
  misc_feature: MA Experiment 108504 PARAMETER Experiment Name: Zm_Drought_P Parameter: Age (day) Value: 8
  misc_feature: MA Experiment 108504 PARAMETER Experiment Name: Zm_Drought_P Parameter: Organism Value: Zea mays
  misc_feature: MA Experiment 108504 PARAMETER Experiment Name: Zm_Drought_P Parameter: Plant Line Value: 35A19
  misc_feature: MA Experiment 108504 PARAMETER Experiment Name: Zm_Drought_P Parameter: Timepoint (hr) Value: 12
  misc_feature: MA Experiment 108504 PARAMETER Experiment Name: Zm_Drought_P Parameter: Tissue Value: Aerial
  misc_feature: MA Experiment 108504 PARAMETER Experiment Name: Zm_Drought_P Parameter: Treatment Value: Drought vs. No Drought
  misc_feature: MA Experiment ID: 108527 Result: Down-regulated in Transcription
  misc_feature: MA Experiment 108527 PARAMETER Experiment Name: Zm_5mM_NO_P Parameter: Age (day) Value: 8
  misc_feature: MA Experiment 108527 PARAMETER Experiment Name: Zm_5mM_NO_P Parameter: Organism Value: Zea mays
  misc_feature: MA Experiment 108527 PARAMETER Experiment Name: Zm_5mM_NO_P Parameter: Plant Line Value: 35A19
  misc_feature: MA Experiment 108527 PARAMETER Experiment Name: Zm_5mM_NO_P Parameter: Timepoint (hr) Value: 6
  misc_feature: MA Experiment 108527 PARAMETER Experiment Name: Zm_5mM_NO_P Parameter: Tissue Value: Aerial
  misc_feature: MA Experiment 108527 PARAMETER Experiment Name: Zm_5mM_NO_P Parameter: Treatment Value: 5mM NO vs. No Treatment
  misc_feature: MA Experiment ID: 108528 Result: Up-regulated in Transcription
  misc_feature: MA Experiment 108528 PARAMETER Experiment Name: Zm_Imbibed_Seeds_P Parameter: Age (day) Value: 5 vs. 2
  misc_feature: MA Experiment 108528 PARAMETER Experiment Name: Zm_Imbibed_Seeds_P Parameter: Organism Value: Zea mays
  misc_feature: MA Experiment 108528 PARAMETER Experiment Name: Zm_Imbibed_Seeds_P Parameter: Plant Line Value: 35A19
  misc_feature: MA Experiment 108528 PARAMETER Experiment Name: Zm_Imbibed_Seeds_P Parameter: Tissue Value: Aerial vs. Embryo
  misc_feature: MA Experiment ID: 108530 Result: Up-regulated in Transcription
  misc_feature: MA Experiment 108530 PARAMETER Experiment Name: Zm_Imbibed_Seeds_P Parameter: Age (day) Value: 6 vs. 2
  misc_feature: MA Experiment 108530 PARAMETER Experiment Name: Zm_Imbibed_Seeds_P Parameter: Organism Value: Zea mays
  misc_feature: MA Experiment 108530 PARAMETER Experiment Name: Zm_Imbibed_Seeds_P Parameter: Plant Line Value: 35A19
  misc_feature: MA Experiment 108530 PARAMETER Experiment Name: Zm_Imbibed_Seeds_P Parameter: Tissue Value: Aerial vs. Embryo
  misc_feature: MA Experiment ID: 108536 Result: Down-regulated in Transcription
  misc_feature: MA Experiment 108536 PARAMETER Experiment Name: Zm_Meristem_P Parameter: Age (day) Value: 8
  misc_feature: MA Experiment 108536 PARAMETER Experiment Name: Zm_Meristem_P Parameter: Organism Value: Zea mays
  misc_feature: MA Experiment 108536 PARAMETER Experiment Name: Zm_Meristem_P Parameter: Plant Line Value: 35A19
  misc_feature: MA Experiment 108536 PARAMETER Experiment Name: Zm_Meristem_P Parameter: Tissue Value: Shoot Meristem vs. Above Shoot Meristem
  misc_feature: MA Experiment ID: 108543 Result: Up-regulated in Transcription
  misc_feature: MA Experiment ID: 108545 Result: Up-regulated in Transcription
  misc_feature: MA Experiment 108545 PARAMETER Experiment Name: Zm_Imbibed_Seeds_P Parameter: Age (day) Value: 3 vs. 2
  misc_feature: MA Experiment 108545 PARAMETER Experiment Name: Zm_Imbibed_Seeds_P Parameter: Organism Value: Zea mays
  misc_feature: MA Experiment 108545 PARAMETER Experiment Name: Zm_Imbibed_Seeds_P Parameter: Plant Line Value: 35A19
  misc_feature: MA Experiment 108545 PARAMETER Experiment Name: Zm_Imbibed_Seeds_P Parameter: Tissue Value: Aerial vs. Embryo
  misc_feature: MA Experiment ID: 108556 Result: Down-regulated in Transcription
  misc_feature: MA Experiment 108556 PARAMETER Experiment Name: Zm_Drought_P Parameter: Age (day) Value: 9
  misc_feature: MA Experiment 108556 PARAMETER Experiment Name: Zm_Drought_P Parameter: Organism Value: Zea mays
  misc_feature: MA Experiment 108556 PARAMETER Experiment Name: Zm_Drought_P Parameter: Plant Line Value: 35A19
  misc_feature: MA Experiment 108556 PARAMETER Experiment Name: Zm_Drought_P Parameter: Timepoint (hr) Value: 24
  misc_feature: MA Experiment 108556 PARAMETER Experiment Name: Zm_Drought_P Parameter: Tissue Value: Aerial
  misc_feature: MA Experiment 108556 PARAMETER Experiment Name: Zm_Drought_P Parameter: Treatment Value: Drought vs. No Drought
  misc_feature: MA Experiment ID: 108559 Result: Down-regulated in Transcription
  misc_feature: MA Experiment 108559 PARAMETER Experiment Name: Zm_5mM_NO_P Parameter: Age (day) Value: 8
  misc_feature: MA Experiment 108559 PARAMETER Experiment Name: Zm_5mM_NO_P Parameter: Organism Value: Zea mays
  misc_feature: MA Experiment 108559 PARAMETER Experiment Name: Zm_5mM_NO_P Parameter: Plant Line Value: 35A19
  misc_feature: MA Experiment 108559 PARAMETER Experiment Name: Zm_5mM_NO_P Parameter: Timepoint (hr) Value: 12
  misc_feature: MA Experiment 108559 PARAMETER Experiment Name: Zm_5mM_NO_P Parameter: Tissue Value: Aerial
  misc_feature: MA Experiment 108559 PARAMETER Experiment Name: Zm_5mM_NO_P Parameter: Treatment Value: 5mM NO vs. No Treatment
  misc_feature: MA Experiment ID: 108687 Result: Down-regulated in Transcription
  misc_feature: MA Experiment 108687 PARAMETER Experiment Name: Zm_Embryos-Flowers__P Parameter: Tissue Value: Embryo vs. Aerial+
  misc_feature: MA Experiment ID: 108688 Result: Down-regulated in Transcription
  misc_feature: MA Experiment 108688 PARAMETER Experiment Name: Zm_Embryos-Flowers__P Parameter: Tissue Value: Immature Flowers vs. Aerial+
  misc_feature: MA Experiment ID: 108689 Result: Down-regulated in Transcription
  misc_feature: MA Experiment 108689 PARAMETER Experiment Name: Zm_Drought_Roots_P Parameter: Age (day) Value: 9
  misc_feature: MA Experiment 108689 PARAMETER Experiment Name: Zm_Drought_Roots_P Parameter: Organism Value: Zea mays
  misc_feature: MA Experiment 108689 PARAMETER Experiment Name: Zm_Drought_Roots_P Parameter: Plant Line Value: 35A19
  misc_feature: MA Experiment 108689 PARAMETER Experiment Name: Zm_Drought_Roots_P Parameter: Timepoint (hr) Value: 24
  misc_feature: MA Experiment 108689 PARAMETER Experiment Name: Zm_Drought_Roots_P Parameter: Tissue Value: Roots
  misc_feature: MA Experiment 108689 PARAMETER Experiment Name: Zm_Drought_Roots_P Parameter: Treatment Value: Drought vs. No Drought
  misc_feature: MA Experiment ID: 20000479 Result: Down-regulated in Transcription
  misc_feature: MA Experiment 20000479 PARAMETER Experiment Name: Zm_Drought_P Parameter: Age (day) Value: 10
  misc_feature: MA Experiment 20000479 PARAMETER Experiment Name: Zm_Drought_P Parameter: Organism Value: Zea mays
  misc_feature: MA Experiment 20000479 PARAMETER Experiment Name: Zm_Drought_P Parameter: Plant Line Value: 35A19
  misc_feature: MA Experiment 20000479 PARAMETER Experiment Name: Zm_Drought_P Parameter: Timepoint (hr) Value: 48
  misc_feature: MA Experiment 20000479 PARAMETER Experiment Name: Zm_Drought_P Parameter: Tissue Value: Aerial
  misc_feature: MA Experiment 20000479 PARAMETER Experiment Name: Zm_Drought_P Parameter: Treatment Value: Drought vs. No Drought
  misc_feature: MA Experiment ID: 20000480 Result: Down-regulated in Transcription
  misc_feature: MA Experiment 20000480 PARAMETER Experiment Name: Zm_Drought_P Parameter: Age (day) Value: 11
  misc_feature: MA Experiment 20000480 PARAMETER Experiment Name: Zm_Drought_P Parameter: Organism Value: Zea mays
  misc_feature: MA Experiment 20000480 PARAMETER Experiment Name: Zm_Drought_P Parameter: Plant Line Value: 35A19
  misc_feature: MA Experiment 20000480 PARAMETER Experiment Name: Zm_Drought_P Parameter: Timepoint (hr) Value: 72
  misc_feature: MA Experiment 20000480 PARAMETER Experiment Name: Zm_Drought_P Parameter: Tissue Value: Aerial
  misc_feature: MA Experiment 20000480 PARAMETER Experiment Name: Zm_Drought_P Parameter: Treatment Value: Drought vs. No Drought
  misc_feature: MA Experiment ID: 20000492 Result: Down-regulated in Transcription
  misc_feature: MA Experiment 20000492 PARAMETER Experiment Name: Zm_Hybrid_Seed_Dev_P Parameter: DAP Value: 12
  misc_feature: MA Experiment 20000492 PARAMETER Experiment Name: Zm_Hybrid_Seed_Dev_P Parameter: Organism Value: Zea mays
  misc_feature: MA Experiment 20000492 PARAMETER Experiment Name: Zm_Hybrid_Seed_Dev_P Parameter: Plant Line Value: 35A19
  misc_feature: MA Experiment 20000492 PARAMETER Experiment Name: Zm_Hybrid_Seed_Dev_P Parameter: Tissue Value: Fert Kernel vs. Unfert Floret
  misc_feature: MA Experiment ID: 20000535 Result: Down-regulated in Transcription
  misc_feature: MA Experiment 20000535 PARAMETER Experiment Name: Zm_Hybrid_Seed_Dev_P Parameter: DAP Value: 30 vs. 12
  misc_feature: MA Experiment 20000535 PARAMETER Experiment Name: Zm_Hybrid_Seed_Dev_P Parameter: Organism Value: Zea mays
  misc_feature: MA Experiment 20000535 PARAMETER Experiment Name: Zm_Hybrid_Seed_Dev_P Parameter: Plant Line Value: 35A19
  misc_feature: MA Experiment 20000535 PARAMETER Experiment Name: Zm_Hybrid_Seed_Dev_P Parameter: Tissue Value: Embryo vs. Unfert Floret
gcacgagaccattacctagaacatcctaatcgaaaaacaaacccttcttatcctatcgtcgcgcgcgcctgcctctcccacacactccacagcgcccgcgcaggctcgctgcaagcgcaaagcagccacagcaccccctgcacctgcagactgcaaccgcaatgtcggctctcgggacgctctccggcggcgctgccggtgtctccggcctcctccgcctccgccgccgggccgccccagcccccgcgatcgcggcgccgtcgcacctccccgctgggaccgtcaagtgcgcggccgccgtgcccgatgccgccccgatcgtctggggccgtcagctccgcccggcgctcctcctacccgcggcgctgctcccttcgttgcagcccgccaggaggcacacgctgcagccgcccgccgcagccgccgagtccgcaggggaggccaagtctgtgggtttcctggagaagtacccggccctggtcaccggcttcttcttcttcatgtggtacttcctcaacgtcatattcaacatcctcaacaagaagatctacaactacttcccatacccatactttgtgtccttgatccatctagtagtgggtgtcgtatactgcctcatcagctggagtgtcggtctccccaagcgagcgcctatcaatggcacgctcctcaagcttctctttccagtcgccctgtgccatggtattggtcacatcactagcaatgtgtccttcgctgctgttgcagtctcatttgctcacactatcaaagctctggagcccttcttcagcgcagcggctactcagtttatccttggacagcaagttcccttctctctgtggctttctcttgcccctgtggtcattggtgtttcaatggcatcccttactgagctttcattcaactggactggcttcatcaatgccatgatatcaaacatctcattcacttacaggagcatttattccaagaaagctatgactgacatggatagcaccaacgtgtatgcttacatctcaataatcgctctaattgtttgcattccacctgcattgatctttgaagggcccaagctaatgcagcatggatttagtgatgccattgcaaaagtaggtttgacaaagtttgtcagtgacctattcttggttggactgttctaccatctgtataaccagattgctacaaacaccttggagcgagtggctcctctgacacatgctgtcggcaatgtgttgaaacgtgtttttgtcatcggtttctcaatcattgtttttggtaacaaaattagcacacaaactggaattggcacgtccattgccatagctggtgttgctatgtactcttacattaaggctaagattgaagaggagaaaaggaaaaagagcgcatgactgctgtgaataatattatcggaccttcctcggacacaacatcgtcgacaatcacgacctacttctataccttgttttgttttcatcttgagtcagtcggtccattgtttgttcccagtctggtgattaaaagtctgcaaattctgtttgtggaattggcagcgatacaaatttggcttctttaagtaaatccggttggcggtacacagcggtattaattcacctgtaactgaatggaataccgtaatgcaaagggcacaacactctgcctgactaaaataaaatggtgaaggttcacccttgttgtggttgctg

SEQ ID NO: 2602 - protein, 409 aa, Zea mays subsp. mays
  peptide (1)..(409): Ceres Seq. ID no. 12408838
  misc_feature (1)..(409): Homolog of NCBI NO: 1352200 NR Description: TRIOSE PHOSPHATE/PHOSPHATE TRANSLOCATOR,
  misc_feature (1)..(409): Homolog of NCBI NO: 13195734 NR Description: triose phosphate translocator [Triticum aestivum]
  misc_feature (1)..(409): Homolog of NCBI NO: 13518113 NR Description: triose phosphate/phosphate translocator [Oryza
  misc_feature (11)..(409): Homolog of NCBI NO: 9295273 NR Description: triose phosphate/phosphate translocator precursor
  misc_feature (10)..(409): Homolog of NCBI NO: 629694 NR Description: phosphate translocator, chloroplast - common >gi|403023|emb|CAA52979.1| phosphate translocator [Nicotiana
  misc_feature (7)..(409): Homolog of NCBI NO: 1352199 NR Description: Triose phosphate/phosphate translocator,
  misc_feature (12)..(406): Homolog of NCBI NO: 117291 NR Description: TRIOSE PHOSPHATE/PHOSPHATE TRANSLOCATOR,
  misc_feature (12)..(406): Homolog of NCBI NO: 21593093 NR Description: phosphate/triose-phosphate translocator precursor
  misc_feature (12)..(408): Homolog of NCBI NO: 9757731 NR Description: phosphate/triose-phosphate translocator precursor
  misc_feature (79)..(397): Homolog of NCBI NO: 18423670 NR Description: glucose-6-phosphate/phosphate translocator; id: At5g54800.1, supported by cDNA: 26107., supported by cDNA: supported by cDNA: gi_7229674 [Arabidopsis thaliana]
MSALGTLSGGAAGVSGLLRLRRRAAPAPAIAAPSHLPAGTVKCAAAVPDAAPIVWGRQLRPALLLPAALLPSLQPARRHTLQPPAAAAESAGEAKSVGFLEKYPALVTGFFFFMWYFLNVIFNILNKKIYNYFPYPYFVSLIHLVVGVVYCLISWSVGLPKRAPINGTLLKLLFPVALCHGIGHITSNVSFAAVAVSFAHTIKALEPFFSAAATQFILGQQVPFSLWLSLAPVVIGVSMASLTELSFNWTGFINAMISNISFTYRSIYSKKAMTDMDSTNVYAYISIIALIVCIPPALIFEGPKLMQHGFSDAIAKVGLTKFVSDLFLVGLFYHLYNQIATNTLERVAPLTHAVGNVLKRVFVIGFSIIVFGNKISTQTGIGTSIAIAGVAMYSYIKAKIEEEKRKKSA

SEQ ID NO: 2603 - protein, 296 aa, Zea mays subsp. mays
  peptide (1)..(296): Ceres Seq. ID no. 12408839
  misc_feature (1)..(296): Homolog of NCBI NO: 1352200 NR Description: TRIOSE PHOSPHATE/PHOSPHATE TRANSLOCATOR,
  misc_feature (1)..(296): Homolog of NCBI NO: 13195734 NR Description: triose phosphate translocator [Triticum aestivum]
  misc_feature (1)..(296): Homolog of NCBI NO: 13518113 NR Description: triose phosphate/phosphate translocator [Oryza
  misc_feature (1)..(296): Homolog of NCBI NO: 9295273 NR Description: triose phosphate/phosphate translocator precursor
  misc_feature (1)..(296): Homolog of NCBI NO: 629694 NR Description: phosphate translocator, chloroplast - common >gi|403023|emb|CAA52979.1| phosphate translocator [Nicotiana
  misc_feature (1)..(296): Homolog of NCBI NO: 1352199 NR Description: Triose phosphate/phosphate translocator,
  misc_feature (1)..(293): Homolog of NCBI NO: 117291 NR Description: TRIOSE PHOSPHATE/PHOSPHATE TRANSLOCATOR,
  misc_feature (1)..(293): Homolog of NCBI NO: 21593093 NR Description: phosphate/triose-phosphate translocator precursor
  misc_feature (1)..(295): Homolog of NCBI NO: 9757731 NR Description: phosphate/triose-phosphate translocator precursor
  misc_feature (1)..(284): Homolog of NCBI NO: 18423670 NR Description: glucose-6-phosphate/phosphate translocator; id: At5g54800.1, supported by cDNA: 26107., supported by cDNA: supported by cDNA: gi_7229674 [Arabidopsis thaliana]
MWYFLNVIFNILNKKIYNYFPYPYFVSLIHLVVGVVYCLISWSVGLPKRAPINGTLLKLLFPVALCHGIGHITSNVSFAAVAVSFAHTIKALEPFFSAAATQFILGQQVPFSLWLSLAPVVIGVSMASLTELSFNWTGFINAMISNISFTYRSIYSKKAMTDMDSTNVYAYISIIALIVCIPPALIFEGPKLMQHGFSDAIAKVGLTKFVSDLFLVGLFYHLYNQIATNTLERVAPLTHAVGNVLKRVFVIGFSIIVFGNKISTQTGIGTSIAIAGVAMYSYIKAKIEEEKRKKSA

SEQ ID NO: 2604 - DNA, 1266 bp, Zea mays subsp. mays
  misc_feature (1)..(1266): Ceres Seq. ID no. 12366644
  misc_feature: MA Experiment ID: 108543 Result: Down-regulated in Transcription
  misc_feature: MA Experiment ID: 108687 Result: Up-regulated in Transcription
  misc_feature: MA Experiment 108687 PARAMETER Experiment Name: Zm_Embryos-Flowers__P Parameter: Tissue Value: Embryo vs. Aerial+
  misc_feature: MA Experiment ID: 108688 Result: Down-regulated in Transcription
  misc_feature: MA Experiment 108688 PARAMETER Experiment Name: Zm_Embryos-Flowers__P Parameter: Tissue Value: Immature Flowers vs. Aerial+
  misc_feature: MA Experiment ID: 20000478 Result: Up-regulated in Transcription
  misc_feature: MA Experiment 20000478 PARAMETER Experiment Name: Zm_5mM_SA_P Parameter: Age (day) Value: 11
  misc_feature: MA Experiment 20000478 PARAMETER Experiment Name: Zm_5mM_SA_P Parameter: Organism Value: Zea mays
  misc_feature: MA Experiment 20000478 PARAMETER Experiment Name: Zm_5mM_SA_P Parameter: Plant Line Value: 35A19
  misc_feature: MA Experiment 20000478 PARAMETER Experiment Name: Zm_5mM_SA_P Parameter: Timepoint (hr) Value: 72
  misc_feature: MA Experiment 20000478 PARAMETER Experiment Name: Zm_5mM_SA_P Parameter: Tissue Value: Aerial
  misc_feature: MA Experiment 20000478 PARAMETER Experiment Name: Zm_5mM_SA_P Parameter: Treatment Value: 5mM SA vs. No Treatment
  misc_feature: MA Experiment ID: 20000480 Result: Up-regulated in Transcription
  misc_feature: MA Experiment 20000480 PARAMETER Experiment Name: Zm_Drought_P Parameter: Age (day) Value: 11
  misc_feature: MA Experiment 20000480 PARAMETER Experiment Name: Zm_Drought_P Parameter: Organism Value: Zea mays
  misc_feature: MA Experiment 20000480 PARAMETER Experiment Name: Zm_Drought_P Parameter: Plant Line Value: 35A19
  misc_feature: MA Experiment 20000480 PARAMETER Experiment Name: Zm_Drought_P Parameter: Timepoint (hr) Value: 72
  misc_feature: MA Experiment 20000480 PARAMETER Experiment Name: Zm_Drought_P Parameter: Tissue Value: Aerial
  misc_feature: MA Experiment 20000480 PARAMETER Experiment Name: Zm_Drought_P Parameter: Treatment Value: Drought vs. No Drought
  misc_feature: MA Experiment ID: 20000535 Result: Up-regulated in Transcription
  misc_feature: MA Experiment 20000535 PARAMETER Experiment Name: Zm_Hybrid_Seed_Dev_P Parameter: DAP Value: 30 vs. 12
  misc_feature: MA Experiment 20000535 PARAMETER Experiment Name: Zm_Hybrid_Seed_Dev_P Parameter: Organism Value: Zea mays
  misc_feature: MA Experiment 20000535 PARAMETER Experiment Name: Zm_Hybrid_Seed_Dev_P Parameter: Plant Line Value: 35A19
  misc_feature: MA Experiment 20000535 PARAMETER Experiment Name: Zm_Hybrid_Seed_Dev_P Parameter: Tissue Value: Embryo vs. Unfert Floret
acacactcgctctgctactagctactagcagtagagcagtagaggagagagcatctacctagcgccgtcggacggatcggagctacctcaccgccgaccgcgcgcgaagagatcgatggctcatgctgctacgctcgctgctgcagccgcggtcgtcgtcctcatcgtcgtctgctgctgctcctcttcggaggccgccagccacagcgccaacgcgaggcagccgccgctggcgcccggcctgtccttggacttctacaagcggagctgcgcccagggcggagtccgtcgtgcggaggttcgtgcaggacgccgtgcgcagggacgccggcctcgccgccggcctcctccgcctccacttccacgactgcttcgtccagggctgcgacgcgtccgtgctcctggacggctcagccaccggccccgggcgagcagcaggcgccgcccaacctcacgctgcgccccaccgcgttcaaggccatcaacgacatccacgaccgcctccagaaggagtgcggtggcgcagtcgtgtcctgctccgacgtcctcgcgctcgccgccagggactcagtcgtcgtgtccggaggtcccagctacaaggtgccgctgggtcggcgcgacagcgcgagcttcgcgacgcgagaggacgtcctgagcgggctcccgccgccgacggccgccgtgccggcgcttctcgccgtgctgtcaacctggacgcgacggacctggtggcgctgtcgggcggccacaccatcgggctgggccactgcgcgtccttcgagagccgcctgttcccgcgccaggacccgacgctgaacgccaccttcgccggccacctgcgccggacctgcccggccaagggcaccgaccgccggacgccgctggacgtgcgcacgcccgacgcgttcgacaacaagtactacgtcaacctggtgaaccgtgaggggctcttcacctccgaccaggacctcttcagcaaccccggcaccaggcccctcgtcgagaagttcgcgcgcagccagagagacttcttcgaccagttcgccttctccgtggtgaagatggggcagatcaaggtgctcacgggcgcgcaggggcagatccgcaggaactgctccgcccgcaacgcaggcatgacgtggtccgtcgtcgacgaggctgcacagcagagcttcgtgttctagactttgtacgtactagctggctactgtgtgggcggcggtgtcctgtcaacagaacagatagctagcagtagcactggacggc

SEQ ID NO: 2605 - protein, 353 aa, Zea mays subsp. mays
  peptide (1)..(353): Ceres Seq. ID no. 12366645
  misc_feature (43)..(101): Homolog of NCBI NO: 478409 NR Description: peroxidase (EC 1.11.1.7), cationic - adzuki bean
  misc_feature (196)..(349): Homolog of NCBI NO: 478409 NR Description: peroxidase (EC 1.11.1.7), cationic - adzuki bean
  misc_feature (43)..(101): Homolog of NCBI NO: 14031049 NR Description: peroxidase [Nicotiana tabacum]
  misc_feature (196)..(336): Homolog of NCBI NO: 14031049 NR Description: peroxidase [Nicotiana tabacum]
  misc_feature (43)..(102): Homolog of NCBI NO: 15217539 NR Description: peroxidase, putative
  misc_feature (43)..(102): Homolog of NCBI NO: 1402914 NR Description: peroxidase [Arabidopsis thaliana]
  misc_feature (196)..(350): Homolog of NCBI NO: 15217539 NR Description: peroxidase, putative
  misc_feature (196)..(350): Homolog of NCBI NO: 1402914 NR Description: peroxidase [Arabidopsis thaliana]
  misc_feature (49)..(99): Homolog of NCBI NO: 34905834 NR Description: putative peroxidase [Oryza sativa (japonica
  misc_feature (195)..(348): Homolog of NCBI NO: 34905834 NR Description: putative peroxidase [Oryza sativa (japonica
MLLRSLLQPRSSSSSSSAAAPLRRPPATAPTRGSRRWRPACPWTSTSGAAPRAESVVRRFVQDAVRRDAGLAAGLLRLHFHDCFVQGCDASVLLDGSATGPGRAAGAAQPHAAPHRVQGHQRHPRPPPEGVRWRSRVLLRRPRARRQGLSRRVRRSQLQGAAGSARQRELRDARGRPERAPAADGRRAGASRRAVNLDATDLVALSGGHTIGLGHCASFESRLFPRQDPTLNATFAGHLRRTCPAKGTDRRTPLDVRTPDAFDNKYYVNLVNREGLFTSDQDLFSNPGTRPLVEKFARSQRDFFDQFAFSVVKMGQIKVLTGAQGQIRRNCSARNAGMTWSVVDEAAQQSFVF

SEQ ID NO: 2606 - protein, 179 aa, Zea mays subsp. mays
  peptide (1)..(179): Ceres Seq. ID no. 12366646
  misc_feature (25)..(179): Homolog of NCBI NO: 19923466 NR Description: splicing coactivator subunit SRm300
  misc_feature (25)..(179): Homolog of NCBI NO: 6649242 NR Description: splicing coactivator subunit SRm300 [Homo sapiens]
  misc_feature (88)..(156): Homolog of NCBI NO: 11359723 NR Description: proteophosphoglycan, membrane-associated
  misc_feature (60)..(179): Homolog of NCBI NO: 25143299 NR Description: pre-mRNA splicing SR protein related RSR-1 (68.2
  misc_feature (95)..(156): Homolog of NCBI NO: 11359723 NR Description: proteophosphoglycan, membrane-associated
  misc_feature (11)..(73): Homolog of NCBI NO: 34905830 NR Description: putative peroxidase [Oryza sativa (japonica
  misc_feature (7)..(59): Homolog of NCBI NO: 34905838 NR Description: putative peroxidase [Oryza sativa (japonica
  misc_feature (5)..(70): Homolog of NCBI NO: 82410 NR Description: peroxidase (EC 1.11.1.7) BP1 precursor - barley
  misc_feature (7)..(54): Homolog of NCBI NO: 34905826 NR Description: putative peroxidase [Oryza sativa (japonica
  misc_feature (1)..(54): Homolog of NCBI NO: 34905834 NR Description: putative peroxidase [Oryza sativa (japonica
MAHAATLAAAAAVVVLIVVCCCSSSEAASHSANARQPPLAPGLSLDFYKRSCAQGGVRRAEVRAGRRAQGRRPRRRPPPPPLPRLLRPGLRRVRAPGRLSHRPRASSRRRPTSRCAPPRSRPSTTSTTASRRSAVAQSCPAPTSSRSPPGTQSSCPEVPATRCRWVGATARASRRERTS

SEQ ID NO: 2607 - DNA, 1075 bp, Zea mays subsp. mays
  misc_feature (1)..(1075): Ceres Seq. ID no. 12365239
  misc_feature: MA Experiment ID: 108504 Result: Down-regulated in Transcription
  misc_feature: MA Experiment 108504 PARAMETER Experiment Name: Zm_Drought_P Parameter: Age (day) Value: 8
  misc_feature: MA Experiment 108504 PARAMETER Experiment Name: Zm_Drought_P Parameter: Organism Value: Zea mays
  misc_feature: MA Experiment 108504 PARAMETER Experiment Name: Zm_Drought_P Parameter: Plant Line Value: 35A19
  misc_feature: MA Experiment 108504 PARAMETER Experiment Name: Zm_Drought_P Parameter: Timepoint (hr) Value: 12
  misc_feature: MA Experiment 108504 PARAMETER Experiment Name: Zm_Drought_P Parameter: Tissue Value: Aerial
  misc_feature: MA Experiment 108504 PARAMETER Experiment Name: Zm_Drought_P Parameter: Treatment Value: Drought vs. No Drought
  misc_feature: MA Experiment ID: 108522 Result: Down-regulated in Transcription
  misc_feature: MA Experiment 108522 PARAMETER Experiment Name: Zm_42deg_Heat_P Parameter: Age (day) Value: 8
  misc_feature: MA Experiment 108522 PARAMETER Experiment Name: Zm_42deg_Heat_P Parameter: Organism Value: Zea mays
  misc_feature: MA Experiment 108522 PARAMETER Experiment Name: Zm_42deg_Heat_P Parameter: Plant Line Value: 35A19
  misc_feature: MA Experiment 108522 PARAMETER Experiment Name: Zm_42deg_Heat_P Parameter: Temperature (deg C) Value: 42 vs. 22
  misc_feature: MA Experiment 108522 PARAMETER Experiment Name: Zm_42deg_Heat_P Parameter: Timepoint (hr) Value: 1
  misc_feature: MA Experiment 108522 PARAMETER Experiment Name: Zm_42deg_Heat_P Parameter: Tissue Value: Aerial
  misc_feature: MA Experiment ID: 108523 Result: Down-regulated in Transcription
  misc_feature: MA Experiment 108523 PARAMETER Experiment Name: Zm_42deg_Heat_P Parameter: Age (day) Value: 8
  misc_feature: MA Experiment 108523 PARAMETER Experiment Name: Zm_42deg_Heat_P Parameter: Organism Value: Zea mays
  misc_feature: MA Experiment 108523 PARAMETER Experiment Name: Zm_42deg_Heat_P Parameter: Plant Line Value: 35A19
  misc_feature: MA Experiment 108523 PARAMETER Experiment Name: Zm_42deg_Heat_P Parameter: Temperature (deg C) Value: 42 vs. 22
  misc_feature: MA Experiment 108523 PARAMETER Experiment Name: Zm_42deg_Heat_P Parameter: Timepoint (hr) Value: 6
  misc_feature: MA Experiment 108523 PARAMETER Experiment Name: Zm_42deg_Heat_P Parameter: Tissue Value: Aerial
  misc_feature: MA Experiment ID: 108527 Result: Down-regulated in Transcription
  misc_feature: MA Experiment 108527 PARAMETER Experiment Name: Zm_5mM_NO_P Parameter: Age (day) Value: 8
  misc_feature: MA Experiment 108527 PARAMETER Experiment Name: Zm_5mM_NO_P Parameter: Organism Value: Zea mays
  misc_feature: MA Experiment 108527 PARAMETER Experiment Name: Zm_5mM_NO_P Parameter: Plant Line Value: 35A19
  misc_feature: MA Experiment 108527 PARAMETER Experiment Name: Zm_5mM_NO_P Parameter: Timepoint (hr) Value: 6
  misc_feature: MA Experiment 108527 PARAMETER Experiment Name: Zm_5mM_NO_P Parameter: Tissue Value: Aerial
  misc_feature: MA Experiment 108527 PARAMETER Experiment Name: Zm_5mM_NO_P Parameter: Treatment Value: 5mM NO vs. No Treatment
  misc_feature: MA Experiment ID: 108528 Result: Up-regulated in Transcription
  misc_feature: MA Experiment 108528 PARAMETER Experiment Name: Zm_Imbibed_Seeds_P Parameter: Age (day) Value: 5 vs. 2
  misc_feature: MA Experiment 108528 PARAMETER Experiment Name: Zm_Imbibed_Seeds_P Parameter: Organism Value: Zea mays
  misc_feature: MA Experiment 108528 PARAMETER Experiment Name: Zm_Imbibed_Seeds_P Parameter: Plant Line Value: 35A19
  misc_feature: MA Experiment 108528 PARAMETER Experiment Name: Zm_Imbibed_Seeds_P Parameter: Tissue Value: Aerial vs. Embryo
  misc_feature: MA Experiment ID: 108530 Result: Up-regulated in Transcription
  misc_feature: MA Experiment 108530 PARAMETER Experiment Name: Zm_Imbibed_Seeds_P Parameter: Age (day) Value: 6 vs. 2
  misc_feature: MA Experiment 108530 PARAMETER Experiment Name: Zm_Imbibed_Seeds_P Parameter: Organism Value: Zea mays
  misc_feature: MA Experiment 108530 PARAMETER Experiment Name: Zm_Imbibed_Seeds_P Parameter: Plant Line Value: 35A19
  misc_feature: MA Experiment 108530 PARAMETER Experiment Name: Zm_Imbibed_Seeds_P Parameter: Tissue Value: Aerial vs. Embryo
  misc_feature: MA Experiment ID: 108535 Result: Down-regulated in Transcription
  misc_feature: MA Experiment 108535 PARAMETER Experiment Name: Zm_Meristem_P Parameter: Age (day) Value: 8
  misc_feature: MA Experiment 108535 PARAMETER Experiment Name: Zm_Meristem_P Parameter: Organism Value: Zea mays
  misc_feature: MA Experiment 108535 PARAMETER Experiment Name: Zm_Meristem_P Parameter: Plant Line Value: 35A19
  misc_feature: MA Experiment 108535 PARAMETER Experiment Name: Zm_Meristem_P Parameter: Tissue Value: Root Meristem vs. Above Root Meristem
  misc_feature: MA Experiment ID: 108536 Result: Down-regulated in Transcription
  misc_feature: MA Experiment 108536 PARAMETER Experiment Name: Zm_Meristem_P Parameter: Age (day) Value: 8
  misc_feature: MA Experiment 108536 PARAMETER Experiment Name: Zm_Meristem_P Parameter: Organism Value: Zea mays
  misc_feature: MA Experiment 108536 PARAMETER Experiment Name: Zm_Meristem_P Parameter: Plant Line Value: 35A19
  misc_feature: MA Experiment 108536 PARAMETER Experiment Name: Zm_Meristem_P Parameter: Tissue Value: Shoot Meristem vs. Above Shoot Meristem
  misc_feature: MA Experiment ID: 108545 Result: Up-regulated in Transcription
  misc_feature: MA Experiment 108545 PARAMETER Experiment Name: Zm_Imbibed_Seeds_P Parameter: Age (day) Value: 3 vs. 2
  misc_feature: MA Experiment 108545 PARAMETER Experiment Name: Zm_Imbibed_Seeds_P Parameter: Organism Value: Zea mays
  misc_feature: MA Experiment 108545 PARAMETER Experiment Name: Zm_Imbibed_Seeds_P Parameter: Plant Line Value: 35A19
  misc_feature: MA Experiment 108545 PARAMETER Experiment Name: Zm_Imbibed_Seeds_P Parameter: Tissue Value: Aerial vs. Embryo
  misc_feature: MA Experiment ID: 108547 Result: Up-regulated in Transcription
  misc_feature: MA Experiment 108547 PARAMETER Experiment Name: Zm_Imbibed_Seeds_P Parameter: Age (day) Value: 4 vs. 2
  misc_feature: MA Experiment 108547 PARAMETER Experiment Name: Zm_Imbibed_Seeds_P Parameter: Organism Value: Zea mays
  misc_feature: MA Experiment 108547 PARAMETER Experiment Name: Zm_Imbibed_Seeds_P Parameter: Plant Line Value: 35A19
  misc_feature: MA Experiment 108547 PARAMETER Experiment Name: Zm_Imbibed_Seeds_P Parameter: Tissue Value: Aerial vs. Embryo
  misc_feature: MA Experiment ID: 108597 Result: Down-regulated in Transcription
  misc_feature: MA Experiment 108597 PARAMETER Experiment Name: Zm_100uM_ABA_P Parameter: Age (day) Value: 9
  misc_feature: MA Experiment 108597 PARAMETER Experiment Name: Zm_100uM_ABA_P Parameter: Organism Value: Zea mays
  misc_feature: MA Experiment 108597 PARAMETER Experiment Name: Zm_100uM_ABA_P Parameter: Plant Line Value: 35A19
  misc_feature: MA Experiment 108597 PARAMETER Experiment Name: Zm_100uM_ABA_P Parameter: Timepoint (hr) Value: 24
  misc_feature: MA Experiment 108597 PARAMETER Experiment Name: Zm_100uM_ABA_P Parameter: Tissue Value: Aerial
  misc_feature: MA Experiment 108597 PARAMETER Experiment Name: Zm_100uM_ABA_P Parameter: Treatment Value: 100uM ABA vs. No Treatment
  misc_feature: MA Experiment ID: 20000477 Result: Down-regulated in Transcription
  misc_feature: MA Experiment 20000477 PARAMETER Experiment Name: Zm_5mM_SA_P Parameter: Age (day) Value: 10
  misc_feature: MA Experiment 20000477 PARAMETER Experiment Name: Zm_5mM_SA_P Parameter: Organism Value: Zea mays
  misc_feature: MA Experiment 20000477 PARAMETER Experiment Name: Zm_5mM_SA_P Parameter: Plant Line Value: 35A19
  misc_feature: MA Experiment 20000477 PARAMETER Experiment Name: Zm_5mM_SA_P Parameter: Timepoint (hr) Value: 48
  misc_feature: MA Experiment 20000477 PARAMETER Experiment Name: Zm_5mM_SA_P Parameter: Tissue Value: Aerial
  misc_feature: MA Experiment 20000477 PARAMETER Experiment Name: Zm_5mM_SA_P Parameter: Treatment Value: 5mM SA vs. No Treatment
  misc_feature: MA Experiment ID: 20000478 Result: Down-regulated in Transcription
  misc_feature: MA Experiment 20000478 PARAMETER Experiment Name: Zm_5mM_SA_P Parameter: Age (day) Value: 11
  misc_feature: MA Experiment 20000478 PARAMETER Experiment Name: Zm_5mM_SA_P Parameter: Organism Value: Zea mays
  misc_feature: MA Experiment 20000478 PARAMETER Experiment Name: Zm_5mM_SA_P Parameter: Plant Line Value: 35A19
  misc_feature: MA Experiment 20000478 PARAMETER Experiment Name: Zm_5mM_SA_P Parameter: Timepoint (hr) Value: 72
  misc_feature: MA Experiment 20000478 PARAMETER Experiment Name: Zm_5mM_SA_P Parameter: Tissue Value: Aerial
  misc_feature: MA Experiment 20000478 PARAMETER Experiment Name: Zm_5mM_SA_P Parameter: Treatment Value: 5mM SA vs. No Treatment
  misc_feature: MA Experiment ID: 20000488 Result: Down-regulated in Transcription
  misc_feature: MA Experiment 20000488 PARAMETER Experiment Name: Zm_50mM_NH4NO3_L_to_H_P Parameter: Organism Value: Zea mays
  misc_feature: MA Experiment 20000488 PARAMETER Experiment Name: Zm_50mM_NH4NO3_L_to_H_P Parameter: Timepoint (hr) Value: 8
  misc_feature: MA Experiment 20000488 PARAMETER Experiment Name: Zm_50mM_NH4NO3_L_to_H_P Parameter: Tissue Value: Leaves
  misc_feature: MA Experiment 20000488 PARAMETER Experiment Name: Zm_50mM_NH4NO3_L_to_H_P Parameter: Treatment Value: 50mM NH4NO3 vs. 100mM Mannitol
  misc_feature: MA Experiment ID: 20000626 Result: Down-regulated in Transcription
  misc_feature: MA Experiment 20000626 PARAMETER Experiment Name: Zm_Herbicide-Treatments_P Parameter: Timepoint (hr) Value: 12
  misc_feature: MA Experiment 20000626 PARAMETER Experiment Name: Zm_Herbicide-Treatments_P Parameter: Tissue Value: Aerial
  misc_feature: MA Experiment 20000626 PARAMETER Experiment Name: Zm_Herbicide-Treatments_P Parameter: Treatment Value: Roundup vs. No Treatment
  misc_feature: MA Experiment ID: 20000630 Result: Down-regulated in Transcription
  misc_feature: MA Experiment 20000630 PARAMETER Experiment Name: Zm_Herbicide-Treatments_P Parameter: Timepoint (hr) Value: 4
  misc_feature: MA Experiment 20000630 PARAMETER Experiment Name: Zm_Herbicide-Treatments_P Parameter: Tissue Value: Aerial
  misc_feature: MA Experiment 20000630 PARAMETER Experiment Name: Zm_Herbicide-Treatments_P Parameter: Treatment Value: Roundup vs. No Treatment
  misc_feature: MA Experiment ID: 20001608 Result: Up-regulated in Transcription
  misc_feature: MA Experiment 20001608 PARAMETER Experiment Name: Zm_50ppm_KNO3_L-to-H_P Parameter: Age (day) Value: 21
  misc_feature: MA Experiment 20001608 PARAMETER Experiment Name: Zm_50ppm_KNO3_L-to-H_P Parameter: Organism Value: Zea mays
  misc_feature: MA Experiment 20001608 PARAMETER Experiment Name: Zm_50ppm_KNO3_L-to-H_P Parameter: Plant Line Value: 35A19
  misc_feature: MA Experiment 20001608 PARAMETER Experiment Name: Zm_50ppm_KNO3_L-to-H_P Parameter: Timepoint (hr) Value: 48
  misc_feature: MA Experiment 20001608 PARAMETER Experiment Name: Zm_50ppm_KNO3_L-to-H_P Parameter: Tissue Value: Shoots
  misc_feature: MA Experiment 20001608 PARAMETER Experiment Name: Zm_50ppm_KNO3_L-to-H_P Parameter: Treatment Value: 50ppm KNO3 vs. 50ppm KCl
aatcagctaagatagctgcaaaacaagcgagttacttacaaccaaacagaagggtagaaaccacctgaagccatgtgcattgctgcatggatttggcaggctcaccctgtgcaccaactcctcctgcttctcaacagagatgagttccacagcaggcctacaaaagcagtaggatggtggggtgaaggctcaaagaagatccttggtggcagggatgtgcttggtggaggaacatggatggggtgcaccaaggatggaaggcttgccttcctgaccaatgtgcttgaaccagatgccatgcccggtgcacggactaggggagatctgcctctcaaattcctgcagagcaacaagagcccactcgaagttgcaactgaagtggcagaagaagctgatgaatacaatggcttcaacctcatactagctgatctaacaacaaatatcatggtttatgtgtcaaaccggcctaagggtcagcctgcaacaattcaactcgtgtcaccaggactccatgtgctgtccaatgcaaggctagatagcccttggcagaaggcaattctcctcggtaaaaacttcagggagcttcttagggagcatggtgctgatgaggttgaagtgaaggatatagttgagaggctaatgactgacaccacaaaggctgacaaagatagactgccaaacactggttgtgatcccaactgggagcatggtctgagctccatcttcattgaggtgcaaactgaccaagggccctatgggacacggagcacagccgttttatcagtgaactatgatggcgaagctagcttgtacgagaagtatcttgagagtggtatatggaaggatcacacagtgagttaccagatagagtagtaggcattgcacaggaaaagttggcgacctcaaataaatagaaatatgaagcagacacaattgtgaatttcattatttccctgatctctagtcatcttcgtgattatctaagatcctaccataatgccaattacattattcactgtaagcagatttttcacttgacgataaaatgtcaaccaaaactttggttttcttcgtc

SEQ ID NO: 2608 - protein, 266 aa, Zea mays subsp. mays
  peptide (1)..(266): Ceres Seq. ID no. 12365240
  misc_feature (35)..(263): Pfam Name: Protein of unknown function (DUF833) Pfam Description: Protein of unknown function (DUF833)
  misc_feature (1)..(266): Homolog of NCBI NO: 20070388 NR Description: DNA segment, Chr 16, human D22S680E, expressed
  misc_feature (1)..(266): Homolog of NCBI NO: 34869782 NR Description: similar to Ser/Thr-rich protein T10 in DGCR
  misc_feature (1)..(264): Homolog of NCBI NO: 22977012 NR Description: hypothetical protein [Ralstonia metallidurans]
  misc_feature (1)..(260): Homolog of NCBI NO: 21230190 NR Description: conserved hypothetical protein
  misc_feature (1)..(253): Homolog of NCBI NO: 17546499 NR Description: PUTATIVE SIGNAL PEPTIDE PROTEIN [Ralstonia
  misc_feature (1)..(266): Homolog of NCBI NO: 39995898 NR Description: conserved hypothetical protein [Geobacter
  misc_feature (30)..(243): Homolog of NCBI NO: 7485957 NR Description: hypothetical protein F22I13.30 - Arabidopsis
  misc_feature (35)..(265): Homolog of NCBI NO: 15451202 NR Description: putative protein [Arabidopsis thaliana]
  misc_feature (1)..(265): Homolog of NCBI NO: 18420207 NR Description: putative protein
  misc_feature (14)..(266): Homolog of NCBI NO: 38345399 NR Description: OSJNBa0017B10.5 [Oryza sativa (japonica
MCIAAWIWQAHPVHQLLLLLNRDEFHSRPTKAVGWWGEGSKKILGGRDVLGGGTWMGCTKDGRLAFLTNVLEPDAMPGARTRGDLPLKFLQSNKSPLEVATEVAEEADEYNGFNLILADLTTNIMVYVSNRPKGQPATIQLVSPGLHVLSNARLDSPWQKAILLGKNFRELLREHGADEVEVKDIVERLMTDTTKADKDRLPNTGCDPNWEHGLSSIFIEVQTDQGPYGTRSTAVLSVNYDGEASLYEKYLESGIWKDHTVSYQIE

SEQ ID NO: 2609 - protein, 211 aa, Zea mays subsp. mays
  peptide (1)..(211): Ceres Seq. ID no. 12365241
  misc_feature (1)..(208): Pfam Name: Protein of unknown function (DUF833) Pfam Description: Protein of unknown function (DUF833)
  misc_feature (1)..(211): Homolog of NCBI NO: 20070388 NR Description: DNA segment, Chr 16, human D22S680E, expressed
  misc_feature (1)..(211): Homolog of NCBI NO: 34869782 NR Description: similar to Ser/Thr-rich protein T10 in DGCR
  misc_feature (1)..(209): Homolog of NCBI NO: 22977012 NR Description: hypothetical protein [Ralstonia metallidurans]
  misc_feature (1)..(205): Homolog of NCBI NO: 21230190 NR Description: conserved hypothetical protein
  misc_feature (1)..(198): Homolog of NCBI NO: 17546499 NR Description: PUTATIVE SIGNAL PEPTIDE PROTEIN [Ralstonia
  misc_feature (1)..(211): Homolog of NCBI NO: 39995898 NR Description: conserved hypothetical protein [Geobacter
  misc_feature (1)..(188): Homolog of NCBI NO: 7485957 NR Description: hypothetical protein F22I13.30 - Arabidopsis
  misc_feature (1)..(210): Homolog of NCBI NO: 15451202 NR Description: putative protein [Arabidopsis thaliana]
  misc_feature (1)..(210): Homolog of NCBI NO: 18420207 NR Description: putative protein
  misc_feature (1)..(211): Homolog of NCBI NO: 38345399 NR Description: OSJNBa0017B10.5 [Oryza sativa (japonica
MGCTKDGRLAFLTNVLEPDAMPGARTRGDLPLKFLQSNKSPLEVATEVAEEADEYNGFNLILADLTTNIMVYVSNRPKGQPATIQLVSPGLHVLSNARLDSPWQKAILLGKNFRELLREHGADEVEVKDIVERLMTDTTKADKDRLPNTGCDPNWEHGLSSIFIEVQTDQGPYGTRSTAVLSVNYDGEASLYEKYLESGIWKDHTVSYQIE

SEQ ID NO: 2610 - protein, 191 aa, Zea mays subsp. mays
  peptide (1)..(191): Ceres Seq. ID no. 12365242
  misc_feature (1)..(188): Pfam Name: Protein of unknown function (DUF833) Pfam Description: Protein of unknown function (DUF833)
  misc_feature (1)..(191): Homolog of NCBI NO: 20070388 NR Description: DNA segment, Chr 16, human D22S680E, expressed
  misc_feature (1)..(191): Homolog of NCBI NO: 34869782 NR Description: similar to Ser/Thr-rich protein T10 in DGCR
  misc_feature (1)..(189): Homolog of NCBI NO: 22977012 NR Description: hypothetical protein [Ralstonia metallidurans]
  misc_feature (1)..(185): Homolog of NCBI NO: 21230190 NR Description: conserved hypothetical protein
  misc_feature (1)..(178): Homolog of NCBI NO: 17546499 NR Description: PUTATIVE SIGNAL PEPTIDE PROTEIN [Ralstonia
  misc_feature (1)..(191): Homolog of NCBI NO: 39995898 NR Description: conserved hypothetical protein [Geobacter
  misc_feature (1)..(168): Homolog of NCBI NO: 7485957 NR Description: hypothetical protein F22I13.30 - Arabidopsis
  misc_feature (1)..(190): Homolog of NCBI NO: 15451202 NR Description: putative protein [Arabidopsis thaliana]
  misc_feature (1)..(190): Homolog of NCBI NO: 18420207 NR Description: putative protein
  misc_feature (1)..(191): Homolog of NCBI NO: 38345399 NR Description: OSJNBa0017B10.5 [Oryza sativa (japonica
MPGARTRGDLPLKFLQSNKSPLEVATEVAEEADEYNGFNLILADLTTNIMVYVSNRPKGQPATIQLVSPGLHVLSNARLDSPWQKAILLGKNFRELLREHGADEVEVKDIVERLMTDTTKADKDRLPNTGCDPNWEHGLSSIFIEVQTDQGPYGTRSTAVLSVNYDGEASLYEKYLESGIWKDHTVSYQIE

SEQ ID NO: 2611 - DNA, 1174 bp, Zea mays subsp. mays
  misc_feature (1)..(1174): Ceres Seq. ID no. 12414814
  misc_feature: MA Experiment ID: 108523 Result: Up-regulated in Transcription
  misc_feature: MA Experiment 108523 PARAMETER Experiment Name: Zm_42deg_Heat_P Parameter: Age (day) Value: 8
  misc_feature: MA Experiment 108523 PARAMETER Experiment Name: Zm_42deg_Heat_P Parameter: Organism Value: Zea mays
  misc_feature: MA Experiment 108523 PARAMETER Experiment Name: Zm_42deg_Heat_P Parameter: Plant Line Value: 35A19
  misc_feature: MA Experiment 108523 PARAMETER Experiment Name: Zm_42deg_Heat_P Parameter: Temperature (deg C) Value: 42 vs. 22
  misc_feature: MA Experiment 108523 PARAMETER Experiment Name: Zm_42deg_Heat_P Parameter: Timepoint (hr) Value: 6
  misc_feature: MA Experiment 108523 PARAMETER Experiment Name: Zm_42deg_Heat_P Parameter: Tissue Value: Aerial
gactctatcccgttcccttccgtccctcgtcacgctcacgaagcacgctgtcgtcttgcgggntctcgcccgtcgccccccgagccccgaaaccaaagccgagccgagagcccgagccccgccccggacctcatcttctcctcgtcggtttcacccctccaccacctccatggggtcgtcggaggccgacgaggaccagctcctcaagagcttcctcgcggaggtcagcgaggccgagcgggacaacgaagtgctgaggatacttggttgcttcaagttaaaccccttcgagcatcttaagttgtcttttgattcatcaccagatgaggtgaaaaagcaatataggaagttgtcattgctggtccatcctgataaatgcaagcatcctcaggcacaagaagcttttgcagctctggcgaaagcacaacagctcctgcttgatccacaggaaagaggctacattcttgaccaagttactgctgcaaaagaagaattgagggcaaaacggaaaaaggagctgaagaaagacagtgcgtccaagataaaatctcttgtagatgagggaaaatatgaagagcagtttgaacgatcggatggatttcagcagcaattaataattaaagtacgtgaaattttgaccgacaaagaatggcgtaggagaaaaatgcaaatgaggatatcagaggaagaaggaagacttaagaaggatgaggaggaaacaaaagagatgtggaagaggaagagagagcatgaagagaagtgggaggagaccagagacaagcgggtctccagctggagggatttcatgaagacaggaaagaagggacggaaaggtgaaatcaagcccccaaaactgaagactgaagatccgaacaaatcttatgtgcaaaggccagtaaagcgaaactgagtggaatgtcagcaatcaaagaacatccggtagcggcctttcatctcaccagattagagctgcaacccttcaatgttgtacttgtcctgaatgtggtaaggttcaattacgcccgctggggaaacagaacggaacagagcagattttacccgtattgctagctagagtgatttggtttgatgtactcatcatccgtctgaagattttactgggaaaaaaagtacaaacttttccgttggaaaagaacctaatgaagtgaatgtt

SEQ ID NO: 2612 - protein, 302 aa, Zea mays subsp. mays
  peptide (1)..(302): Ceres Seq. ID no. 12414815
  misc_feature (94)..(157): Pfam Name: DnaJ domain Pfam Description: DnaJ domain
  misc_feature (62)..(277): Homolog of NCBI NO: 40747533 NR Description: conserved hypothetical protein [Aspergillus
  misc_feature (58)..(255): Homolog of NCBI NO: 34871854 NR Description: similar to DnaJ homolog subfamily C member 8
  misc_feature (74)..(277): Homolog of NCBI NO: 23619009 NR Description: DNAJ protein, putative [Plasmodium falciparum
  misc_feature (66)..(288): Homolog of NCBI NO: 39595457 NR Description: Hypothetical protein CBG04113 [Caenorhabditis
  misc_feature (66)..(288): Homolog of NCBI NO: 17510535 NR Description: DNaJ domain (prokaryotic heat shock protein)
  misc_feature (58)..(277): Homolog of NCBI NO: 27369493 NR Description: DnaJ (Hsp40) homolog, subfamily C, member 8
  misc_feature (58)..(288): Homolog of NCBI NO: 34784000 NR Description: Unknown (protein for IMAGE:5148567) [Mus musculus]
  misc_feature (53)..(288): Homolog of NCBI NO: 21620116 NR Description: similar to DnaJ (Hsp40) homolog, subfamily C,
  misc_feature (53)..(288): Homolog of NCBI NO: 7657611 NR Description: DnaJ (Hsp40) homolog, subfamily C, member 8
  misc_feature (57)..(301): Homolog of NCBI NO: 22326960 NR Description: unknown protein; protein id: At5g22080.1
  misc_feature (21)..(21): Xaa is any aa, unknown or other
TLSRSLPSLVTLTKHAVVLRXLARRPPSPETKAEPRARAPPRTSSSPRRFHPSTTSMGSSEADEDQLLKSFLAEVSEAERDNEVLRILGCFKLNPFEHLKLSFDSSPDEVKKQYRKLSLLVHPDKCKHPQAQEAFAALAKAQQLLLDPQERGYILDQVTAAKEELRAKRKKELKKDSASKIKSLVDEGKYEEQFERSDGFQQQLIIKVREILTDKEWRRRKMQMRISEEEGRLKKDEEETKEMWKRKREHEEKWEETRDKRVSSWRDFMKTGKKGRKGEIKPPKLKTEDPNKSYVQRPVKRN

SEQ ID NO: 2613 - protein, 246 aa, Zea mays subsp. mays
  peptide (1)..(246): Ceres Seq. ID no. 12414816
  misc_feature (38)..(101): Pfam Name: DnaJ domain Pfam Description: DnaJ domain
  misc_feature (6)..(221): Homolog of NCBI NO: 40747533 NR Description: conserved hypothetical protein [Aspergillus
  misc_feature (2)..(199): Homolog of NCBI NO: 34871854 NR Description: similar to DnaJ homolog subfamily C member 8
  misc_feature (18)..(221): Homolog of NCBI NO: 23619009 NR Description: DNAJ protein, putative [Plasmodium falciparum
  misc_feature (10)..(232): Homolog of NCBI NO: 39595457 NR Description: Hypothetical protein CBG04113 [Caenorhabditis
  misc_feature (10)..(232): Homolog of NCBI NO: 17510535 NR Description: DNaJ domain (prokaryotic heat shock protein)
  misc_feature (2)..(221): Homolog of NCBI NO: 27369493 NR Description: DnaJ (Hsp40) homolog, subfamily C, member 8
  misc_feature (2)..(232): Homolog of NCBI NO: 34784000 NR Description: Unknown (protein for IMAGE:5148567) [Mus musculus]
  misc_feature (1)..(232): Homolog of NCBI NO: 21620116 NR Description: similar to DnaJ (Hsp40) homolog, subfamily C,
  misc_feature (1)..(232): Homolog of NCBI NO: 7657611 NR Description: DnaJ (Hsp40) homolog, subfamily C, member 8
  misc_feature (1)..(245): Homolog of NCBI NO: 22326960 NR Description: unknown protein; protein id: At5g22080.1
MGSSEADEDQLLKSFLAEVSEAERDNEVLRILGCFKLNPFEHLKLSFDSSPDEVKKQYRKLSLLVHPDKCKHPQAQEAFAALAKAQQLLLDPQERGYILDQVTAAKEELRAKRKKELKKDSASKIKSLVDEGKYEEQFERSDGFQQQLIIKVREILTDKEWRRRKMQMRISEEEGRLKKDEEETKEMWKRKREHEEKWEETRDKRVSSWRDFMKTGKKGRKGEIKPPKLKTEDPNKSYVQRPVKRN

SEQ ID NO: 2614 - DNA, 903 bp, Zea mays subsp. mays
  misc_feature (1)..(903): Ceres Seq. ID no. 12343059
  misc_feature: MA Experiment ID: 108522 Result: Up-regulated in Transcription
  misc_feature: MA Experiment 108522 PARAMETER Experiment Name: Zm_42deg_Heat_P Parameter: Age (day) Value: 8
  misc_feature: MA Experiment 108522 PARAMETER Experiment Name: Zm_42deg_Heat_P Parameter: Organism Value: Zea mays
  misc_feature: MA Experiment 108522 PARAMETER Experiment Name: Zm_42deg_Heat_P Parameter: Plant Line Value: 35A19
  misc_feature: MA Experiment 108522 PARAMETER Experiment Name: Zm_42deg_Heat_P Parameter: Temperature (deg C) Value: 42 vs. 22
  misc_feature: MA Experiment 108522 PARAMETER Experiment Name: Zm_42deg_Heat_P Parameter: Timepoint (hr) Value: 1
  misc_feature: MA Experiment 108522 PARAMETER Experiment Name: Zm_42deg_Heat_P Parameter: Tissue Value: Aerial
  misc_feature: MA Experiment ID: 108523 Result: Up-regulated in Transcription
  misc_feature: MA Experiment 108523 PARAMETER Experiment Name: Zm_42deg_Heat_P Parameter: Age (day) Value: 8
  misc_feature: MA Experiment 108523 PARAMETER Experiment Name: Zm_42deg_Heat_P Parameter: Organism Value: Zea mays
  misc_feature: MA Experiment 108523 PARAMETER Experiment Name: Zm_42deg_Heat_P Parameter: Plant Line Value: 35A19
  misc_feature: MA Experiment 108523 PARAMETER Experiment Name: Zm_42deg_Heat_P Parameter: Temperature (deg C) Value: 42 vs. 22
  misc_feature: MA Experiment 108523 PARAMETER Experiment Name: Zm_42deg_Heat_P Parameter: Timepoint (hr) Value: 6
  misc_feature: MA Experiment 108523 PARAMETER Experiment Name: Zm_42deg_Heat_P Parameter: Tissue Value: Aerial
  misc_feature: MA Experiment ID: 108597 Result: Up-regulated in Transcription
  misc_feature: MA Experiment 108597 PARAMETER Experiment Name: Zm_100uM_ABA_P Parameter: Age (day) Value: 9
  misc_feature: MA Experiment 108597 PARAMETER Experiment Name: Zm_100uM_ABA_P Parameter: Organism Value: Zea mays
  misc_feature: MA Experiment 108597 PARAMETER Experiment Name: Zm_100uM_ABA_P Parameter: Plant Line Value: 35A19
  misc_feature: MA Experiment 108597 PARAMETER Experiment Name: Zm_100uM_ABA_P Parameter: Timepoint (hr) Value: 24
  misc_feature: MA Experiment 108597 PARAMETER Experiment Name: Zm_100uM_ABA_P Parameter: Tissue Value: Aerial
  misc_feature: MA Experiment 108597 PARAMETER Experiment Name: Zm_100uM_ABA_P Parameter: Treatment Value: 100uM ABA vs. No Treatment
  misc_feature: MA Experiment ID: 108689 Result: Up-regulated in Transcription
  misc_feature: MA Experiment 108689 PARAMETER Experiment Name: Zm_Drought_Roots_P Parameter: Age (day) Value: 9
  misc_feature: MA Experiment 108689 PARAMETER Experiment Name: Zm_Drought_Roots_P Parameter: Organism Value: Zea mays
  misc_feature: MA Experiment 108689 PARAMETER Experiment Name: Zm_Drought_Roots_P Parameter: Plant Line Value: 35A19
  misc_feature: MA Experiment 108689 PARAMETER Experiment Name: Zm_Drought_Roots_P Parameter: Timepoint (hr) Value: 24
  misc_feature: MA Experiment 108689 PARAMETER Experiment Name: Zm_Drought_Roots_P Parameter: Tissue Value: Roots
  misc_feature: MA Experiment 108689 PARAMETER Experiment Name: Zm_Drought_Roots_P Parameter: Treatment Value: Drought vs. No Drought
acagcggcgtcgggtctatccgggtctatccgcgaacacgtgagaactctccagaaactgctttctcctccacttcatctctctcgctttccctctataaaaagaccccttctaggaattgagggagacagcaagcagcgatccgaagctcaatcaattcactcaaacctcttccccaaatcttcgattagattctcgttgacaagaagactagaaccgaacctgaccatgtcgctgatccgccgcagcaacgtgttcgatcccttctccctcgacctctgggacccctttgagggcttccccttcggctccggcaacagcagcagtctcttcccctcgttcccgcggaccagctcggagaccgcggccttcgctggcgcgcggatcgactggaaggagactccagaggcgcacgtgttcaaggccgacgtaccggggctgaagaaggaggaggtcaaggtggaggtcgaggacggcaacgtccttcagatcagcggcgagcgcaacaaggagcaggaggagaagacggacaccctggcaccgcgtggagcggagcagcgggaggttcctgcgcaggttccgactgcccgagaacgccaagacggagcagatcacggccgccatggagaacggcgtgcttacagtcactgtgccgaaggaggacgccaagaagcctgaagtgaagtccattcagatctccggctagacctcggtctgcggtcgtcgtacctgcgtggtttgaggaacggcagttcgcctcggtcgttctgtgaaataaaattgggttacaagaattatggcgtttgtcaatatggtcgtaatgtcgtaggatggtggaatgtggtcacaaactttgcgtatgttgggtctacttgtggtgtctgaatctatgtatggatgtcg

SEQ ID NO: 2615 - protein, 225 aa, Zea mays subsp. mays
  peptide (1)..(225): Ceres Seq. ID no. 12343060
  misc_feature (77)..(178): Homolog of NCBI NO: 25044839 NR Description: class-1 LMW heat shock protein [Ananas comosus]
  misc_feature (77)..(177): Homolog of NCBI NO: 422000 NR Description: heat shock protein, low molecular weight (clone
  misc_feature (77)..(177): Homolog of NCBI NO: 34902028 NR Description: shock protein, low molecular weight
  misc_feature (77)..(177): Homolog of NCBI NO: 399937 NR Description: 17.4 KD CLASS I HEAT SHOCK PROTEIN
  misc_feature (77)..(177): Homolog of NCBI NO: 34902024 NR Description: unknown protein [Oryza sativa (japonica
  misc_feature (77)..(177): Homolog of NCBI NO: 1213073 NR Description: heat shock protein 17.8 [Oryza sativa]
  misc_feature (77)..(177): Homolog of NCBI NO: 2119194 NR Description: low-molecular-weight heat-shock protein - rice
  misc_feature (77)..(177): Homolog of NCBI NO: 34902026 NR Description: unknown protein [Oryza sativa (japonica
  misc_feature (77)..(177): Homolog of NCBI NO: 34902016 NR Description: putative class I low-molecular-weight heat shock
  misc_feature (77)..(178): Homolog of NCBI NO: 7441293 NR Description: heat shock protein 17.9 - pearl millet
TAASGLSGSIREHVRTLQKLLSPPLHLSRFPSIKRPLLGIEGDSKQRSEAQSIHSNLFPKSSIRFSLTRRLEPNLTMSLIRRSNVFDPFSLDLWDPFEGFPFGSGNSSSLFPSFPRTSSETAAFAGARIDWKETPEAHVFKADVPGLKKEEVKVEVEDGNVLQISGERNKEQEEKTDTLAPRGAEQREVPAQVPTARERQDGADHGRHGERRAYSHCAEGGRQEA

SEQ ID NO: 2616 - protein, 149 aa, Zea mays subsp. mays
  peptide (1)..(149): Ceres Seq. ID no. 12343061
  misc_feature (1)..(102): Homolog of NCBI NO: 25044839 NR Description: class-1 LMW heat shock protein [Ananas comosus]
  misc_feature (1)..(101): Homolog of NCBI NO: 422000 NR Description: heat shock protein, low molecular weight (clone
  misc_feature (1)..(101): Homolog of NCBI NO: 34902028 NR Description: shock protein, low molecular weight
  misc_feature (1)..(101): Homolog of NCBI NO: 399937 NR Description: 17.4 KD CLASS I HEAT SHOCK PROTEIN
  misc_feature (1)..(101): Homolog of NCBI NO: 34902024 NR Description: unknown protein [Oryza sativa (japonica
  misc_feature (1)..(101): Homolog of NCBI NO: 1213073 NR Description: heat shock protein 17.8 [Oryza sativa]
  misc_feature (1)..(101): Homolog of NCBI NO: 2119194 NR Description: low-molecular-weight heat-shock protein - rice
  misc_feature (1)..(101): Homolog of NCBI NO: 34902026 NR Description: unknown protein [Oryza sativa (japonica
  misc_feature (1)..(101): Homolog of NCBI NO: 34902016 NR Description: putative class I low-molecular-weight heat shock
  misc_feature (1)..(102): Homolog of NCBI NO: 7441293 NR Description: heat shock protein 17.9 - pearl millet
MSLIRRSNVFDPFSLDLWDPFEGFPFGSGNSSSLFPSFPRTSSETAAFAGARIDWKETPEAHVFKADVPGLKKEEVKVEVEDGNVLQISGERNKEQEEKTDTLAPRGAEQREVPAQVPTARERQDGADHGRHGERRAYSHCAEGGRQEA

SEQ ID NO: 2617 - DNA, 1341 bp, Zea mays subsp. mays
  misc_feature (1)..(1341): Ceres Seq. ID no. 12352079
  misc_feature: MA Experiment ID: 108528 Result: Up-regulated in Transcription
  misc_feature: MA Experiment 108528 PARAMETER Experiment Name: Zm_Imbibed_Seeds_P Parameter: Age (day) Value: 5 vs. 2
  misc_feature: MA Experiment 108528 PARAMETER Experiment Name: Zm_Imbibed_Seeds_P Parameter: Organism Value: Zea mays
  misc_feature: MA Experiment 108528 PARAMETER Experiment Name: Zm_Imbibed_Seeds_P Parameter: Plant Line Value: 35A19
  misc_feature: MA Experiment 108528 PARAMETER Experiment Name: Zm_Imbibed_Seeds_P Parameter: Tissue Value: Aerial vs. Embryo
  misc_feature: MA Experiment ID: 108529 Result: Up-regulated in Transcription
  misc_feature: MA Experiment 108529 PARAMETER Experiment Name: Zm_Imbibed_Seeds_P Parameter: Age (day) Value: 5 vs. 2
  misc_feature: MA Experiment 108529 PARAMETER Experiment Name: Zm_Imbibed_Seeds_P Parameter: Organism Value: Zea mays
  misc_feature: MA Experiment 108529 PARAMETER Experiment Name: Zm_Imbibed_Seeds_P Parameter: Plant Line Value: 35A19
  misc_feature: MA Experiment 108529 PARAMETER Experiment Name: Zm_Imbibed_Seeds_P Parameter: Tissue Value: Roots vs. Embryo
  misc_feature: MA Experiment ID: 108530 Result: Up-regulated in Transcription
  misc_feature: MA Experiment 108530 PARAMETER Experiment Name: Zm_Imbibed_Seeds_P Parameter: Age (day) Value: 6 vs. 2
  misc_feature: MA Experiment 108530 PARAMETER Experiment Name: Zm_Imbibed_Seeds_P Parameter: Organism Value: Zea mays
  misc_feature: MA Experiment 108530 PARAMETER Experiment Name: Zm_Imbibed_Seeds_P Parameter: Plant Line Value: 35A19
  misc_feature: MA Experiment 108530 PARAMETER Experiment Name: Zm_Imbibed_Seeds_P Parameter: Tissue Value: Aerial vs. Embryo
  misc_feature: MA Experiment ID: 108535 Result: Down-regulated in Transcription
  misc_feature: MA Experiment 108535 PARAMETER Experiment Name: Zm_Meristem_P Parameter: Age (day) Value: 8
  misc_feature: MA Experiment 108535 PARAMETER Experiment Name: Zm_Meristem_P Parameter: Organism Value: Zea mays
  misc_feature: MA Experiment 108535 PARAMETER Experiment Name: Zm_Meristem_P Parameter: Plant Line Value: 35A19
  misc_feature: MA Experiment 108535 PARAMETER Experiment Name: Zm_Meristem_P Parameter: Tissue Value: Root Meristem vs. Above Root Meristem
  misc_feature: MA Experiment ID: 20000534 Result: Down-regulated in Transcription
  misc_feature: MA Experiment 20000534 PARAMETER Experiment Name: Zm_Hybrid_Pollen_P Parameter: Age (day) Value: 8
  misc_feature: MA Experiment 20000534 PARAMETER Experiment Name: Zm_Hybrid_Pollen_P Parameter: Organism Value: Zea mays
  misc_feature: MA Experiment 20000534 PARAMETER Experiment Name: Zm_Hybrid_Pollen_P Parameter: Plant Line Value: 35A19
  misc_feature: MA Experiment 20000534 PARAMETER Experiment Name: Zm_Hybrid_Pollen_P Parameter: Tissue Value: Pollen vs. Aerial
actgcaactctgcgagtgccagaaaaaaaatactgccacccaccaccgcgccgccgcgccatggcttccccatccccttcctcgcccctccacccgcaccagcacccacctcctccgaatgttcaccaccaattccaatccctaccgccttcgatgccgccaccgccgccgtcaacggcgctgccaaaggcgctcgaccttgaggttaccgtcgtctgcgggaagcacctgaagaatgtcaactggcgccgtggcgacctccgtgcctacgtcgtggtgtaccttgacccctcccgccgcgccgctacccgccccgacgacggcggcgggtgcaaaccaacctggaacgagcgcctcgtcctcccgcttccgccccacctctccccgcacgacccctccatcctcctgtccctcgacgttttccactctaagccctccgattcgcccaagccgctcgtcggatccgcccgctctcctctccgcgacctcctcttccccgcaaaccctaaccctagccacgatcccgcagcctccgctctcgtcagcctgccactcctccgcccttccggccgcccacaggggaagatccggatccgcgtcgccatccgcgagcgctcgccgccgcctccggagccgcaataccctccgccttccagctccccgtactactttccaccgcctcctcccgcctactcggccccgcctcagtacggatctgaccagtactatcgccctagtggatactactctgcacctgcacctccaccacatccgtatgagtacaccggagggccctctgcaccggtggactacaacaggcaatatgagcagagagggaggactggggcccgctggtagtggcagtgggaacggaaggtatggagcaggcactgggcttgcggtgggtgctgtggctggagccctcgggggtctagcaattgatgaagcggtgaagtacaaggaggataagggtgcagaacgggtggaagagaaggtggtacctgctgggagggatgattacagcgagtatcgtggcgactattgaaccgaagtttgtgtgagtgtggaagaaagcgctgtgagttgattcttcttccatgcctatgtgggaataaatccagtgttagtctatggctttccccatgtatgtatatatatttgtgatgttgtgaattattctgatacctataaactactccttcggttcttgtttatttgtcgctgtttagttcaaaaatgaactagcgggcgacaaatattcgagaacggaggtagtacaatgttttatgatgacagatttggtgtgtaacataaatatctcatggcttgctttgatggtgc

SEQ ID NO: 2618 - protein, 285 aa, Zea mays subsp. mays
  peptide (1)..(285): Ceres Seq. ID no. 12352080
  misc_feature (67)..(157): Pfam Name: C2 domain Pfam Description: C2 domain
  misc_feature (21)..(283): Homolog of NCBI NO: 34908388 NR Description: P0529E05.20 [Oryza sativa (japonica
  misc_feature (16)..(57): Homolog of NCBI NO: 7488673 NR Description: extensin homolog - soybean (fragment)
  misc_feature (122)..(269): Homolog of NCBI NO: 7488673 NR Description: extensin homolog - soybean (fragment)
  misc_feature (7)..(57): Homolog of NCBI NO: 11121504 NR Description: extensin [Nicotiana sylvestris]
  misc_feature (205)..(265): Homolog of NCBI NO: 11121504 NR Description: extensin [Nicotiana sylvestris]
  misc_feature (7)..(57): Homolog of NCBI NO: 7488673 NR Description: extensin homolog - soybean (fragment)
  misc_feature (122)..(265): Homolog of NCBI NO: 7488673 NR Description: extensin homolog - soybean (fragment)
  misc_feature (66)..(222): Homolog of NCBI NO: 30689212 NR Description: C2 domain-containing protein [Arabidopsis
  misc_feature (66)..(222): Homolog of NCBI NO: 10176862 NR Description: emb|CAB80929.1~gene_id:MRO11.1~similar to unknown
  misc_feature (65)..(282): Homolog of NCBI NO: 18390752 NR Description: extensin-related
TATLRVPEKKYCHPPPRRRAMASPSPSSPLHPHQHPPPPNVHHQFQSLPPSMPPPPPSTALPKALDLEVTVVCGKHLKNVNWRRGDLRAYVVVYLDPSRRAATRPDDGGGCKPTWNERLVLPLPPHLSPHDPSILLSLDVFHSKPSDSPKPLVGSARSPLRDLLFPANPNPSHDPAASALVSLPLLRPSGRPQGKIRIRVAIRERSPPPPEPQYPPPSSSPYYFPPPPPAYSAPPQYGSDQYYRPSGYYSAPAPPPHPYEYTGGPSAPVDYNRQYEQRGRTGARW

SEQ ID NO: 2619 - protein, 269 aa, Zea mays subsp. mays
  peptide (1)..(269): Ceres Seq. ID no. 12352081
  misc_feature (1)..(127): Pfam Name: Equine herpesvirus glycoprotein gp2 Pfam Description: Equine herpesvirus glycoprotein gp2
  misc_feature (1)..(170): Homolog of NCBI NO: 17221112 NR Description: glycoprotein gp2 [Equine herpesvirus 1]
  misc_feature (1)..(171): Homolog of NCBI NO: 17221114 NR Description: glycoprotein gp2 [Equine herpesvirus 1]
  misc_feature (5)..(104): Homolog of NCBI NO: 15230108 NR Description: protein kinase, putative; protein id: At3g24400.1
  misc_feature (16)..(155): Homolog of NCBI NO: 15230108 NR Description: protein kinase, putative; protein id: At3g24400.1
  misc_feature (18)..(126): Homolog of NCBI NO: 15230108 NR Description: protein kinase, putative; protein id: At3g24400.1
  misc_feature (20)..(112): Homolog of NCBI NO: 15233976 NR Description: extensin-like protein; protein id: At4g18670.1
  misc_feature (2)..(112): Homolog of NCBI NO: 15233976 NR Description: extensin-like protein; protein id: At4g18670.1
  misc_feature (54)..(266): Homolog of NCBI NO: 34908388 NR Description: P0529E05.20 [Oryza sativa (japonica
  misc_feature (205)..(261): Homolog of NCBI NO: 30689212 NR Description: C2 domain-containing protein [Arabidopsis
  misc_feature (205)..(261): Homolog of NCBI NO: 10176862 NR Description: emb|CAB80929.1~gene_id:MRO11.1~similar to unknown
MSTGAVATSVPTSWCTLTPPAAPLPAPTTAAGANQPGTSASSSRFRPTSPRTTPPSSCPSTFSTLSPPIRPSRSSDPPALLSATSSSPQTLTLATIPQPPLSSACHSSALPAAHRGRSGSASPSASARRRLRSRNTLRLPAPRTTFHRLLPPTRPRLSTDLTSTIALVDTTLHLHLHHIRMSTPEGPLHRWTTTGNMSREGGLGPAGSGSGNGRYGAGTGLAVGAVAGALGGLAIDEAVKYKEDKGAERVEEKVVPAGRDDYSEYRGDY

SEQ ID NO: 2620 - protein, 265 aa, Zea mays subsp. mays
  peptide (1)..(265): Ceres Seq. ID no. 12352082
  misc_feature (47)..(137): Pfam Name: C2 domain Pfam Description: C2 domain
  misc_feature (1)..(37): Homolog of NCBI NO: 7488673 NR Description: extensin homolog - soybean (fragment)
  misc_feature (102)..(249): Homolog of NCBI NO: 7488673 NR Description: extensin homolog - soybean (fragment)
  misc_feature (1)..(37): Homolog of NCBI NO: 11121504 NR Description: extensin [Nicotiana sylvestris]
  misc_feature (185)..(245): Homolog of NCBI NO: 11121504 NR Description: extensin [Nicotiana sylvestris]
  misc_feature (1)..(37): Homolog of NCBI NO: 7488673 NR Description: extensin homolog - soybean (fragment)
  misc_feature (102)..(245): Homolog of NCBI NO: 7488673 NR Description: extensin homolog - soybean (fragment)
  misc_feature (46)..(202): Homolog of NCBI NO: 30689212 NR Description: C2 domain-containing protein [Arabidopsis
  misc_feature (46)..(202): Homolog of NCBI NO: 10176862 NR Description: emb|CAB80929.1~gene_id:MRO11.1~similar to unknown
  misc_feature (45)..(262): Homolog of NCBI NO: 18390752 NR Description: extensin-related
  misc_feature (1)..(263): Homolog of NCBI NO: 34908388 NR Description: P0529E05.20 [Oryza sativa (japonica
MASPSPSSPLHPHQHPPPPNVHHQFQSLPPSMPPPPPSTALPKALDLEVTVVCGKHLKNVNWRRGDLRAYVVVYLDPSRRAATRPDDGGGCKPTWNERLVLPLPPHLSPHDPSILLSLDVFHSKPSDSPKPLVGSARSPLRDLLFPANPNPSHDPAASALVSLPLLRPSGRPQGKIRIRVAIRERSPPPPEPQYPPPSSSPYYFPPPPPAYSAPPQYGSDQYYRPSGYYSAPAPPPHPYEYTGGPSAPVDYNRQYEQRGRTGARW

SEQ ID NO: 2621 - DNA, 1571 bp, Zea mays subsp. mays
  misc_feature (1)..(1571): Ceres Seq. ID no. 12345899
  misc_feature: MA Experiment ID: 108523 Result: Down-regulated in Transcription
  misc_feature: MA Experiment 108523 PARAMETER Experiment Name: Zm_42deg_Heat_P Parameter: Age (day) Value: 8
  misc_feature: MA Experiment 108523 PARAMETER Experiment Name: Zm_42deg_Heat_P Parameter: Organism Value: Zea mays
  misc_feature: MA Experiment 108523 PARAMETER Experiment Name: Zm_42deg_Heat_P Parameter: Plant Line Value: 35A19
  misc_feature: MA Experiment 108523 PARAMETER Experiment Name: Zm_42deg_Heat_P Parameter: Temperature (deg C) Value: 42 vs. 22
  misc_feature: MA Experiment 108523 PARAMETER Experiment Name: Zm_42deg_Heat_P Parameter: Timepoint (hr) Value: 6
  misc_feature: MA Experiment 108523 PARAMETER Experiment Name: Zm_42deg_Heat_P Parameter: Tissue Value: Aerial
  misc_feature: MA Experiment ID: 108529 Result: Down-regulated in Transcription
  misc_feature: MA Experiment 108529 PARAMETER Experiment Name: Zm_Imbibed_Seeds_P Parameter: Age (day) Value: 5 vs. 2
  misc_feature: MA Experiment 108529 PARAMETER Experiment Name: Zm_Imbibed_Seeds_P Parameter: Organism Value: Zea mays
  misc_feature: MA Experiment 108529 PARAMETER Experiment Name: Zm_Imbibed_Seeds_P Parameter: Plant Line Value: 35A19
  misc_feature: MA Experiment 108529 PARAMETER Experiment Name: Zm_Imbibed_Seeds_P Parameter: Tissue Value: Roots vs. Embryo
  misc_feature: MA Experiment ID: 108543 Result: Up-regulated in Transcription
  misc_feature: MA Experiment ID: 108545 Result: Up-regulated in Transcription
  misc_feature: MA Experiment 108545 PARAMETER Experiment Name: Zm_Imbibed_Seeds_P Parameter: Age (day) Value: 3 vs. 2
  misc_feature: MA Experiment 108545 PARAMETER Experiment Name: Zm_Imbibed_Seeds_P Parameter: Organism Value: Zea mays
  misc_feature: MA Experiment 108545 PARAMETER Experiment Name: Zm_Imbibed_Seeds_P Parameter: Plant Line Value: 35A19
  misc_feature: MA Experiment 108545 PARAMETER Experiment Name: Zm_Imbibed_Seeds_P Parameter: Tissue Value: Aerial vs. Embryo
  misc_feature: MA Experiment ID: 108546 Result: Down-regulated in Transcription
  misc_feature: MA Experiment 108546 PARAMETER Experiment Name: Zm_Imbibed_Seeds_P Parameter: Age (day) Value: 3 vs. 2
  misc_feature: MA Experiment 108546 PARAMETER Experiment Name: Zm_Imbibed_Seeds_P Parameter: Organism Value: Zea mays
  misc_feature: MA Experiment 108546 PARAMETER Experiment Name: Zm_Imbibed_Seeds_P Parameter: Plant Line Value: 35A19
  misc_feature: MA Experiment 108546 PARAMETER Experiment Name: Zm_Imbibed_Seeds_P Parameter: Tissue Value: Roots vs. Embryo
  misc_feature: MA Experiment ID: 20000477 Result: Down-regulated in Transcription
  misc_feature: MA Experiment 20000477 PARAMETER Experiment Name: Zm_5mM_SA_P Parameter: Age (day) Value: 10
  misc_feature: MA Experiment 20000477 PARAMETER Experiment Name: Zm_5mM_SA_P Parameter: Organism Value: Zea mays
  misc_feature: MA Experiment 20000477 PARAMETER Experiment Name: Zm_5mM_SA_P Parameter: Plant Line Value: 35A19
  misc_feature: MA Experiment 20000477 PARAMETER Experiment Name: Zm_5mM_SA_P Parameter: Timepoint (hr) Value: 48
  misc_feature: MA Experiment 20000477 PARAMETER Experiment Name: Zm_5mM_SA_P Parameter: Tissue Value: Aerial
  misc_feature: MA Experiment 20000477 PARAMETER Experiment Name: Zm_5mM_SA_P Parameter: Treatment Value: 5mM SA vs. No Treatment
  misc_feature: MA Experiment ID: 20000478 Result: Down-regulated in Transcription
  misc_feature: MA Experiment 20000478 PARAMETER Experiment Name: Zm_5mM_SA_P Parameter: Age (day) Value: 11
  misc_feature: MA Experiment 20000478 PARAMETER Experiment Name: Zm_5mM_SA_P Parameter: Organism Value: Zea mays
  misc_feature: MA Experiment 20000478 PARAMETER Experiment Name: Zm_5mM_SA_P Parameter: Plant Line Value: 35A19
  misc_feature: MA Experiment 20000478 PARAMETER Experiment Name: Zm_5mM_SA_P Parameter: Timepoint (hr) Value: 72
  misc_feature: MA Experiment 20000478 PARAMETER Experiment Name: Zm_5mM_SA_P Parameter: Tissue Value: Aerial
  misc_feature: MA Experiment 20000478 PARAMETER Experiment Name: Zm_5mM_SA_P Parameter: Treatment Value: 5mM SA vs. No Treatment
  misc_feature: MA Experiment ID: 20000479 Result: Down-regulated in Transcription
  misc_feature: MA Experiment 20000479 PARAMETER Experiment Name: Zm_Drought_P Parameter: Age (day) Value: 10
  misc_feature: MA Experiment 20000479 PARAMETER Experiment Name: Zm_Drought_P Parameter: Organism Value: Zea mays
  misc_feature: MA Experiment 20000479 PARAMETER Experiment Name: Zm_Drought_P Parameter: Plant Line Value: 35A19
  misc_feature: MA Experiment 20000479 PARAMETER Experiment Name: Zm_Drought_P Parameter: Timepoint (hr) Value: 48
  misc_feature: MA Experiment 20000479 PARAMETER Experiment Name: Zm_Drought_P Parameter: Tissue Value: Aerial
  misc_feature: MA Experiment 20000479 PARAMETER Experiment Name: Zm_Drought_P Parameter: Treatment Value: Drought vs. No Drought
  misc_feature: MA Experiment ID: 20000492 Result: Up-regulated in Transcription
  misc_feature: MA Experiment 20000492 PARAMETER Experiment Name: Zm_Hybrid_Seed_Dev_P Parameter: DAP Value: 12
  misc_feature: MA Experiment 20000492 PARAMETER Experiment Name: Zm_Hybrid_Seed_Dev_P Parameter: Organism Value: Zea mays
  misc_feature: MA Experiment 20000492 PARAMETER Experiment Name: Zm_Hybrid_Seed_Dev_P Parameter: Plant Line Value: 35A19
  misc_feature: MA Experiment 20000492 PARAMETER Experiment Name: Zm_Hybrid_Seed_Dev_P Parameter: Tissue Value: Fert Kernel vs. Unfert Floret
  misc_feature: MA Experiment ID: 20001613 Result: Down-regulated in Transcription
  misc_feature: MA Experiment 20001613 PARAMETER Experiment Name: Zm_50ppm_KNO3_L-to-H_P Parameter: Age (day) Value: 20
  misc_feature: MA Experiment 20001613 PARAMETER Experiment Name: Zm_50ppm_KNO3_L-to-H_P Parameter: Organism Value: Zea mays
  misc_feature: MA Experiment 20001613 PARAMETER Experiment Name: Zm_50ppm_KNO3_L-to-H_P Parameter: Plant Line Value: 35A19
  misc_feature: MA Experiment 20001613 PARAMETER Experiment Name: Zm_50ppm_KNO3_L-to-H_P Parameter: Timepoint (hr) Value: 24
  misc_feature: MA Experiment 20001613 PARAMETER Experiment Name: Zm_50ppm_KNO3_L-to-H_P Parameter: Tissue Value: Roots
  misc_feature: MA Experiment 20001613 PARAMETER Experiment Name: Zm_50ppm_KNO3_L-to-H_P Parameter: Treatment Value: 50ppm KNO3 vs. 50ppm KCl
aacacatcacaagagagccaagggctagccgatcaacaacaccactagcctctcctatcctagctagctagcttccaccggccggaagaaaaaaaaatggtggcgagcaaggccgccccgttcgacgaggtgtcctcggtggaggcgggggcctacgggggccgcgacgacgacgggcggccgcgccggacgggcacggtgtggacggccagcgcccacattatcacggccgtcatcggctccggggtgctctcgctggcgtgggccatcgcgcagctgggctgggccgcgggccccgccgtcatgctgctcttcgccgtcgtcatctactacacctccacgctgctcgccgagtgctaccgctccggcgacccagtggcggggaagcgcaactacacctacatggacgccgtccgcgcaagcctcggcggcgccaagcgccatcaagagggcggactgcttccacgccaagggccacaagcacgcgtgccgcagctccagcaacccctacatgatcctcttcggcgtcgccgaggtcgtcttctcgcagataccggacttcgaccagatttggtggctctccatcgtcgccgccgtcatgtccttcacctacgccaccatcggcctcgtcctcggcatcatgcagaccgtcgccaacgggggcttccagggcagcctcaccgggatcagcatcggcgccggcgtcaccccgacggagaaggtctggcggagcctgcaggccttcggcaacatcgccttcgcctattcctactccatcatcctcatcgagatccaggacacggtcaaggcgccgccgccatccgaggccaaggtgatgaagagggcgaccatggtgagcgtggccaccacaacggtgttctacatgctgtgcgggtgcatgggctacgccgccttcggcgacgccgcgccggacaacctcctcaccggcttcggcttctacgagcccttctggctgctggacatcgccaacgtcgccatcgtcgtgcacctcgtcggcgcctaccaggtcttctgccagccgctcttcgccttcgtcgagaagtgggcagcggccacgtggcccgacagcgccttcatcgcccgggagttccgcgtgggccccttcgcgctcagcctgttccgcctcacctggcgcacggcgttcgtgtgcctcaccaccgtcgccgccatgctgctccccttcttcggcgacgtcgtcggcctgctcggcgccgtctccttctggccgctcaccgtctacttccccatcgagatgtacgtcgtgcagcgcgccgtgcgcaggtggagcacgcactggatctgcctccagatgctcagcgctgcgtgcctcctcgtgtccgtcgccgccgcagcgggctccatcgccgacgtcatcggcgcgctcaaggtgtaccgcccgttcagcggctagttcagataggggcccaacgaggcgtgtgccgtgcacatgagtagtgccagtggtatctctactggtcggggtgctacattgactgtggggtcccgggttgttgtaacttgtaagatatagccaaatgaaaaacaaagct

SEQ ID NO: 2622 - protein, 459 aa, Zea mays subsp. mays
  peptide (1)..(459): Ceres Seq. ID no. 12345900
  misc_feature (135)..(203): Pfam Name: Sperm histone P2 Pfam Description: Sperm histone P2
  misc_feature (24)..(112): Homolog of NCBI NO: 608671 NR Description: amino acid transporter [Arabidopsis thaliana]
  misc_feature (24)..(112): Homolog of NCBI NO: 15237539 NR Description: amino acid transporter AAP4 (pir||S51169)
  misc_feature (24)..(112): Homolog of NCBI NO: 20260650 NR Description: amino acid transporter AAP4 [Arabidopsis
  misc_feature (24)..(114): Homolog of NCBI NO: 21536895 NR Description: amino acid transport protein AAP2 [Arabidopsis
  misc_feature (24)..(114): Homolog of NCBI NO: 15242347 NR Description: amino acid transport protein AAP2
  misc_feature (24)..(112): Homolog of NCBI NO: 27447657 NR Description: amino acid transporter [Lycopersicon esculentum]
  misc_feature (12)..(114): Homolog of NCBI NO: 15223930 NR Description: amino acid carrier, putative
  misc_feature (12)..(114): Homolog of NCBI NO: 21553710 NR Description: amino acid carrier, putative [Arabidopsis
  misc_feature (9)..(114): Homolog of NCBI NO: 7442735 NR Description: amino acid transport protein AAP1 - castor bean
  misc_feature (6)..(114): Homolog of NCBI NO: 20161442 NR Description: putative amino acid transport protein
MVASKAAPFDEVSSVEAGAYGGRDDDGRPRRTGTVWTASAHIITAVIGSGVLSLAWAIAQLGWAAGPAVMLLFAVVIYYTSTLLAECYRSGDPVAGKRNYTYMDAVRASLGGAKRHQEGGLLPRQGPQARVPQLQQPLHDPLRRRRGRLLADTGLRPDLVALHRRRRHVLHLRHHRPRPRHHADRRQRGLPGQPHRDQHRRRRHPDGEGLAEPAGLRQHRLRLFLLHHPHRDPGHGQGAAAIRGQGDEEGDHGERGHHNGVLHAVRVHGLRRLRRRRAGQPPHRLRLLRALLAAGHRQRRHRRAPRRRLPGLLPAALRLRREVGSGHVARQRLHRPGVPRGPLRAQPVPPHLAHGVRVPHHRRRHAAPLLRRRRRPARRRLLLAAHRLLPHRDVRRAARRAQVEHALDLPPDAQRCVPPRVRRRRSGLHRRRHRRAQGVPPVQRLVQIGAQRGVCRAHE

SEQ ID NO: 2623 - protein, 390 aa, Zea mays subsp. mays
  peptide (1)..(390): Ceres Seq. ID no. 12345901
  misc_feature (66)..(134): Pfam Name: Sperm histone P2 Pfam Description: Sperm histone P2
  misc_feature (1)..(43): Homolog of NCBI NO: 608671 NR Description: amino acid transporter [Arabidopsis thaliana]
  misc_feature (1)..(43): Homolog of NCBI NO: 15237539 NR Description: amino acid transporter AAP4 (pir||S51169)
  misc_feature (1)..(43): Homolog of NCBI NO: 20260650 NR Description: amino acid transporter AAP4 [Arabidopsis
  misc_feature (1)..(45): Homolog of NCBI NO: 21536895 NR Description: amino acid transport protein AAP2 [Arabidopsis
  misc_feature (1)..(45): Homolog of NCBI NO: 15242347 NR Description: amino acid transport protein AAP2
  misc_feature (1)..(43): Homolog of NCBI NO: 27447657 NR Description: amino acid transporter [Lycopersicon esculentum]
  misc_feature (1)..(45): Homolog of NCBI NO: 15223930 NR Description: amino acid carrier, putative
  misc_feature (1)..(45): Homolog of NCBI NO: 21553710 NR Description: amino acid carrier, putative [Arabidopsis
  misc_feature (1)..(45): Homolog of NCBI NO: 7442735 NR Description: amino acid transport protein AAP1 - castor bean
  misc_feature (1)..(45): Homolog of NCBI NO: 20161442 NR Description: putative amino acid transport protein
MLLFAVVIYYTSTLLAECYRSGDPVAGKRNYTYMDAVRASLGGAKRHQEGGLLPRQGPQARVPQLQQPLHDPLRRRRGRLLADTGLRPDLVALHRRRRHVLHLRHHRPRPRHHADRRQRGLPGQPHRDQHRRRRHPDGEGLAEPAGLRQHRLRLFLLHHPHRDPGHGQGAAAIRGQGDEEGDHGERGHHNGVLHAVRVHGLRRLRRRRAGQPPHRLRLLRALLAAGHRQRRHRRAPRRRLPGLLPAALRLRREVGSGHVARQRLHRPGVPRGPLRAQPVPPHLAHGVRVPHHRRRHAAPLLRRRRRPARRRLLLAAHRLLPHRDVRRAARRAQVEHALDLPPDAQRCVPPRVRRRRSGLHRRRHRRAQGVPPVQRLVQIGAQRGVCRAHE

SEQ ID NO: 2624 - protein, 357 aa, Zea mays subsp. mays
  peptide (1)..(357): Ceres Seq. ID no. 12345902
  misc_feature (33)..(101): Pfam Name: Sperm histone P2 Pfam Description: Sperm histone P2
  misc_feature (251)..(271): Homolog of NCBI NO: 34912696 NR Description: P0686E09.18 [Oryza sativa (japonica
  misc_feature (1)..(12): Homolog of NCBI NO: 15240523 NR Description: amino acid permease 6 (emb CAA65051.1); protein
  misc_feature (1)..(12): Homolog of NCBI NO: 608673 NR Description: amino acid permease [Arabidopsis thaliana]
  misc_feature (1)..(12): Homolog of NCBI NO: 21536895 NR Description: amino acid transport protein AAP2 [Arabidopsis
  misc_feature (1)..(12): Homolog of NCBI NO: 15242347 NR Description: amino acid transport protein AAP2
  misc_feature (1)..(12): Homolog of NCBI NO: 15223930 NR Description: amino acid carrier, putative
  misc_feature (1)..(12): Homolog of NCBI NO: 21553710 NR Description: amino acid carrier, putative [Arabidopsis
  misc_feature (1)..(12): Homolog of NCBI NO: 7442735 NR Description: amino acid transport protein AAP1 - castor bean
  misc_feature (1)..(12): Homolog of NCBI NO: 20161442 NR Description: putative amino acid transport protein
MDAVRASLGGAKRHQEGGLLPRQGPQARVPQLQQPLHDPLRRRRGRLLADTGLRPDLVALHRRRRHVLHLRHHRPRPRHHADRRQRGLPGQPHRDQHRRRRHPDGEGLAEPAGLRQHRLRLFLLHHPHRDPGHGQGAAAIRGQGDEEGDHGERGHHNGVLHAVRVHGLRRLRRRRAGQPPHRLRLLRALLAAGHRQRRHRRAPRRRLPGLLPAALRLRREVGSGHVARQRLHRPGVPRGPLRAQPVPPHLAHGVRVPHHRRRHAAPLLRRRRRPARRRLLLAAHRLLPHRDVRRAARRAQVEHALDLPPDAQRCVPPRVRRRRSGLHRRRHRRAQGVPPVQRLVQIGAQRGVCRAHE

SEQ ID NO: 2625 - protein, 306 aa, Zea mays subsp. mays
  peptide (1)..(306): Ceres Seq. ID no. 12345903
  misc_feature (1)..(304): Homolog of NCBI NO: 608671 NR Description: amino acid transporter [Arabidopsis thaliana]
  misc_feature (1)..(304): Homolog of NCBI NO: 15237539 NR Description: amino acid transporter AAP4 (pir||S51169)
  misc_feature (1)..(304): Homolog of NCBI NO: 20260650 NR Description: amino acid transporter AAP4 [Arabidopsis
  misc_feature (1)..(304): Homolog of NCBI NO: 21536895 NR Description: amino acid transport protein AAP2 [Arabidopsis
  misc_feature (1)..(304): Homolog of NCBI NO: 15242347 NR Description: amino acid transport protein AAP2
  misc_feature (1)..(304): Homolog of NCBI NO: 27447657 NR Description: amino acid transporter [Lycopersicon esculentum]
  misc_feature (1)..(304): Homolog of NCBI NO: 15223930 NR Description: amino acid carrier, putative
  misc_feature (1)..(304): Homolog of NCBI NO: 21553710 NR Description: amino acid carrier, putative [Arabidopsis
  misc_feature (1)..(304): Homolog of NCBI NO: 7442735 NR Description: amino acid transport protein AAP1 - castor bean
  misc_feature (1)..(306): Homolog of NCBI NO: 20161442 NR Description: putative amino acid transport protein
MILFGVAEVVFSQIPDFDQIWWLSIVAAVMSFTYATIGLVLGIMQTVANGGFQGSLTGISIGAGVTPTEKVWRSLQAFGNIAFAYSYSIILIEIQDTVKAPPPSEAKVMKRATMVSVATTTVFYMLCGCMGYAAFGDAAPDNLLTGFGFYEPFWLLDIANVAIVVHLVGAYQVFCQPLFAFVEKWAAATWPDSAFIAREFRVGPFALSLFRLTWRTAFVCLTTVAAMLLPFFGDVVGLLGAVSFWPLTVYFPIEMYVVQRAVRRWSTHWICLQMLSAACLLVSVAAAAGSIADVIGALKVYRPFSG

SEQ ID NO: 2626 - DNA, 1601 bp, Zea mays subsp. mays
  misc_feature (1)..(1601): Ceres Seq. ID no. 12358266
  misc_feature: MA Experiment ID: 108543 Result: Up-regulated in Transcription
  misc_feature: MA Experiment ID: 108546 Result: Up-regulated in Transcription
  misc_feature: MA Experiment 108546 PARAMETER Experiment Name: Zm_Imbibed_Seeds_P Parameter: Age (day) Value: 3 vs. 2
  misc_feature: MA Experiment 108546 PARAMETER Experiment Name: Zm_Imbibed_Seeds_P Parameter: Organism Value: Zea mays
  misc_feature: MA Experiment 108546 PARAMETER Experiment Name: Zm_Imbibed_Seeds_P Parameter: Plant Line Value: 35A19
  misc_feature: MA Experiment 108546 PARAMETER Experiment Name: Zm_Imbibed_Seeds_P Parameter: Tissue Value: Roots vs. Embryo
  misc_feature: MA Experiment ID: 108689 Result: Down-regulated in Transcription
  misc_feature: MA Experiment 108689 PARAMETER Experiment Name: Zm_Drought_Roots_P Parameter: Age (day) Value: 9
  misc_feature: MA Experiment 108689 PARAMETER Experiment Name: Zm_Drought_Roots_P Parameter: Organism Value: Zea mays
  misc_feature: MA Experiment 108689 PARAMETER Experiment Name: Zm_Drought_Roots_P Parameter: Plant Line Value: 35A19
  misc_feature: MA Experiment 108689 PARAMETER Experiment Name: Zm_Drought_Roots_P Parameter: Timepoint (hr) Value: 24
  misc_feature: MA Experiment 108689 PARAMETER Experiment Name: Zm_Drought_Roots_P Parameter: Tissue Value: Roots
  misc_feature: MA Experiment 108689 PARAMETER Experiment Name: Zm_Drought_Roots_P Parameter: Treatment Value: Drought vs. No Drought
  misc_feature: MA Experiment ID: 20000478 Result: Down-regulated in Transcription
  misc_feature: MA Experiment 20000478 PARAMETER Experiment Name: Zm_5mM_SA_P Parameter: Age (day) Value: 11
  misc_feature: MA Experiment 20000478 PARAMETER Experiment Name: Zm_5mM_SA_P Parameter: Organism Value: Zea mays
  misc_feature: MA Experiment 20000478 PARAMETER Experiment Name: Zm_5mM_SA_P Parameter: Plant Line Value: 35A19
  misc_feature: MA Experiment 20000478 PARAMETER Experiment Name: Zm_5mM_SA_P Parameter: Timepoint (hr) Value: 72
  misc_feature: MA Experiment 20000478 PARAMETER Experiment Name: Zm_5mM_SA_P Parameter: Tissue Value: Aerial
  misc_feature: MA Experiment 20000478 PARAMETER Experiment Name: Zm_5mM_SA_P Parameter: Treatment Value: 5mM SA vs. No Treatment
  misc_feature: MA Experiment ID: 20000479 Result: Down-regulated in Transcription
  misc_feature: MA Experiment 20000479 PARAMETER Experiment Name: Zm_Drought_P Parameter: Age (day) Value: 10
  misc_feature: MA Experiment 20000479 PARAMETER Experiment Name: Zm_Drought_P Parameter: Organism Value: Zea mays
  misc_feature: MA Experiment 20000479 PARAMETER Experiment Name: Zm_Drought_P Parameter: Plant Line Value: 35A19
  misc_feature: MA Experiment 20000479 PARAMETER Experiment Name: Zm_Drought_P Parameter: Timepoint (hr) Value: 48
  misc_feature: MA Experiment 20000479 PARAMETER Experiment Name: Zm_Drought_P Parameter: Tissue Value: Aerial
  misc_feature: MA Experiment 20000479 PARAMETER Experiment Name: Zm_Drought_P Parameter: Treatment Value: Drought vs. No Drought
  misc_feature: MA Experiment ID: 20000480 Result: Down-regulated in Transcription
  misc_feature: MA Experiment 20000480 PARAMETER Experiment Name: Zm_Drought_P Parameter: Age (day) Value: 11
  misc_feature: MA Experiment 20000480 PARAMETER Experiment Name: Zm_Drought_P Parameter: Organism Value: Zea mays
  misc_feature: MA Experiment 20000480 PARAMETER Experiment Name: Zm_Drought_P Parameter: Plant Line Value: 35A19
  misc_feature: MA Experiment 20000480 PARAMETER Experiment Name: Zm_Drought_P Parameter: Timepoint (hr) Value: 72
  misc_feature: MA Experiment 20000480 PARAMETER Experiment Name: Zm_Drought_P Parameter: Tissue Value: Aerial
  misc_feature: MA Experiment 20000480 PARAMETER Experiment Name: Zm_Drought_P Parameter: Treatment Value: Drought vs. No Drought
  misc_feature: MA Experiment ID: 20000492 Result: Down-regulated in Transcription
  misc_feature: MA Experiment 20000492 PARAMETER Experiment Name: Zm_Hybrid_Seed_Dev_P Parameter: DAP Value: 12
  misc_feature: MA Experiment 20000492 PARAMETER Experiment Name: Zm_Hybrid_Seed_Dev_P Parameter: Organism Value: Zea mays
  misc_feature: MA Experiment 20000492 PARAMETER Experiment Name: Zm_Hybrid_Seed_Dev_P Parameter: Plant Line Value: 35A19
  misc_feature: MA Experiment 20000492 PARAMETER Experiment Name: Zm_Hybrid_Seed_Dev_P Parameter: Tissue Value: Fert Kernel vs. Unfert Floret
  misc_feature: MA Experiment ID: 20000535 Result: Down-regulated in Transcription
  misc_feature: MA Experiment 20000535 PARAMETER Experiment Name: Zm_Hybrid_Seed_Dev_P Parameter: DAP Value: 30 vs. 12
  misc_feature: MA Experiment 20000535 PARAMETER Experiment Name: Zm_Hybrid_Seed_Dev_P Parameter: Organism Value: Zea mays
  misc_feature: MA Experiment 20000535 PARAMETER Experiment Name: Zm_Hybrid_Seed_Dev_P Parameter: Plant Line Value: 35A19
  misc_feature: MA Experiment 20000535 PARAMETER Experiment Name: Zm_Hybrid_Seed_Dev_P Parameter: Tissue Value: Embryo vs. Unfert Floret
atccacttcgcccgcccgcccgctgcctgactgccattattgcctcccggtcttcgctgtccatccgaccgtccgtggcttctccctccggtccccgctacccgccccgccccgccgagaagcttcgggctagctagcaagctagctagccacctacccgtgctttggttcggttggttggcgccatagccattgccgaggagcgagggagcagccgggcgggcagtcaggaggcggtgagtaagcatgctgggagcgagccccaggggcaggaaggccgccgcgccgccggtgaagctggggtcggcgaaggaggcgccggcggccggtggagctggaggagggagcggcggcaaggtgctggcggaggaggtgtgggaggtgcggcccggcgggatgctggtgcagaagaggggcggcggcgacgacgagccgtcgcccaacgtgaagcccgtgcccaccatccgggtcaaggtcaagcacgccggcgtcacgcacgagatctacatcagttccgaggcctccttcggggagctgaagaagctggtggccgccaagacggggctgcaccccgacgaccagaaggtgctgtacaaggacagggagcgtgactccaaggcgttcctggacacggccggcgtcagggaccgctccaaggtggtggtgctggaggaccccgaggcccgcgcgcgccgcctcatcggggagcgccgcagcggccacctccagaaggccgccagggccgtcgccgcggtcaccgccgaggtcgacaagctggcacccaaggtggcggcgttggacgcgtcggtgcgcaggggggagaaggtcgcggagaaggatgtggtgcaggtgacggagctgctaatgaacgagctgctcaggctcgacgccgtggtcgcggacggcgacgtcaaggcgcagaggcggatgcaggtgaagcgcgtccagaagtacgtggagacgctggacgcggtggcggccaagaacgccgccctcgtcggcaagtccggcgagaaggccgcggccaagccggcgccggcgccggcgccggccccggccccgccgccgcggcagcagggacaggggcagacgcggtgggagatgttcgacctgctgtcgtcgctgccgtccacgtcctcggcctcgtcaacgacgaccgtgagctccacggcgtcctccggcgcgccgccgccgagccgcccggactggatgctcttctgacgagggagggacggcggccccgcaccggccggccaccggcgcgaaagcgaaaggcgagtgcttgatgcggtgcgatgcttgtgtgccaaaaattgcaccccaaatctggtagctcgtcgagtgtcctgatgaggccatgattgggcaggcggggggctatctagctttgggccacacagctgcattgcgttgggctgcatggtaccgtaccagccaattcgagttcatcaatcatgtggtgtgagagtattttttttcttcttcacctctcctttttctttccttccttttgagtttttttttccttctcctcctcctcctcttcttcttcttgttcatggaaggtttgggattcttttggagtgcatactatactattc

SEQ ID NO: 2627 - protein, 324 aa, Zea mays subsp. mays
  peptide (1)..(324): Ceres Seq. ID no. 12358267
  misc_feature (163)..(243): Pfam Name: BAG domain Pfam Description: BAG domain
  misc_feature (45)..(248): Homolog of NCBI NO: 30697627 NR Description: BAG domain containing protein [Arabidopsis
  misc_feature (45)..(248): Homolog of NCBI NO: 21553443 NR Description: unknown [Arabidopsis thaliana]
  misc_feature (23)..(250): Homolog of NCBI NO: 6624711 NR Description: hypothetical protein [Oryza sativa (indica
  misc_feature (23)..(250): Homolog of NCBI NO: 38344334 NR Description: OSJNBa0058K23.16 [Oryza sativa (japonica
  misc_feature (45)..(298): Homolog of NCBI NO: 30697630 NR Description: BAG domain containing protein [Arabidopsis
  misc_feature (31)..(318): Homolog of NCBI NO: 15240726 NR Description: putative protein
  misc_feature (31)..(318): Homolog of NCBI NO: 21537107 NR Description: unknown [Arabidopsis thaliana]
  misc_feature (29)..(261): Homolog of NCBI NO: 15242267 NR Description: putative protein; protein id: At5g52060.1
  misc_feature (10)..(324): Homolog of NCBI NO: 34898024 NR Description: ESTs AU082174(S13676),AU032395(R3986) correspond a region of the predicted gene.~Similar to Arabidopsis thaliana
  misc_feature (1)..(324): Homolog of NCBI NO: 25553557 NR Description: OSJNBa0038F22.4 [Oryza sativa (japonica
MLGASPRGRKAAAPPVKLGSAKEAPAAGGAGGGSGGKVLAEEVWEVRPGGMLVQKRGGGDDEPSPNVKPVPTIRVKVKHAGVTHEIYISSEASFGELKKLVAAKTGLHPDDQKVLYKDRERDSKAFLDTAGVRDRSKVVVLEDPEARARRLIGERRSGHLQKAARAVAAVTAEVDKLAPKVAALDASVRRGEKVAEKDVVQVTELLMNELLRLDAVVADGDVKAQRRMQVKRVQKYVETLDAVAAKNAALVGKSGEKAAAKPAPAPAPAPAPPPRQQGQGQTRWEMFDLLSSLPSTSSASSTTTVSSTASSGAPPPSRPDWMLF

SEQ ID NO: 2628 - protein, 274 aa, Zea mays subsp. mays
  peptide (1)..(274): Ceres Seq. ID no. 12358268
  misc_feature (113)..(193): Pfam Name: BAG domain Pfam Description: BAG domain
  misc_feature (1)..(198): Homolog of NCBI NO: 30697627 NR Description: BAG domain containing protein [Arabidopsis
  misc_feature (1)..(198): Homolog of NCBI NO: 21553443 NR Description: unknown [Arabidopsis thaliana]
  misc_feature (1)..(200): Homolog of NCBI NO: 6624711 NR Description: hypothetical protein [Oryza sativa (indica
  misc_feature (1)..(200): Homolog of NCBI NO: 38344334 NR Description: OSJNBa0058K23.16 [Oryza sativa (japonica
  misc_feature (1)..(248): Homolog of NCBI NO: 30697630 NR Description: BAG domain containing protein [Arabidopsis
  misc_feature (1)..(268): Homolog of NCBI NO: 15240726 NR Description: putative protein
  misc_feature (1)..(268): Homolog of NCBI NO: 21537107 NR Description: unknown [Arabidopsis thaliana]
  misc_feature (1)..(211): Homolog of NCBI NO: 15242267 NR Description: putative protein; protein id: At5g52060.1
  misc_feature (1)..(274): Homolog of NCBI NO: 34898024 NR Description: ESTs AU082174(S13676),AU032395(R3986) correspond a region of the predicted gene.~Similar to Arabidopsis thaliana
  misc_feature (1)..(274): Homolog of NCBI NO: 25553557 NR Description: OSJNBa0038F22.4 [Oryza sativa (japonica
MLVQKRGGGDDEPSPNVKPVPTIRVKVKHAGVTHEIYISSEASFGELKKLVAAKTGLHPDDQKVLYKDRERDSKAFLDTAGVRDRSKVVVLEDPEARARRLIGERRSGHLQKAARAVAAVTAEVDKLAPKVAALDASVRRGEKVAEKDVVQVTELLMNELLRLDAVVADGDVKAQRRMQVKRVQKYVETLDAVAAKNAALVGKSGEKAAAKPAPAPAPAPAPPPRQQGQGQTRWEMFDLLSSLPSTSSASSTTTVSSTASSGAPPPSRPDWMLF

SEQ ID NO: 2629 - DNA, 1325 bp, Zea mays subsp. mays
  misc_feature (1)..(1325): Ceres Seq. ID no. 12410620
  misc_feature: MA Experiment ID: 108523 Result: Down-regulated in Transcription
  misc_feature: MA Experiment 108523 PARAMETER Experiment Name: Zm_42deg_Heat_P Parameter: Age (day) Value: 8
  misc_feature: MA Experiment 108523 PARAMETER Experiment Name: Zm_42deg_Heat_P Parameter: Organism Value: Zea mays
  misc_feature: MA Experiment 108523 PARAMETER Experiment Name: Zm_42deg_Heat_P Parameter: Plant Line Value: 35A19
  misc_feature: MA Experiment 108523 PARAMETER Experiment Name: Zm_42deg_Heat_P Parameter: Temperature (deg C) Value: 42 vs. 22
  misc_feature: MA Experiment 108523 PARAMETER Experiment Name: Zm_42deg_Heat_P Parameter: Timepoint (hr) Value: 6
  misc_feature: MA Experiment 108523 PARAMETER Experiment Name: Zm_42deg_Heat_P Parameter: Tissue Value: Aerial
  misc_feature: MA Experiment ID: 108528 Result: Up-regulated in Transcription
  misc_feature: MA Experiment 108528 PARAMETER Experiment Name: Zm_Imbibed_Seeds_P Parameter: Age (day) Value: 5 vs. 2
  misc_feature: MA Experiment 108528 PARAMETER Experiment Name: Zm_Imbibed_Seeds_P Parameter: Organism Value: Zea mays
  misc_feature: MA Experiment 108528 PARAMETER Experiment Name: Zm_Imbibed_Seeds_P Parameter: Plant Line Value: 35A19
  misc_feature: MA Experiment 108528 PARAMETER Experiment Name: Zm_Imbibed_Seeds_P Parameter: Tissue Value: Aerial vs. Embryo
  misc_feature: MA Experiment ID: 108529 Result: Down-regulated in Transcription
  misc_feature: MA Experiment 108529 PARAMETER Experiment Name: Zm_Imbibed_Seeds_P Parameter: Age (day) Value: 5 vs. 2
  misc_feature: MA Experiment 108529 PARAMETER Experiment Name: Zm_Imbibed_Seeds_P Parameter: Organism Value: Zea mays
  misc_feature: MA Experiment 108529 PARAMETER Experiment Name: Zm_Imbibed_Seeds_P Parameter: Plant Line Value: 35A19
  misc_feature: MA Experiment 108529 PARAMETER Experiment Name: Zm_Imbibed_Seeds_P Parameter: Tissue Value: Roots vs. Embryo
  misc_feature: MA Experiment ID: 108530 Result: Up-regulated in Transcription
  misc_feature: MA Experiment 108530 PARAMETER Experiment Name: Zm_Imbibed_Seeds_P Parameter: Age (day) Value: 6 vs. 2
  misc_feature: MA Experiment 108530 PARAMETER Experiment Name: Zm_Imbibed_Seeds_P Parameter: Organism Value: Zea mays
  misc_feature: MA Experiment 108530 PARAMETER Experiment Name: Zm_Imbibed_Seeds_P Parameter: Plant Line Value: 35A19
  misc_feature: MA Experiment 108530 PARAMETER Experiment Name: Zm_Imbibed_Seeds_P Parameter: Tissue Value: Aerial vs. Embryo
  misc_feature: MA Experiment ID: 108536 Result: Down-regulated in Transcription
  misc_feature: MA Experiment 108536 PARAMETER Experiment Name: Zm_Meristem_P Parameter: Age (day) Value: 8
  misc_feature: MA Experiment 108536 PARAMETER Experiment Name: Zm_Meristem_P Parameter: Organism Value: Zea mays
  misc_feature: MA Experiment 108536 PARAMETER Experiment Name: Zm_Meristem_P Parameter: Plant Line Value: 35A19
  misc_feature: MA Experiment 108536 PARAMETER Experiment Name: Zm_Meristem_P Parameter: Tissue Value: Shoot Meristem vs. Above Shoot Meristem
  misc_feature: MA Experiment ID: 108543 Result: Up-regulated in Transcription
  misc_feature: MA Experiment ID: 108544 Result: Down-regulated in Transcription
  misc_feature: MA Experiment ID: 108545 Result: Up-regulated in Transcription
  misc_feature: MA Experiment 108545 PARAMETER Experiment Name: Zm_Imbibed_Seeds_P Parameter: Age (day) Value: 3 vs. 2
  misc_feature: MA Experiment 108545 PARAMETER Experiment Name: Zm_Imbibed_Seeds_P Parameter: Organism Value: Zea mays
  misc_feature: MA Experiment 108545 PARAMETER Experiment Name: Zm_Imbibed_Seeds_P Parameter: Plant Line Value: 35A19
  misc_feature: MA Experiment 108545 PARAMETER Experiment Name: Zm_Imbibed_Seeds_P Parameter: Tissue Value: Aerial vs. Embryo
  misc_feature: MA Experiment ID: 108546 Result: Down-regulated in Transcription
  misc_feature: MA Experiment 108546 PARAMETER Experiment Name: Zm_Imbibed_Seeds_P Parameter: Age (day) Value: 3 vs. 2
  misc_feature: MA Experiment 108546 PARAMETER Experiment Name: Zm_Imbibed_Seeds_P Parameter: Organism Value: Zea mays
  misc_feature: MA Experiment 108546 PARAMETER Experiment Name: Zm_Imbibed_Seeds_P Parameter: Plant Line Value: 35A19
  misc_feature: MA Experiment 108546 PARAMETER Experiment Name: Zm_Imbibed_Seeds_P Parameter: Tissue Value: Roots vs. Embryo
  misc_feature: MA Experiment ID: 108547 Result: Up-regulated in Transcription
  misc_feature: MA Experiment 108547 PARAMETER Experiment Name: Zm_Imbibed_Seeds_P Parameter: Age (day) Value: 4 vs. 2
  misc_feature: MA Experiment 108547 PARAMETER Experiment Name: Zm_Imbibed_Seeds_P Parameter: Organism Value: Zea mays
  misc_feature: MA Experiment 108547 PARAMETER Experiment Name: Zm_Imbibed_Seeds_P Parameter: Plant Line Value: 35A19
  misc_feature: MA Experiment 108547 PARAMETER Experiment Name: Zm_Imbibed_Seeds_P Parameter: Tissue Value: Aerial vs. Embryo
  misc_feature: MA Experiment ID: 108556 Result: Down-regulated in Transcription
  misc_feature: MA Experiment 108556 PARAMETER Experiment Name: Zm_Drought_P Parameter: Age (day) Value: 9
  misc_feature: MA Experiment 108556 PARAMETER Experiment Name: Zm_Drought_P Parameter: Organism Value: Zea mays
  misc_feature: MA Experiment 108556 PARAMETER Experiment Name: Zm_Drought_P Parameter: Plant Line Value: 35A19
  misc_feature: MA Experiment 108556 PARAMETER Experiment Name: Zm_Drought_P Parameter: Timepoint (hr) Value: 24
  misc_feature: MA Experiment 108556 PARAMETER Experiment Name: Zm_Drought_P Parameter: Tissue Value: Aerial
  misc_feature: MA Experiment 108556 PARAMETER Experiment Name: Zm_Drought_P Parameter: Treatment Value: Drought vs. No Drought
  misc_feature: MA Experiment ID: 108688 Result: Down-regulated in Transcription
  misc_feature: MA Experiment 108688 PARAMETER Experiment Name: Zm_Embryos-Flowers__P Parameter: Tissue Value: Immature Flowers vs. Aerial+
  misc_feature: MA Experiment ID: 20000477 Result: Down-regulated in Transcription
  misc_feature: MA Experiment 20000477 PARAMETER Experiment Name: Zm_5mM_SA_P Parameter: Age (day) Value: 10
  misc_feature: MA Experiment 20000477 PARAMETER Experiment Name: Zm_5mM_SA_P Parameter: Organism Value: Zea mays
  misc_feature: MA Experiment 20000477 PARAMETER Experiment Name: Zm_5mM_SA_P Parameter: Plant Line Value: 35A19
  misc_feature: MA Experiment 20000477 PARAMETER Experiment Name: Zm_5mM_SA_P Parameter: Timepoint (hr) Value: 48
  misc_feature: MA Experiment 20000477 PARAMETER Experiment Name: Zm_5mM_SA_P Parameter: Tissue Value: Aerial
  misc_feature: MA Experiment 20000477 PARAMETER Experiment Name: Zm_5mM_SA_P Parameter: Treatment Value: 5mM SA vs. No Treatment
  misc_feature: MA Experiment ID: 20000478 Result: Down-regulated in Transcription
  misc_feature: MA Experiment 20000478 PARAMETER Experiment Name: Zm_5mM_SA_P Parameter: Age (day) Value: 11
  misc_feature: MA Experiment 20000478 PARAMETER Experiment Name: Zm_5mM_SA_P Parameter: Organism Value: Zea mays
  misc_feature: MA Experiment 20000478 PARAMETER Experiment Name: Zm_5mM_SA_P Parameter: Plant Line Value: 35A19
  misc_feature: MA Experiment 20000478 PARAMETER Experiment Name: Zm_5mM_SA_P Parameter: Timepoint (hr) Value: 72
  misc_feature: MA Experiment 20000478 PARAMETER Experiment Name: Zm_5mM_SA_P Parameter: Tissue Value: Aerial
  misc_feature: MA Experiment 20000478 PARAMETER Experiment Name: Zm_5mM_SA_P Parameter: Treatment Value: 5mM SA vs. No Treatment
  misc_feature: MA Experiment ID: 20000480 Result: Down-regulated in Transcription
  misc_feature: MA Experiment 20000480 PARAMETER Experiment Name: Zm_Drought_P Parameter: Age (day) Value: 11
  misc_feature: MA Experiment 20000480 PARAMETER Experiment Name: Zm_Drought_P Parameter: Organism Value: Zea mays
  misc_feature: MA Experiment 20000480 PARAMETER Experiment Name: Zm_Drought_P Parameter: Plant Line Value: 35A19
  misc_feature: MA Experiment 20000480 PARAMETER Experiment Name: Zm_Drought_P Parameter: Timepoint (hr) Value: 72
  misc_feature: MA Experiment 20000480 PARAMETER Experiment Name: Zm_Drought_P Parameter: Tissue Value: Aerial
  misc_feature: MA Experiment 20000480 PARAMETER Experiment Name: Zm_Drought_P Parameter: Treatment Value: Drought vs. No Drought
  misc_feature: MA Experiment ID: 20000535 Result: Up-regulated in Transcription
  misc_feature: MA Experiment 20000535 PARAMETER Experiment Name: Zm_Hybrid_Seed_Dev_P Parameter: DAP Value: 30 vs. 12
  misc_feature: MA Experiment 20000535 PARAMETER Experiment Name: Zm_Hybrid_Seed_Dev_P Parameter: Organism Value: Zea mays
  misc_feature: MA Experiment 20000535 PARAMETER Experiment Name: Zm_Hybrid_Seed_Dev_P Parameter: Plant Line Value: 35A19
  misc_feature: MA Experiment 20000535 PARAMETER Experiment Name: Zm_Hybrid_Seed_Dev_P Parameter: Tissue Value: Embryo vs. Unfert Floret
  misc_feature: MA Experiment ID: 20000626 Result: Down-regulated in Transcription
  misc_feature: MA Experiment 20000626 PARAMETER Experiment Name: Zm_Herbicide-Treatments_P Parameter: Timepoint (hr) Value: 12
  misc_feature: MA Experiment 20000626 PARAMETER Experiment Name: Zm_Herbicide-Treatments_P Parameter: Tissue Value: Aerial
  misc_feature: MA Experiment 20000626 PARAMETER Experiment Name: Zm_Herbicide-Treatments_P Parameter: Treatment Value: Roundup vs. No Treatment
actacaccagggcacgacgagcgttgcgtcgtgagtgtttgtgtttcagagctgagactgagagagagagagagaggtggtgatggctctgcaggcgcaggggacgcgggtgccgctggtcctggcgctcttcctcctcctggccggttgtggcagcgaggcgcagccgctggtgccggcgctgtttacgttcggtgactcgtcggtggacgtcgggaacaacgactacctccacaccatcatcaaggccaacttcccgccctacggcagggacttcgccaaccacgtcgccaccgggaggttctgcaacggcaagctggcgaccgacatcaccgccgacacgctggggttcactacctatcctgccgtgtacctcagcccacaggcgtcggggcagaacctcctcatcggcgccaacttcgcgtccgcggggtctgggtactacgaccacacggcacttatgtatcacgcgatcccgctgtcccagcagctggagtacttcagggagtaccagacgaagctggcggcggtggccggcgcggggcaggcgcgctccatcctcagcggcgcgctgtacatcgtcagcgccggcgccagcgacttcgtgcagaactactacataaacccgctgctgttcaagacgcagacggccgaccagttctccgaccgcctcgtggccatcttcggccgcaccgtgcaggagctctacggcatgggggcgcgccgcgtcggcgtcacgtcgctgccgccgctgggctgcctgccggcgtccatcacgctgttcgggcacggcgccgccgggtgcgtgtccaggctcaacagcgacgcgcagagcttcaaccggaagatgaacgccaccgtggacgcgctggcgcggcggtacccggacctcaagatcgccgtcttcgacatctacacgccgctgtacgacctggccacggacccccagtcgcagggcttcgcggaggcccggcggggatgctgcgggacgggcacggtggagaccaccgtgctcctctgcaaccccaagtccgtcgggacgtgccccaacgccacgtcctacgtcttctgggacgccgtccacccgtccgaggcggccaaccaggtcatcgctgactcgctcatcaccgagggcctcatcctcgtcacgtaatcatgcttttgttttggcttcaaatcgatcagactacacaaaagtcgtcgttcctaaacgtatactatgcctgtaaatttattcctcttgtttttcttatttgcgttgattaatgttttcggaagtataagcaacaacatgaatgaatgaatgaatgaatgaatggactcct

SEQ ID NO: 2630 - protein, 356 aa, Zea mays subsp. mays
  peptide (1)..(356): Ceres Seq. ID no. 12410621
  misc_feature (34)..(347): Pfam Name: GDSL-like Lipase/Acylhydrolase Pfam Description: GDSL-like Lipase/Acylhydrolase
  misc_feature (13)..(356): Homolog of NCBI NO: 9758010 NR Description: proline-rich protein APG-like [Arabidopsis
  misc_feature (13)..(356): Homolog of NCBI NO: 15237531 NR Description: putative protein; protein id: At5g03820.1
  misc_feature (3)..(356): Homolog of NCBI NO: 13174242 NR Description: putative proline-rich protein [Oryza sativa]
  misc_feature (26)..(356): Homolog of NCBI NO: 15237137 NR Description: GDSL-motif lipase/hydrolase-like protein; protein
  misc_feature (32)..(348): Homolog of NCBI NO: 18394825 NR Description: anter-specific proline-rich protein APG
  misc_feature (38)..(356): Homolog of NCBI NO: 15237528 NR Description: putative protein; protein id: At5g03810.1
  misc_feature (32)..(348): Homolog of NCBI NO: 21592372 NR Description: anter-specific proline-rich protein APG
  misc_feature (8)..(355): Homolog of NCBI NO: 10638955 NR Description: putative proline-rich protein APG isolog [Cicer
  misc_feature (36)..(355): Homolog of NCBI NO: 2062167 NR Description: Proline-rich protein APG isolog [Arabidopsis
  misc_feature (25)..(355): Homolog of NCBI NO: 15228189 NR Description: putative APG protein
MALQAQGTRVPLVLALFLLLAGCGSEAQPLVPALFTFGDSSVDVGNNDYLHTIIKANFPPYGRDFANHVATGRFCNGKLATDITADTLGFTTYPAVYLSPQASGQNLLIGANFASAGSGYYDHTALMYHAIPLSQQLEYFREYQTKLAAVAGAGQARSILSGALYIVSAGASDFVQNYYINPLLFKTQTADQFSDRLVAIFGRTVQELYGMGARRVGVTSLPPLGCLPASITLFGHGAAGCVSRLNSDAQSFNRKMNATVDALARRYPDLKIAVFDIYTPLYDLATDPQSQGFAEARRGCCGTGTVETTVLLCNPKSVGTCPNATSYVFWDAVHPSEAANQVIADSLITEGLILVT

SEQ ID NO: 2631 - protein, 230 aa, Zea mays subsp. mays
  peptide (1)..(230): Ceres Seq. ID no. 12410622
  misc_feature (1)..(221): Pfam Name: GDSL-like Lipase/Acylhydrolase Pfam Description: GDSL-like Lipase/Acylhydrolase
  misc_feature (1)..(222): Homolog of NCBI NO: 21592372 NR Description: anter-specific proline-rich protein APG
  misc_feature (1)..(222): Homolog of NCBI NO: 18394825 NR Description: anter-specific proline-rich protein APG
  misc_feature (1)..(230): Homolog of NCBI NO: 15237528 NR Description: putative protein; protein id: At5g03810.1
  misc_feature (1)..(230): Homolog of NCBI NO: 9758010 NR Description: proline-rich protein APG-like [Arabidopsis
  misc_feature (1)..(230): Homolog of NCBI NO: 15237531 NR Description: putative protein; protein id: At5g03820.1
  misc_feature (1)..(230): Homolog of NCBI NO: 13174242 NR Description: putative proline-rich protein [Oryza sativa]
  misc_feature (1)..(230): Homolog of NCBI NO: 15237137 NR Description: GDSL-motif lipase/hydrolase-like protein; protein
  misc_feature (1)..(229): Homolog of NCBI NO: 10638955 NR Description: putative proline-rich protein APG isolog [Cicer
  misc_feature (1)..(229): Homolog of NCBI NO: 2062167 NR Description: Proline-rich protein APG isolog [Arabidopsis
  misc_feature (1)..(229): Homolog of NCBI NO: 15228189 NR Description: putative APG protein
MYHAIPLSQQLEYFREYQTKLAAVAGAGQARSILSGALYIVSAGASDFVQNYYINPLLFKTQTADQFSDRLVAIFGRTVQELYGMGARRVGVTSLPPLGCLPASITLFGHGAAGCVSRLNSDAQSFNRKMNATVDALARRYPDLKIAVFDIYTPLYDLATDPQSQGFAEARRGCCGTGTVETTVLLCNPKSVGTCPNATSYVFWDAVHPSEAANQVIADSLITEGLILVT

SEQ ID NO: 2632 - DNA, 1360 bp, Zea mays subsp. mays
  misc_feature (1)..(1360): Ceres Seq. ID no. 12410616
  misc_feature: MA Experiment ID: 108529 Result: Up-regulated in Transcription
  misc_feature: MA Experiment 108529 PARAMETER Experiment Name: Zm_Imbibed_Seeds_P Parameter: Age (day) Value: 5 vs. 2
  misc_feature: MA Experiment 108529 PARAMETER Experiment Name: Zm_Imbibed_Seeds_P Parameter: Organism Value: Zea mays
  misc_feature: MA Experiment 108529 PARAMETER Experiment Name: Zm_Imbibed_Seeds_P Parameter: Plant Line Value: 35A19
  misc_feature: MA Experiment 108529 PARAMETER Experiment Name: Zm_Imbibed_Seeds_P Parameter: Tissue Value: Roots vs. Embryo
  misc_feature: MA Experiment ID: 108535 Result: Up-regulated in Transcription
  misc_feature: MA Experiment 108535 PARAMETER Experiment Name: Zm_Meristem_P Parameter: Age (day) Value: 8
  misc_feature: MA Experiment 108535 PARAMETER Experiment Name: Zm_Meristem_P Parameter: Organism Value: Zea mays
  misc_feature: MA Experiment 108535 PARAMETER Experiment Name: Zm_Meristem_P Parameter: Plant Line Value: 35A19
  misc_feature: MA Experiment 108535 PARAMETER Experiment Name: Zm_Meristem_P Parameter: Tissue Value: Root Meristem vs. Above Root Meristem
aattactgtgcctttatcttcaacccaaaccatccattaccatattcctaagctatcatggtgcaccggacttccatagccgatgtgcatgtgatgtgcatggatctaagcccaaagaaacccaacaaggccagcgccagcgacggcggagcctactacgactggtcccccgccgatctgcccatgctcggcgttgcctccattggtgccgccaagctctgcctcaccgccggaggtcttgccctacccagctactccgactctgccaagatcgcctacgtcctccaaggcaaaggtatattcggcgtggttctcccggaggcgaccaaggagaaggtcatctccgtcaaggaaggcgacgcgctggcgctccccttcggcgtcgtcacctggtggcacaacaacgccgacgccgctatctccgacctcgtggtgctcttcctcggcgacacctccacgggccacaagccgggccagttcacaaacttccagctcaccggctccacgggcatcttcacgggcttctccacagagttcgttgcccgcgcatgggacctcacccaggacgacgccgccaagctcgtctccacccagcccggatccggcattgtcagggtcaaggacgggcacaagatgcccgaggcgcgcgacgaggacaggcagggcctggtcctcaactgcctagaggcgccgcttgacgtcgacatcaagaacggagggcgcgtcgtggtcctcaacacccagaacctgccgctcgtcaaggaggtcgggctcggtgctgaccttgtcaggatcgacgcccactccatgtgctcgcccggcttctcctgcgactccgcctaccaggtcacctacatcgtgcgcggcagtggccgcgtccaggttgttgggatcgacggcacgcgagtgctcgagactcgcgccgagggaggctgcctcttcatcgtgccaaggttcttcgttgtctcaaagatcgccgacgaaaccggcatggagtggttctccatcatcaccacccccaacccaatctttagccacttggcgggccggacatcggtgtggaaggcaatatctccggcggtcttgcagtcgtcgttcaacaccacgccggagatggagaagctgttccgtagcaagaggcttgactcggagatcttctttgcgccttcaaactgattcattcgccggtggaaattggtccatccatctcgagtaaacttggtgtcctgggtgtgttcttagcagcttcagtttagaataatcatgttatgtcttcatcatcagttttttagatcgcttcatgtaataataaacttgagatggtacacatgtttcttaattagttctcttggtatttttt

SEQ ID NO: 2633 - protein, 372 aa, Zea mays subsp. mays
  peptide (1)..(372): Ceres Seq. ID no. 12410617
  misc_feature (206)..(354): Pfam Name: Cupin Pfam Description: Cupin
  misc_feature (11)..(87): Homolog of NCBI NO: 29839254 NR Description: 13S globulin seed storage protein 1 precursor
  misc_feature (212)..(367): Homolog of NCBI NO: 29839254 NR Description: 13S globulin seed storage protein 1 precursor
  misc_feature (13)..(195): Homolog of NCBI NO: 7595348 NR Description: globulin-like protein [Cucumis melo]
  misc_feature (13)..(372): Homolog of NCBI NO: 15223000 NR Description: globulin-like protein
  misc_feature (13)..(372): Homolog of NCBI NO: 21593610 NR Description: globulin-like protein [Arabidopsis thaliana]
  misc_feature (13)..(372): Homolog of NCBI NO: 15226926 NR Description: legumin-like protein; protein id: At2g28680.1
  misc_feature (15)..(370): Homolog of NCBI NO: 28950670 NR Description: legumin-like protein [Zea mays]
  misc_feature (15)..(372): Homolog of NCBI NO: 28950668 NR Description: legumin-like protein [Zea mays]
  misc_feature (1)..(372): Homolog of NCBI NO: 34906084 NR Description: putative legumin-like protein
  misc_feature (1)..(372): Homolog of NCBI NO: 37730876 NR Description: legumin-like protein [Zea mays]
MVHRTSIADVHVMCMDLSPKKPNKASASDGGAYYDWSPADLPMLGVASIGAAKLCLTAGGLALPSYSDSAKIAYVLQGKGIFGVVLPEATKEKVISVKEGDALALPFGVVTWWHNNADAAISDLVVLFLGDTSTGHKPGQFTNFQLTGSTGIFTGFSTEFVARAWDLTQDDAAKLVSTQPGSGIVRVKDGHKMPEARDEDRQGLVLNCLEAPLDVDIKNGGRVVVLNTQNLPLVKEVGLGADLVRIDAHSMCSPGFSCDSAYQVTYIVRGSGRVQVVGIDGTRVLETRAEGGCLFIVPRFFVVSKIADETGMEWFSIITTPNPIFSHLAGRTSVWKAISPAVLQSSFNTTPEMEKLFRSKRLDSEIFFAPSN

SEQ ID NO: 2634 - protein, 360 aa, Zea mays subsp. mays
  peptide (1)..(360): Ceres Seq. ID no. 12410618
  misc_feature (194)..(342): Pfam Name: Cupin Pfam Description: Cupin
  misc_feature (1)..(75): Homolog of NCBI NO: 29839254 NR Description: 13S globulin seed storage protein 1 precursor
  misc_feature (200)..(355): Homolog of NCBI NO: 29839254 NR Description: 13S globulin seed storage protein 1 precursor
  misc_feature (1)..(183): Homolog of NCBI NO: 7595348 NR Description: globulin-like protein [Cucumis melo]
  misc_feature (1)..(360): Homolog of NCBI NO: 15223000 NR Description: globulin-like protein
  misc_feature (1)..(360): Homolog of NCBI NO: 21593610 NR Description: globulin-like protein [Arabidopsis thaliana]
  misc_feature (1)..(360): Homolog of NCBI NO: 15226926 NR Description: legumin-like protein; protein id: At2g28680.1
  misc_feature (3)..(358): Homolog of NCBI NO: 28950670 NR Description: legumin-like protein [Zea mays]
  misc_feature (3)..(360): Homolog of NCBI NO: 28950668 NR Description: legumin-like protein [Zea mays]
  misc_feature (1)..(360): Homolog of NCBI NO: 34906084 NR Description: putative legumin-like protein
  misc_feature (1)..(360): Homolog of NCBI NO: 37730876 NR Description: legumin-like protein [Zea mays]
MCMDLSPKKPNKASASDGGAYYDWSPADLPMLGVASIGAAKLCLTAGGLALPSYSDSAKIAYVLQGKGIFGVVLPEATKEKVISVKEGDALALPFGVVTWWHNNADAAISDLVVLFLGDTSTGHKPGQFTNFQLTGSTGIFTGFSTEFVARAWDLTQDDAAKLVSTQPGSGIVRVKDGHKMPEARDEDRQGLVLNCLEAPLDVDIKNGGRVVVLNTQNLPLVKEVGLGADLVRIDAHSMCSPGFSCDSAYQVTYIVRGSGRVQVVGIDGTRVLETRAEGGCLFIVPRFFVVSKIADETGMEWFSIITTPNPIFSHLAGRTSVWKAISPAVLQSSFNTTPEMEKLFRSKRLDSEIFFAPSN

SEQ ID NO: 2635 - protein, 358 aa, Zea mays subsp. mays
  peptide (1)..(358): Ceres Seq. ID no. 12410619
  misc_feature (192)..(340): Pfam Name: Cupin Pfam Description: Cupin
  misc_feature (1)..(73): Homolog of NCBI NO: 29839254 NR Description: 13S globulin seed storage protein 1 precursor
  misc_feature (198)..(353): Homolog of NCBI NO: 29839254 NR Description: 13S globulin seed storage protein 1 precursor
  misc_feature (1)..(181): Homolog of NCBI NO: 7595348 NR Description: globulin-like protein [Cucumis melo]
  misc_feature (1)..(358): Homolog of NCBI NO: 15223000 NR Description: globulin-like protein
  misc_feature (1)..(358): Homolog of NCBI NO: 21593610 NR Description: globulin-like protein [Arabidopsis thaliana]
  misc_feature (1)..(358): Homolog of NCBI NO: 15226926 NR Description: legumin-like protein; protein id: At2g28680.1
  misc_feature (1)..(356): Homolog of NCBI NO: 28950670 NR Description: legumin-like protein [Zea mays]
  misc_feature (1)..(358): Homolog of NCBI NO: 28950668 NR Description: legumin-like protein [Zea mays]
  misc_feature (1)..(358): Homolog of NCBI NO: 34906084 NR Description: putative legumin-like protein
  misc_feature (1)..(358): Homolog of NCBI NO: 37730876 NR Description: legumin-like protein [Zea mays]
MDLSPKKPNKASASDGGAYYDWSPADLPMLGVASIGAAKLCLTAGGLALPSYSDSAKIAYVLQGKGIFGVVLPEATKEKVISVKEGDALALPFGVVTWWHNNADAAISDLVVLFLGDTSTGHKPGQFTNFQLTGSTGIFTGFSTEFVARAWDLTQDDAAKLVSTQPGSGIVRVKDGHKMPEARDEDRQGLVLNCLEAPLDVDIKNGGRVVVLNTQNLPLVKEVGLGADLVRIDAHSMCSPGFSCDSAYQVTYIVRGSGRVQVVGIDGTRVLETRAEGGCLFIVPRFFVVSKIADETGMEWFSIITTPNPIFSHLAGRTSVWKAISPAVLQSSFNTTPEMEKLFRSKRLDSEIFFAPSN

SEQ ID NO: 2636 - DNA, 1626 bp, Zea mays subsp. mays
  misc_feature (1)..(1626): Ceres Seq. ID no. 12358604
  misc_feature: MA Experiment ID: 20000492 Result: Up-regulated in Transcription
  misc_feature: MA Experiment 20000492 PARAMETER Experiment Name: Zm_Hybrid_Seed_Dev_P Parameter: DAP Value: 12
  misc_feature: MA Experiment 20000492 PARAMETER Experiment Name: Zm_Hybrid_Seed_Dev_P Parameter: Organism Value: Zea mays
  misc_feature: MA Experiment 20000492 PARAMETER Experiment Name: Zm_Hybrid_Seed_Dev_P Parameter: Plant Line Value: 35A19
  misc_feature: MA Experiment 20000492 PARAMETER Experiment Name: Zm_Hybrid_Seed_Dev_P Parameter: Tissue Value: Fert Kernel vs. Unfert Floret
acccaaaatttccccatctccgacctcccccttcctctccccctgccgctccccgcgccgagaaggagaaccccagccgccgcgcagcgcgccgcccatggcctcctcgtcggagaacgcggctgtgccgccggaggaggagccccaggccccgccgccgccggacacagagcctaccgaggcggcgcccggcgaggcggaggatgagccgcaaaccctagagcgggcgcagaagctcttcgacaggggttccaaggccatcgaggatgaggacttcgtcgacgccgtagactgtctcagccgagcgctcgagatcagggcttcacattatggagagctcgcaccggagtgtgccagcacatacttcaaatatggatgtgccctgctatacaaagctcaggaggagagtgatgttttgggaaatgttcccaagagcttgccaaatgaagactcagtgaagagtacagctactaaagatgacagtggaacctcaaaggtctctggtaccgatgcggaggatgctgcgtcatcagaaaaagttgatgctgaagaaggtcacaactcaaatggcaaaaatcaggagaatgggaatggtgaagttgagaaagatgatgacgacgtcgacgatgatgagaagatgggagatgaagaggataatgatttggatctttcttggaaaatgttggacattgctagggcaatagttgagaagagccaagataacactatggagaaagtaaaaatatattctgctcttgctgaagtggcaacggaaagagaggacatggacaactcactcagtgactatatgaaagctttatccatgttggagcatttggttgagcctgaccatcgtcgagttgtggaattaaacttccgcatttgtttggtttatgaactagtttccaagatcggagaagcaatttcatactgtgcaaaagcaatttcgctatgcaagtcacgcatacagagcctgaaaagttccaaggatgctttgttggctggtatagatggtgatgcatctgctgctgaagctgaaggaggctcagaaaaatctgccattgaaaaagagctagagcagcttactagcatattgcctgatcttgagaagaagcttgaggacctgtctgaagcaaacccaagcgctgacatggatgagatggtgaaggcaatcgtgtccagggtaactgatgtgatgccaaaagctgcatcttttacttcttcccagatggcaacctcaagcaatggattcgactcctcggttatgtctacggcagcgacaaccggaagctctggaagcaccgtgactgaccttggggttgtaggcagaggcgtcaaacgagctagcatcaagccgatctctgctgaacctgctgctaagaaacctgcacttgattcaccatctcaacaaggtgacagcagcatcaactctgaggttgttcctgcaacgcagactggagacgagtcagtatctaagtaaattacaatttcattagccctactgtaatgttaacttgctggaacatattagctgctatgtaaacgcttaagaagggactgctggggccatagactcatcgtgagctgaccattgaaatgttaaattgctgagatcatcatggcggt

SEQ ID NO: 2637 - protein, 492 aa, Zea mays subsp. mays
  peptide (1)..(492): Ceres Seq. ID no. 12358605
  misc_feature (76)..(109): Pfam Name: TPR Domain Pfam Description: TPR Domain
  misc_feature (53)..(483): Homolog of NCBI NO: 123127 NR Description: HISTONE-BINDING PROTEIN N1/N2
  misc_feature (62)..(331): Homolog of NCBI NO: 30584691 NR Description: Homo sapiens nuclear autoantigenic sperm protein
  misc_feature (62)..(331): Homolog of NCBI NO: 27262630 NR Description: nuclear autoantigenic sperm protein isoform 3
  misc_feature (33)..(331): Homolog of NCBI NO: 13435642 NR Description: Unknown (protein for MGC:5829) [Mus musculus]
  misc_feature (60)..(137): Homolog of NCBI NO: 18129310 NR Description: hypothetical protein [Pinus pinaster]
  misc_feature (62)..(331): Homolog of NCBI NO: 4104353 NR Description: nuclear autoantigenic sperm protein autosomal
  misc_feature (55)..(376): Homolog of NCBI NO: 25407799 NR Description: hypothetical protein AT4g37210 [imported] -
  misc_feature (55)..(433): Homolog of NCBI NO: 18419996 NR Description: putative protein; protein id: At4g37210.1
  misc_feature (141)..(492): Homolog of NCBI NO: 32352192 NR Description: hypothetical protein [Oryza sativa (japonica
  misc_feature (33)..(492): Homolog of NCBI NO: 38175649 NR Description: tetratricopeptide repeat-containing protein-like
PKISPSPTSPFLSPCRSPRREGEPQPPRSAPPMASSSENAAVPPEEEPQAPPPPDTEPTEAAPGEAEDEPQTLERAQKLFDRGSKAIEDEDFVDAVDCLSRALEIRASHYGELAPECASTYFKYGCALLYKAQEESDVLGNVPKSLPNEDSVKSTATKDDSGTSKVSGTDAEDAASSEKVDAEEGHNSNGKNQENGNGEVEKDDDDVDDDEKMGDEEDNDLDLSWKMLDIARAIVEKSQDNTMEKVKIYSALAEVATEREDMDNSLSDYMKALSMLEHLVEPDHRRVVELNFRICLVYELVSKIGEAISYCAKAISLCKSRIQSLKSSKDALLAGIDGDASAAEAEGGSEKSAIEKELEQLTSILPDLEKKLEDLSEANPSADMDEMVKAIVSRVTDVMPKAASFTSSQMATSSNGFDSSVMSTAATTGSSGSTVTDLGVVGRGVKRASIKPISAEPAAKKPALDSPSQQGDSSINSEVVPATQTGDESVSK

SEQ ID NO: 2638 - protein, 460 aa, Zea mays subsp. mays
  peptide (1)..(460): Ceres Seq. ID no. 12358606
  misc_feature (44)..(77): Pfam Name: TPR Domain Pfam Description: TPR Domain
  misc_feature (21)..(451): Homolog of NCBI NO: 123127 NR Description: HISTONE-BINDING PROTEIN N1/N2
  misc_feature (30)..(299): Homolog of NCBI NO: 30584691 NR Description: Homo sapiens nuclear autoantigenic sperm protein
  misc_feature (30)..(299): Homolog of NCBI NO: 27262630 NR Description: nuclear autoantigenic sperm protein isoform 3
  misc_feature (1)..(299): Homolog of NCBI NO: 13435642 NR Description: Unknown (protein for MGC:5829) [Mus musculus]
  misc_feature (28)..(105): Homolog of NCBI NO: 18129310 NR Description: hypothetical protein [Pinus pinaster]
  misc_feature (30)..(299): Homolog of NCBI NO: 4104353 NR Description: nuclear autoantigenic sperm protein autosomal
  misc_feature (23)..(344): Homolog of NCBI NO: 25407799 NR Description: hypothetical protein AT4g37210 [imported] -
  misc_feature (23)..(401): Homolog of NCBI NO: 18419996 NR Description: putative protein; protein id: At4g37210.1
  misc_feature (109)..(460): Homolog of NCBI NO: 32352192 NR Description: hypothetical protein [Oryza sativa (japonica
  misc_feature (1)..(460): Homolog of NCBI NO: 38175649 NR Description: tetratricopeptide repeat-containing protein-like
MASSSENAAVPPEEEPQAPPPPDTEPTEAAPGEAEDEPQTLERAQKLFDRGSKAIEDEDFVDAVDCLSRALEIRASHYGELAPECASTYFKYGCALLYKAQEESDVLGNVPKSLPNEDSVKSTATKDDSGTSKVSGTDAEDAASSEKVDAEEGHNSNGKNQENGNGEVEKDDDDVDDDEKMGDEEDNDLDLSWKMLDIARAIVEKSQDNTMEKVKIYSALAEVATEREDMDNSLSDYMKALSMLEHLVEPDHRRVVELNFRICLVYELVSKIGEAISYCAKAISLCKSRIQSLKSSKDALLAGIDGDASAAEAEGGSEKSAIEKELEQLTSILPDLEKKLEDLSEANPSADMDEMVKAIVSRVTDVMPKAASFTSSQMATSSNGFDSSVMSTAATTGSSGSTVTDLGVVGRGVKRASIKPISAEPAAKKPALDSPSQQGDSSINSEVVPATQTGDESVSK

SEQ ID NO: 2639 - protein, 280 aa, Zea mays subsp. mays
  peptide (1)..(280): Ceres Seq. ID no. 12358607
  misc_feature (1)..(268): Homolog of NCBI NO: 28277791 NR Description: Unknown (protein for MGC:56007) [Danio rerio]
  misc_feature (1)..(271): Homolog of NCBI NO: 123127 NR Description: HISTONE-BINDING PROTEIN N1/N2
  misc_feature (1)..(119): Homolog of NCBI NO: 30584691 NR Description: Homo sapiens nuclear autoantigenic sperm protein
  misc_feature (1)..(119): Homolog of NCBI NO: 27262630 NR Description: nuclear autoantigenic sperm protein isoform 3
  misc_feature (1)..(119): Homolog of NCBI NO: 13435642 NR Description: Unknown (protein for MGC:5829) [Mus musculus]
  misc_feature (1)..(119): Homolog of NCBI NO: 4104353 NR Description: nuclear autoantigenic sperm protein autosomal
  misc_feature (1)..(164): Homolog of NCBI NO: 25407799 NR Description: hypothetical protein AT4g37210 [imported] -
  misc_feature (1)..(221): Homolog of NCBI NO: 18419996 NR Description: putative protein; protein id: At4g37210.1
  misc_feature (1)..(280): Homolog of NCBI NO: 32352192 NR Description: hypothetical protein [Oryza sativa (japonica
  misc_feature (1)..(280): Homolog of NCBI NO: 38175649 NR Description: tetratricopeptide repeat-containing protein-like
MGDEEDNDLDLSWKMLDIARAIVEKSQDNTMEKVKIYSALAEVATEREDMDNSLSDYMKALSMLEHLVEPDHRRVVELNFRICLVYELVSKIGEAISYCAKAISLCKSRIQSLKSSKDALLAGIDGDASAAEAEGGSEKSAIEKELEQLTSILPDLEKKLEDLSEANPSADMDEMVKAIVSRVTDVMPKAASFTSSQMATSSNGFDSSVMSTAATTGSSGSTVTDLGVVGRGVKRASIKPISAEPAAKKPALDSPSQQGDSSINSEVVPATQTGDESVSK

SEQ ID NO: 2640 - DNA, 1271 bp, Zea mays subsp. mays
  misc_feature (1)..(1271): Ceres Seq. ID no. 12343984
  misc_feature: MA Experiment ID: 108522 Result: Down-regulated in Transcription
  misc_feature: MA Experiment 108522 PARAMETER Experiment Name: Zm_42deg_Heat_P Parameter: Age (day) Value: 8
  misc_feature: MA Experiment 108522 PARAMETER Experiment Name: Zm_42deg_Heat_P Parameter: Organism Value: Zea mays
  misc_feature: MA Experiment 108522 PARAMETER Experiment Name: Zm_42deg_Heat_P Parameter: Plant Line Value: 35A19
  misc_feature: MA Experiment 108522 PARAMETER Experiment Name: Zm_42deg_Heat_P Parameter: Temperature (deg C) Value: 42 vs. 22
  misc_feature: MA Experiment 108522 PARAMETER Experiment Name: Zm_42deg_Heat_P Parameter: Timepoint (hr) Value: 1
  misc_feature: MA Experiment 108522 PARAMETER Experiment Name: Zm_42deg_Heat_P Parameter: Tissue Value: Aerial
  misc_feature: MA Experiment ID: 108523 Result: Down-regulated in Transcription
  misc_feature: MA Experiment 108523 PARAMETER Experiment Name: Zm_42deg_Heat_P Parameter: Age (day) Value: 8
  misc_feature: MA Experiment 108523 PARAMETER Experiment Name: Zm_42deg_Heat_P Parameter: Organism Value: Zea mays
  misc_feature: MA Experiment 108523 PARAMETER Experiment Name: Zm_42deg_Heat_P Parameter: Plant Line Value: 35A19
  misc_feature: MA Experiment 108523 PARAMETER Experiment Name: Zm_42deg_Heat_P Parameter: Temperature (deg C) Value: 42 vs. 22
  misc_feature: MA Experiment 108523 PARAMETER Experiment Name: Zm_42deg_Heat_P Parameter: Timepoint (hr) Value: 6
  misc_feature: MA Experiment 108523 PARAMETER Experiment Name: Zm_42deg_Heat_P Parameter: Tissue Value: Aerial
  misc_feature: MA Experiment ID: 108527 Result: Down-regulated in Transcription
  misc_feature: MA Experiment 108527 PARAMETER Experiment Name: Zm_5mM_NO_P Parameter: Age (day) Value: 8
  misc_feature: MA Experiment 108527 PARAMETER Experiment Name: Zm_5mM_NO_P Parameter: Organism Value: Zea mays
  misc_feature: MA Experiment 108527 PARAMETER Experiment Name: Zm_5mM_NO_P Parameter: Plant Line Value: 35A19
  misc_feature: MA Experiment 108527 PARAMETER Experiment Name: Zm_5mM_NO_P Parameter: Timepoint (hr) Value: 6
  misc_feature: MA Experiment 108527 PARAMETER Experiment Name: Zm_5mM_NO_P Parameter: Tissue Value: Aerial
  misc_feature: MA Experiment 108527 PARAMETER Experiment Name: Zm_5mM_NO_P Parameter: Treatment Value: 5mM NO vs. No Treatment
  misc_feature: MA Experiment ID: 108535 Result: Down-regulated in Transcription
  misc_feature: MA Experiment 108535 PARAMETER Experiment Name: Zm_Meristem_P Parameter: Age (day) Value: 8
  misc_feature: MA Experiment 108535 PARAMETER Experiment Name: Zm_Meristem_P Parameter: Organism Value: Zea mays
  misc_feature: MA Experiment 108535 PARAMETER Experiment Name: Zm_Meristem_P Parameter: Plant Line Value: 35A19
  misc_feature: MA Experiment 108535 PARAMETER Experiment Name: Zm_Meristem_P Parameter: Tissue Value: Root Meristem vs. Above Root Meristem
  misc_feature: MA Experiment ID: 20000535 Result: Down-regulated in Transcription
  misc_feature: MA Experiment 20000535 PARAMETER Experiment Name: Zm_Hybrid_Seed_Dev_P Parameter: DAP Value: 30 vs. 12
  misc_feature: MA Experiment 20000535 PARAMETER Experiment Name: Zm_Hybrid_Seed_Dev_P Parameter: Organism Value: Zea mays
  misc_feature: MA Experiment 20000535 PARAMETER Experiment Name: Zm_Hybrid_Seed_Dev_P Parameter: Plant Line Value: 35A19
  misc_feature: MA Experiment 20000535 PARAMETER Experiment Name: Zm_Hybrid_Seed_Dev_P Parameter: Tissue Value: Embryo vs. Unfert Floret
atccaaacaaaagtactacactgaactcaatcatcctcagcggaggaaagcagagcacggcacagcgagtcgcagagggatagatccgagcacaagcaggccccgatggcgacgacggcgacgaaccggcgggtgatcctcaaggagtacgtggagggatacccacgcgaggagcacatggagctgctccggggcgccgaggttcccctccgcctgacgggcgccgagccggccgggtccgtcctcgtcaggaacctctacctctcctgcgacccctacatgcggcccaagatgtcgcgcccgctgcgggagtcctacacggccgccttcgtcccgggcgacaccatcacgggctacggcgtcgcgcgcgtggtcgactcctccgacccgcgcctcgcgcccggggacctcgtctggggcatcaccggctgggaggactacagcgtcgtgacgccgcccgccaccaggctcctctccaagatctcccaccacggggccggggagggggcgggcgtgccgctgtcctactacaccggcatcctcggcatgccggggctcaccgcgtacgtgggcttccacgagatctgcgcgccgaagaagggcgagaccgtgttcgtgtccgccgcgtccggcgccgtcggccagctggtgggccagttcgccaggctcgccggctgccacgtcgtcggcagcgccgggtcccgggagaaggtggagctgctcaagaccaggttcggcttccacgacgccttcaactacaaggaggagcccgacctcggcgccgcgctcaagcgctgcttccccgacggcatcgacatctacttcgagaacgtcggcggcgccatgctcgacgccgtcctgctcaacatgcgcgtgcacggacggatcgccgtctgcgggctcatctcgcagtacaacctggcggacggggagaaggacgccgtgcgcaacctcgccgccgtcatctccaagcgcctccgcctgcaggggttcatcgagcccgaccacaagcacctctacccgcagtacgaggcgtgggtgctgccgtacatcagggacggcacgctcgcctacgtcgaggacgtcgccgaggggctcgagagcgcgcccaaggcgctcataggactcttccacggtcgcaacgtcggaaagcagctcgtccgcgtcgccgacgacgagtgagacgcgcctcacttcgattggaccagacgatccatgtgtcgctgttgctatgtttcgattccccattttcatgaataattaattgtgcc

SEQ ID NO: 2641 - protein, 358 aa, Zea mays subsp. mays
  peptide (1)..(358): Ceres Seq. ID no. 12343985
  misc_feature (100)..(354): Pfam Name: Zinc-binding dehydrogenase Pfam Description: Zinc-binding dehydrogenase
  misc_feature (6)..(355): Homolog of NCBI NO: 1362014 NR Description: probable NADPH2:quinone reductase (EC 1.6.5.5) P2
  misc_feature (4)..(355): Homolog of NCBI NO: 15228456 NR Description: putative NADP-dependent oxidoreductase; protein
  misc_feature (6)..(355): Homolog of NCBI NO: 21554121 NR Description: quinone oxidoreductase-like protein [Arabidopsis
  misc_feature (4)..(355): Homolog of NCBI NO: 21539447 NR Description: quinone oxidoreductase-like protein [Arabidopsis
  misc_feature (6)..(355): Homolog of NCBI NO: 15237890 NR Description: quinone oxidoreductase - like protein
  misc_feature (4)..(355): Homolog of NCBI NO: 15237888 NR Description: quinone oxidoreductase -like protein; protein id:
  misc_feature (4)..(355): Homolog of NCBI NO: 17529140 NR Description: putative quinone oxidoreductase [Arabidopsis
  misc_feature (4)..(355): Homolog of NCBI NO: 22326861 NR Description: quinone oxidoreductase - like protein
  misc_feature (5)..(355): Homolog of NCBI NO: 38345384 NR Description: OSJNBa0067K08.13 [Oryza sativa (japonica
  misc_feature (1)..(355): Homolog of NCBI NO: 6692816 NR Description: allyl alcohol dehydrogenase [Nicotiana tabacum]
MATTATNRRVILKEYVEGYPREEHMELLRGAEVPLRLTGAEPAGSVLVRNLYLSCDPYMRPKMSRPLRESYTAAFVPGDTITGYGVARVVDSSDPRLAPGDLVWGITGWEDYSVVTPPATRLLSKISHHGAGEGAGVPLSYYTGILGMPGLTAYVGFHEICAPKKGETVFVSAASGAVGQLVGQFARLAGCHVVGSAGSREKVELLKTRFGFHDAFNYKEEPDLGAALKRCFPDGIDIYFENVGGAMLDAVLLNMRVHGRIAVCGLISQYNLADGEKDAVRNLAAVISKRLRLQGFIEPDHKHLYPQYEAWVLPYIRDGTLAYVEDVAEGLESAPKALIGLFHGRNVGKQLVRVADDE

SEQ ID NO: 2642 - protein, 334 aa, Zea mays subsp. mays
  peptide (1)..(334): Ceres Seq. ID no. 12343986
  misc_feature (76)..(330): Pfam Name: Zinc-binding dehydrogenase Pfam Description: Zinc-binding dehydrogenase
  misc_feature (1)..(331): Homolog of NCBI NO: 38345384 NR Description: OSJNBa0067K08.13 [Oryza sativa (japonica
  misc_feature (1)..(331): Homolog of NCBI NO: 1362014 NR Description: probable NADPH2:quinone reductase (EC 1.6.5.5) P2
  misc_feature (1)..(331): Homolog of NCBI NO: 21554121 NR Description: quinone oxidoreductase-like protein [Arabidopsis
  misc_feature (1)..(331): Homolog of NCBI NO: 15237890 NR Description: quinone oxidoreductase - like protein
  misc_feature (1)..(331): Homolog of NCBI NO: 17529140 NR Description: putative quinone oxidoreductase [Arabidopsis
  misc_feature (1)..(331): Homolog of NCBI NO: 22326861 NR Description: quinone oxidoreductase - like protein
  misc_feature (1)..(331): Homolog of NCBI NO: 15237888 NR Description: quinone oxidoreductase -like protein; protein id:
  misc_feature (1)..(331): Homolog of NCBI NO: 21539447 NR Description: quinone oxidoreductase-like protein [Arabidopsis
  misc_feature (1)..(331): Homolog of NCBI NO: 15228456 NR Description: putative NADP-dependent oxidoreductase; protein
  misc_feature (1)..(331): Homolog of NCBI NO: 6692816 NR Description: allyl alcohol dehydrogenase [Nicotiana tabacum]
MELLRGAEVPLRLTGAEPAGSVLVRNLYLSCDPYMRPKMSRPLRESYTAAFVPGDTITGYGVARVVDSSDPRLAPGDLVWGITGWEDYSVVTPPATRLLSKISHHGAGEGAGVPLSYYTGILGMPGLTAYVGFHEICAPKKGETVFVSAASGAVGQLVGQFARLAGCHVVGSAGSREKVELLKTRFGFHDAFNYKEEPDLGAALKRCFPDGIDIYFENVGGAMLDAVLLNMRVHGRIAVCGLISQYNLADGEKDAVRNLAAVISKRLRLQGFIEPDHKHLYPQYEAWVLPYIRDGTLAYVEDVAEGLESAPKALIGLFHGRNVGKQLVRVADDE

SEQ ID NO: 2643 - protein, 300 aa, Zea mays subsp. mays
  peptide (1)..(300): Ceres Seq. ID no. 12343987
  misc_feature (42)..(296): Pfam Name: Zinc-binding dehydrogenase Pfam Description: Zinc-binding dehydrogenase
  misc_feature (1)..(297): Homolog of NCBI NO: 1362014 NR Description: probable NADPH2:quinone reductase (EC 1.6.5.5) P2
  misc_feature (1)..(297): Homolog of NCBI NO: 15228456 NR Description: putative NADP-dependent oxidoreductase; protein
  misc_feature (1)..(297): Homolog of NCBI NO: 21554121 NR Description: quinone oxidoreductase-like protein [Arabidopsis
  misc_feature (1)..(297): Homolog of NCBI NO: 21539447 NR Description: quinone oxidoreductase-like protein [Arabidopsis
  misc_feature (1)..(297): Homolog of NCBI NO: 15237890 NR Description: quinone oxidoreductase - like protein
  misc_feature (1)..(297): Homolog of NCBI NO: 15237888 NR Description: quinone oxidoreductase -like protein; protein id:
  misc_feature (1)..(297): Homolog of NCBI NO: 17529140 NR Description: putative quinone oxidoreductase [Arabidopsis
  misc_feature (1)..(297): Homolog of NCBI NO: 22326861 NR Description: quinone oxidoreductase - like protein
  misc_feature (1)..(297): Homolog of NCBI NO: 38345384 NR Description: OSJNBa0067K08.13 [Oryza sativa (japonica
  misc_feature (1)..(297): Homolog of NCBI NO: 6692816 NR Description: allyl alcohol dehydrogenase [Nicotiana tabacum]
MRPKMSRPLRESYTAAFVPGDTITGYGVARVVDSSDPRLAPGDLVWGITGWEDYSVVTPPATRLLSKISHHGAGEGAGVPLSYYTGILGMPGLTAYVGFHEICAPKKGETVFVSAASGAVGQLVGQFARLAGCHVVGSAGSREKVELLKTRFGFHDAFNYKEEPDLGAALKRCFPDGIDIYFENVGGAMLDAVLLNMRVHGRIAVCGLISQYNLADGEKDAVRNLAAVISKRLRLQGFIEPDHKHLYPQYEAWVLPYIRDGTLAYVEDVAEGLESAPKALIGLFHGRNVGKQLVRVADDE

SEQ ID NO: 2644 - DNA, 1411 bp, Zea mays subsp. mays
  misc_feature (1)..(1411): Ceres Seq. ID no. 12406802
  misc_feature: MA Experiment ID: 108515 Result: Up-regulated in Transcription
  misc_feature: MA Experiment 108515 PARAMETER Experiment Name: Zm_2mM_SA_P Parameter: Age (day) Value: 8
  misc_feature: MA Experiment 108515 PARAMETER Experiment Name: Zm_2mM_SA_P Parameter: Organism Value: Zea mays
  misc_feature: MA Experiment 108515 PARAMETER Experiment Name: Zm_2mM_SA_P Parameter: Plant Line Value: 35A19
  misc_feature: MA Experiment 108515 PARAMETER Experiment Name: Zm_2mM_SA_P Parameter: Timepoint (hr) Value: 12
  misc_feature: MA Experiment 108515 PARAMETER Experiment Name: Zm_2mM_SA_P Parameter: Tissue Value: Aerial
  misc_feature: MA Experiment 108515 PARAMETER Experiment Name: Zm_2mM_SA_P Parameter: Treatment Value: 2mM SA vs. No Treatment
  misc_feature: MA Experiment ID: 108527 Result: Up-regulated in Transcription
  misc_feature: MA Experiment 108527 PARAMETER Experiment Name: Zm_5mM_NO_P Parameter: Age (day) Value: 8
  misc_feature: MA Experiment 108527 PARAMETER Experiment Name: Zm_5mM_NO_P Parameter: Organism Value: Zea mays
  misc_feature: MA Experiment 108527 PARAMETER Experiment Name: Zm_5mM_NO_P Parameter: Plant Line Value: 35A19
  misc_feature: MA Experiment 108527 PARAMETER Experiment Name: Zm_5mM_NO_P Parameter: Timepoint (hr) Value: 6
  misc_feature: MA Experiment 108527 PARAMETER Experiment Name: Zm_5mM_NO_P Parameter: Tissue Value: Aerial
  misc_feature: MA Experiment 108527 PARAMETER Experiment Name: Zm_5mM_NO_P Parameter: Treatment Value: 5mM NO vs. No Treatment
  misc_feature: MA Experiment ID: 108528 Result: Down-regulated in Transcription
  misc_feature: MA Experiment 108528 PARAMETER Experiment Name: Zm_Imbibed_Seeds_P Parameter: Age (day) Value: 5 vs. 2
  misc_feature: MA Experiment 108528 PARAMETER Experiment Name: Zm_Imbibed_Seeds_P Parameter: Organism Value: Zea mays
  misc_feature: MA Experiment 108528 PARAMETER Experiment Name: Zm_Imbibed_Seeds_P Parameter: Plant Line Value: 35A19
  misc_feature: MA Experiment 108528 PARAMETER Experiment Name: Zm_Imbibed_Seeds_P Parameter: Tissue Value: Aerial vs. Embryo
  misc_feature: MA Experiment ID: 108545 Result: Down-regulated in Transcription
  misc_feature: MA Experiment 108545 PARAMETER Experiment Name: Zm_Imbibed_Seeds_P Parameter: Age (day) Value: 3 vs. 2
  misc_feature: MA Experiment 108545 PARAMETER Experiment Name: Zm_Imbibed_Seeds_P Parameter: Organism Value: Zea mays
  misc_feature: MA Experiment 108545 PARAMETER Experiment Name: Zm_Imbibed_Seeds_P Parameter: Plant Line Value: 35A19
  misc_feature: MA Experiment 108545 PARAMETER Experiment Name: Zm_Imbibed_Seeds_P Parameter: Tissue Value: Aerial vs. Embryo
  misc_feature: MA Experiment ID: 108559 Result: Up-regulated in Transcription
  misc_feature: MA Experiment 108559 PARAMETER Experiment Name: Zm_5mM_NO_P Parameter: Age (day) Value: 8
  misc_feature: MA Experiment 108559 PARAMETER Experiment Name: Zm_5mM_NO_P Parameter: Organism Value: Zea mays
  misc_feature: MA Experiment 108559 PARAMETER Experiment Name: Zm_5mM_NO_P Parameter: Plant Line Value: 35A19
  misc_feature: MA Experiment 108559 PARAMETER Experiment Name: Zm_5mM_NO_P Parameter: Timepoint (hr) Value: 12
  misc_feature: MA Experiment 108559 PARAMETER Experiment Name: Zm_5mM_NO_P Parameter: Tissue Value: Aerial
  misc_feature: MA Experiment 108559 PARAMETER Experiment Name: Zm_5mM_NO_P Parameter: Treatment Value: 5mM NO vs. No Treatment
  misc_feature: MA Experiment ID: 20000492 Result: Up-regulated in Transcription
  misc_feature: MA Experiment 20000492 PARAMETER Experiment Name: Zm_Hybrid_Seed_Dev_P Parameter: DAP Value: 12
  misc_feature: MA Experiment 20000492 PARAMETER Experiment Name: Zm_Hybrid_Seed_Dev_P Parameter: Organism Value: Zea mays
  misc_feature: MA Experiment 20000492 PARAMETER Experiment Name: Zm_Hybrid_Seed_Dev_P Parameter: Plant Line Value: 35A19
  misc_feature: MA Experiment 20000492 PARAMETER Experiment Name: Zm_Hybrid_Seed_Dev_P Parameter: Tissue Value: Fert Kernel vs. Unfert Floret
gaagcatccgactaaaaagggccagggccagggccttcgcttgcttactactcctgcttaccacactctaccttgtctcttcacgtgcacacgacgcctcccccaatggctgcggtggcggaggaggaggtgatcgtcgtcggcgcggggcagtcggggctagcggtggcggcgtgcctgtccctgcgcggcgtgcgggcgctggtcctggagcgcgacgactgcgtggggtcgctgtggcggaagcgcgcctacgaccgcctccacctccacctcaccaagaagtactgcgcgctgccgcacgcgccgcacccggccgaggcccccgcgtacctgcaccgcgacgacttcgcgcggtacctggacgggtacgccgcgcggttcgccgtccgcccgcgcctccgccgcgaggtccggtcggcgcggtacgaccccgcgagcgcgcggtgggaggtggaggccgtggacctcggcacgggccaggccgagcggtacgcggcgaggttcctggtggtcgcgtccggggagaacgccgagaagttcctgccggaggtgcctgggctggaggcgttccccggccaggtgatgcacgcagtggagtaccggtcggccgaggggatgcgcgggaaggccgtgctcgtcgtggggtcgggcaactccggcatggagatcgcctacgacctcgccgccgccggcgccgtcacctccatcgtcgtccgaggcgagctccacctggtgaccaaggagatctggaacgtggcgatgacgctgtacccgtacctgcccgtgtgggttcatagacaagctggtgctgctcatgtgcgccgtggtgttcggcgacacgtcccggcacggcctccgccgccccgccatcgggcccttcaccatgaagctcaccaccccgggctaccccgtcgtggacgtcggcacctacgccaagatcaggagcggcgagatccgggtgctccccgccgccgtcaagagcgtccgcgggaacgtcgtcgagttcggggacggcagccgccaccctttcgacgccatcgtcttcgccaccggctaccggagcactgtcaggcggtggctcaagagcgaggacgggctggtcggtgacgacgggatggcggcgcggagctacccggagcactggaagggggaccacgggctgtactgcgcggggatggtgcggaggggcatctacggcagctgcgaggacgcggagctcatcgccgccgacatcagcaagctgctgcaccccaagcaggagcagggcaacggcgtctagctgcagctagcatttcgctttgttggttgcgatggaaacaagctctattgttgttgggttggttgataataatggttgcgtgaataattaaacgtgcttaattgagatggcctggcccagcctattcgt

SEQ ID NO: 2645 - protein, 334 aa, Zea mays subsp. mays
  peptide (1)..(334): Ceres Seq. ID no. 12406803
  misc_feature (10)..(242): Pfam Name: Pyridine nucleotide-disulphide oxidoreductase Pfam Description: Pyridine nucleotide-disulphide oxidoreductase
  misc_feature (1)..(228): Homolog of NCBI NO: 22327064 NR Description: putative protein
  misc_feature (10)..(230): Homolog of NCBI NO: 15219767 NR Description: putative dimethylaniline monooxygenase; protein
  misc_feature (10)..(230): Homolog of NCBI NO: 15240026 NR Description: dimethylaniline monooxygenase-like; protein id:
  misc_feature (10)..(230): Homolog of NCBI NO: 15219671 NR Description: putative dimethylaniline monooxygenase; protein
  misc_feature (9)..(228): Homolog of NCBI NO: 15218988 NR Description: flavin-containing monooxygenases, putative
  misc_feature (1)..(222): Homolog of NCBI NO: 6979339 NR Description: hypothetical protein, similar to
  misc_feature (6)..(228): Homolog of NCBI NO: 15221995 NR Description: flavin-containing monooxygenase, putative
  misc_feature (1)..(230): Homolog of NCBI NO: 6979340 NR Description: hypothetical protein, similar to
  misc_feature (6)..(229): Homolog of NCBI NO: 6539582 NR Description: unnamed protein product [Oryza sativa (japonica
  misc_feature (1)..(230): Homolog of NCBI NO: 6539579 NR Description: unnamed protein product [Oryza sativa (japonica
MAAVAEEEVIVVGAGQSGLAVAACLSLRGVRALVLERDDCVGSLWRKRAYDRLHLHLTKKYCALPHAPHPAEAPAYLHRDDFARYLDGYAARFAVRPRLRREVRSARYDPASARWEVEAVDLGTGQAERYAARFLVVASGENAEKFLPEVPGLEAFPGQVMHAVEYRSAEGMRGKAVLVVGSGNSGMEIAYDLAAAGAVTSIVVRGELHLVTKEIWNVAMTLYPYLPVWVHRQAGAAHVRRGVRRHVPARPPPPRHRALHHEAHHPGLPRRGRRHLRQDQERRDPGAPRRRQERPRERRRVRGRQPPPFRRHRLRHRLPEHCQAVAQERGRAGR

SEQ ID NO: 2646 - protein, 265 aa, Zea mays subsp. mays
  peptide (1)..(265): Ceres Seq. ID no. 12406804
  misc_feature (32)..(265): Homolog of NCBI NO: 9629269 NR Description: RL2 [Human herpesvirus 2]
SIRLKRARARAFACLLLLLTTLYLVSSRAHDASPNGCGGGGGGDRRRRGAVGASGGGVPVPARRAGAGPGARRLRGVAVAEARLRPPPPPPHQEVLRAAARAAPGRGPRVPAPRRLRAVPGRVRRAVRRPPAPPPRGPVGAVRPRERAVGGGGRGPRHGPGRAVRGEVPGGRVRGERREVPAGGAWAGGVPRPGDARSGVPVGRGDAREGRARRGVGQLRHGDRLRPRRRRRRHLHRRPRRAPPGDQGDLERGDDAVPVPARVGS

SEQ ID NO: 2647 - protein, 174 aa, Zea mays subsp. mays
  peptide (1)..(174): Ceres Seq. ID no. 12406805
  misc_feature (1)..(82): Pfam Name: Pyridine nucleotide-disulphide oxidoreductase Pfam Description: Pyridine nucleotide-disulphide oxidoreductase
  misc_feature (1)..(68): Homolog of NCBI NO: 22327064 NR Description: putative protein
  misc_feature (1)..(70): Homolog of NCBI NO: 15219767 NR Description: putative dimethylaniline monooxygenase; protein
  misc_feature (1)..(70): Homolog of NCBI NO: 15240026 NR Description: dimethylaniline monooxygenase-like; protein id:
  misc_feature (1)..(70): Homolog of NCBI NO: 15219671 NR Description: putative dimethylaniline monooxygenase; protein
  misc_feature (1)..(68): Homolog of NCBI NO: 15218988 NR Description: flavin-containing monooxygenases, putative
  misc_feature (1)..(62): Homolog of NCBI NO: 6979339 NR Description: hypothetical protein, similar to
  misc_feature (1)..(68): Homolog of NCBI NO: 15221995 NR Description: flavin-containing monooxygenase, putative
  misc_feature (1)..(70): Homolog of NCBI NO: 6979340 NR Description: hypothetical protein, similar to
  misc_feature (1)..(69): Homolog of NCBI NO: 6539582 NR Description: unnamed protein product [Oryza sativa (japonica
  misc_feature (1)..(70): Homolog of NCBI NO: 6539579 NR Description: unnamed protein product [Oryza sativa (japonica
MHAVEYRSAEGMRGKAVLVVGSGNSGMEIAYDLAAAGAVTSIVVRGELHLVTKEIWNVAMTLYPYLPVWVHRQAGAAHVRRGVRRHVPARPPPPRHRALHHEAHHPGLPRRGRRHLRQDQERRDPGAPRRRQERPRERRRVRGRQPPPFRRHRLRHRLPEHCQAVAQERGRAGR

SEQ ID NO: 2648 - DNA, 1734 bp, Zea mays subsp. mays
  misc_feature (1)..(1734): Ceres Seq. ID no. 12410608
  misc_feature: MA Experiment ID: 108528 Result: Up-regulated in Transcription
  misc_feature: MA Experiment 108528 PARAMETER Experiment Name: Zm_Imbibed_Seeds_P Parameter: Age (day) Value: 5 vs. 2
  misc_feature: MA Experiment 108528 PARAMETER Experiment Name: Zm_Imbibed_Seeds_P Parameter: Organism Value: Zea mays
  misc_feature: MA Experiment 108528 PARAMETER Experiment Name: Zm_Imbibed_Seeds_P Parameter: Plant Line Value: 35A19
  misc_feature: MA Experiment 108528 PARAMETER Experiment Name: Zm_Imbibed_Seeds_P Parameter: Tissue Value: Aerial vs. Embryo
  misc_feature: MA Experiment ID: 108529 Result: Up-regulated in Transcription
  misc_feature: MA Experiment 108529 PARAMETER Experiment Name: Zm_Imbibed_Seeds_P Parameter: Age (day) Value: 5 vs. 2
  misc_feature: MA Experiment 108529 PARAMETER Experiment Name: Zm_Imbibed_Seeds_P Parameter: Organism Value: Zea mays
  misc_feature: MA Experiment 108529 PARAMETER Experiment Name: Zm_Imbibed_Seeds_P Parameter: Plant Line Value: 35A19
  misc_feature: MA Experiment 108529 PARAMETER Experiment Name: Zm_Imbibed_Seeds_P Parameter: Tissue Value: Roots vs. Embryo
  misc_feature: MA Experiment ID: 108530 Result: Up-regulated in Transcription
  misc_feature: MA Experiment 108530 PARAMETER Experiment Name: Zm_Imbibed_Seeds_P Parameter: Age (day) Value: 6 vs. 2
  misc_feature: MA Experiment 108530 PARAMETER Experiment Name: Zm_Imbibed_Seeds_P Parameter: Organism Value: Zea mays
  misc_feature: MA Experiment 108530 PARAMETER Experiment Name: Zm_Imbibed_Seeds_P Parameter: Plant Line Value: 35A19
  misc_feature: MA Experiment 108530 PARAMETER Experiment Name: Zm_Imbibed_Seeds_P Parameter: Tissue Value: Aerial vs. Embryo
  misc_feature: MA Experiment ID: 108534 Result: Up-regulated in Transcription
  misc_feature: MA Experiment 108534 PARAMETER Experiment Name: Zm_4deg_Cold_P Parameter: Age (hr) Value: 8
  misc_feature: MA Experiment 108534 PARAMETER Experiment Name: Zm_4deg_Cold_P Parameter: Organism Value: Zea mays
  misc_feature: MA Experiment 108534 PARAMETER Experiment Name: Zm_4deg_Cold_P Parameter: Plant Line Value: 35A19
  misc_feature: MA Experiment 108534 PARAMETER Experiment Name: Zm_4deg_Cold_P Parameter: Temperature (deg C) Value: 4 vs. 22
  misc_feature: MA Experiment 108534 PARAMETER Experiment Name: Zm_4deg_Cold_P Parameter: Timepoint (hr) Value: 6
  misc_feature: MA Experiment 108534 PARAMETER Experiment Name: Zm_4deg_Cold_P Parameter: Tissue Value: Aerial
  misc_feature: MA Experiment ID: 108535 Result: Down-regulated in Transcription
  misc_feature: MA Experiment 108535 PARAMETER Experiment Name: Zm_Meristem_P Parameter: Age (day) Value: 8
  misc_feature: MA Experiment 108535 PARAMETER Experiment Name: Zm_Meristem_P Parameter: Organism Value: Zea mays
  misc_feature: MA Experiment 108535 PARAMETER Experiment Name: Zm_Meristem_P Parameter: Plant Line Value: 35A19
  misc_feature: MA Experiment 108535 PARAMETER Experiment Name: Zm_Meristem_P Parameter: Tissue Value: Root Meristem vs. Above Root Meristem
  misc_feature: MA Experiment ID: 108543 Result: Up-regulated in Transcription
  misc_feature: MA Experiment ID: 108544 Result: Up-regulated in Transcription
  misc_feature: MA Experiment ID: 108547 Result: Up-regulated in Transcription
  misc_feature: MA Experiment 108547 PARAMETER Experiment Name: Zm_Imbibed_Seeds_P Parameter: Age (day) Value: 4 vs. 2
  misc_feature: MA Experiment 108547 PARAMETER Experiment Name: Zm_Imbibed_Seeds_P Parameter: Organism Value: Zea mays
  misc_feature: MA Experiment 108547 PARAMETER Experiment Name: Zm_Imbibed_Seeds_P Parameter: Plant Line Value: 35A19
  misc_feature: MA Experiment 108547 PARAMETER Experiment Name: Zm_Imbibed_Seeds_P Parameter: Tissue Value: Aerial vs. Embryo
  misc_feature: MA Experiment ID: 108556 Result: Up-regulated in Transcription
  misc_feature: MA Experiment 108556 PARAMETER Experiment Name: Zm_Drought_P Parameter: Age (day) Value: 9
  misc_feature: MA Experiment 108556 PARAMETER Experiment Name: Zm_Drought_P Parameter: Organism Value: Zea mays
  misc_feature: MA Experiment 108556 PARAMETER Experiment Name: Zm_Drought_P Parameter: Plant Line Value: 35A19
  misc_feature: MA Experiment 108556 PARAMETER Experiment Name: Zm_Drought_P Parameter: Timepoint (hr) Value: 24
  misc_feature: MA Experiment 108556 PARAMETER Experiment Name: Zm_Drought_P Parameter: Tissue Value: Aerial
  misc_feature: MA Experiment 108556 PARAMETER Experiment Name: Zm_Drought_P Parameter: Treatment Value: Drought vs. No Drought
  misc_feature: MA Experiment ID: 20000108 Result: Down-regulated in Transcription
  misc_feature: MA Experiment 20000108 PARAMETER Experiment Name: Zm_Root-Tips_P Parameter: Age (day) Value: 12
  misc_feature: MA Experiment 20000108 PARAMETER Experiment Name: Zm_Root-Tips_P Parameter: Organism Value: Zea mays
  misc_feature: MA Experiment 20000108 PARAMETER Experiment Name: Zm_Root-Tips_P Parameter: Tissue Value: Root tips vs. Root mid region    35
  misc_feature: MA Experiment 20000108 PARAMETER Experiment Name: Zm_Root-Tips_P Parameter: Tissue Value: Root tips vs. Root mid region   Sequence Listing-Misc Features (4)
  misc_feature: MA Experiment ID: 20000492 Result: Down-regulated in Transcription
  misc_feature: MA Experiment 20000492 PARAMETER Experiment Name: Zm_Hybrid_Seed_Dev_P Parameter: DAP Value: 12
  misc_feature: MA Experiment 20000492 PARAMETER Experiment Name: Zm_Hybrid_Seed_Dev_P Parameter: Organism Value: Zea mays
  misc_feature: MA Experiment 20000492 PARAMETER Experiment Name: Zm_Hybrid_Seed_Dev_P Parameter: Plant Line Value: 35A19
  misc_feature: MA Experiment 20000492 PARAMETER Experiment Name: Zm_Hybrid_Seed_Dev_P Parameter: Tissue Value: Fert Kernel vs. Unfert Floret
  misc_feature: MA Experiment ID: 20000535 Result: Down-regulated in Transcription
  misc_feature: MA Experiment 20000535 PARAMETER Experiment Name: Zm_Hybrid_Seed_Dev_P Parameter: DAP Value: 30 vs. 12
  misc_feature: MA Experiment 20000535 PARAMETER Experiment Name: Zm_Hybrid_Seed_Dev_P Parameter: Organism Value: Zea mays
  misc_feature: MA Experiment 20000535 PARAMETER Experiment Name: Zm_Hybrid_Seed_Dev_P Parameter: Plant Line Value: 35A19
  misc_feature: MA Experiment 20000535 PARAMETER Experiment Name: Zm_Hybrid_Seed_Dev_P Parameter: Tissue Value: Embryo vs. Unfert Floret
atagaagaagagcaggcaggagctataagtaccccgcccccttccaccctctccttccacctccctcccttgctgcctcatccattccagagctgcgaagacagacagacagagagaaagagggatcgacggagcaaggcggggccgtgtccggtcacacacgagcgagccctctcggccgcgcgtttgtgaatggtgaacggcgagcggcgggcggacgcggagtgcacgcgggcgtcgctgctggggaggtatgagatcgggcggaccctcggcgagggcaacttcggcaaggtgaagtacgcgcgccacatcgccagcggcggccacttcgccatcaagatcctcgaccgcagcaagatcctctccctccgcatcgacgaccagatcaggagggagatcgggacgctcaagctgctcaagcacccgaatgtcgtccgcttgcacgaggttgctgccagtaaaacgaagatctacatggtgcttgagtttgtcaacggcggcgagctcttcgacaagatcgctatcaaggggaaactgtccgaacacgagggcaggaggctcttccagcagctaatcgacggcgtcagctattgccatgacagaggtgtctaccaccgagacctcaagccagagaatgtccttgttgatcggaagggcaccatcaagatctctgacttcggcctcagcgctctacctcaacatctcgggagtgacggacttctgcacacaacatgtggcagccccaactacatagctcctgaggttctgcaaaacagaggctatgacggctccttgtcagatctctggtcgtgtggggtgatcctctacgtgatgcttgttggctgccttcccctcgacgacaggaacctcgtcgttctttatcagaagattttcaagggagactgtcagatccccaagtggctttcgcctgccgcgcaggaccttctcaagaggatcctccaaccgaatccgatgaagaggatcaacgtcgcggggatcagggagcacgagtggttcaagaaggactacgtgcctgctgttccgcacgatgatgacgaagacgtccttcctagtccagctccctcgataaagccaatcgatgagccggcgcaagagaagtgttctcctatcaacgcttttcagttgatcgggatggcctcttcccttgacctttctggtttcttcgaggaagaggatgcagcgcaaagaaagattcggttcacttcgacgcacccacccaaggatctatttgacaagatcgagagcgttgtcatggagatgggattcaaagtccataggggggcaggcaagctcaaggtcttgaagaatagcaagtgttccaggaacccgtcatcattgttggtgtgcaccgaggtgtttgagctcggtccatcattatatgtcgtagagcttaggaaatcccacggagactctacgttgtatagacagctgtgcgaaaggctctccgatgagctaggtgcctgcaagacagaccagatcgcgaggactgaatcatcgagtgacgacctctcgagcgtcgatggcgaagcgttccctctatctgggttctgatcatattgctttccctgtgttgttttgggaacaggggatgaggaacatgctcgttcctgatgcaattctagattaggatcatgaatatagtgtacaaagccagcggcggcggcggtgcaaattagccaccgggttgaatataaataatatatatatatg

SEQ ID NO: 2649 - protein, 460 aa, Zea mays subsp. mays
  peptide (1)..(460): Ceres Seq. ID no. 12410609
  misc_feature (21)..(276): Pfam Name: Protein kinase domain Pfam Description: Protein kinase domain
  misc_feature (18)..(110): Homolog of NCBI NO: 8778506 NR Description: F21D18.2 [Arabidopsis thaliana]
  misc_feature (109)..(431): Homolog of NCBI NO: 8778506 NR Description: F21D18.2 [Arabidopsis thaliana]
  misc_feature (18)..(421): Homolog of NCBI NO: 25387053 NR Description: hypothetical protein F11A17.18 [imported] -
  misc_feature (18)..(431): Homolog of NCBI NO: 15221136 NR Description: serine threonine kinase, putative
  misc_feature (6)..(422): Homolog of NCBI NO: 9294138 NR Description: serine/threonine kinase [Arabidopsis thaliana]
  misc_feature (6)..(436): Homolog of NCBI NO: 20260556 NR Description: unknown protein [Arabidopsis thaliana]
  misc_feature (6)..(436): Homolog of NCBI NO: 11066952 NR Description: CBL-interacting protein kinase 1 [Arabidopsis
  misc_feature (6)..(436): Homolog of NCBI NO: 18401539 NR Description: expressed protein
  misc_feature (18)..(447): Homolog of NCBI NO: 23237825 NR Description: putative serine/threonine kinase
  misc_feature (1)..(460): Homolog of NCBI NO: 34894358 NR Description: unnamed protein product [Oryza sativa (japonica
MVNGERRADAECTRASLLGRYEIGRTLGEGNFGKVKYARHIASGGHFAIKILDRSKILSLRIDDQIRREIGTLKLLKHPNVVRLHEVAASKTKIYMVLEFVNGGELFDKIAIKGKLSEHEGRRLFQQLIDGVSYCHDRGVYHRDLKPENVLVDRKGTIKISDFGLSALPQHLGSDGLLHTTCGSPNYIAPEVLQNRGYDGSLSDLWSCGVILYVMLVGCLPLDDRNLVVLYQKIFKGDCQIPKWLSPAAQDLLKRILQPNPMKRINVAGIREHEWFKKDYVPAVPHDDDEDVLPSPAPSIKPIDEPAQEKCSPINAFQLIGMASSLDLSGFFEEEDAAQRKIRFTSTHPPKDLFDKIESVVMEMGFKVHRGAGKLKVLKNSKCSRNPSSLLVCTEVFELGPSLYVVELRKSHGDSTLYRQLCERLSDELGACKTDQIARTESSSDDLSSVDGEAFPLSGF

SEQ ID NO: 2650 - protein, 365 aa, Zea mays subsp. mays
  peptide (1)..(365): Ceres Seq. ID no. 12410610
  misc_feature (1)..(181): Pfam Name: Protein kinase domain Pfam Description: Protein kinase domain
  misc_feature (1)..(15): Homolog of NCBI NO: 8778506 NR Description: F21D18.2 [Arabidopsis thaliana]
  misc_feature (14)..(336): Homolog of NCBI NO: 8778506 NR Description: F21D18.2 [Arabidopsis thaliana]
  misc_feature (1)..(326): Homolog of NCBI NO: 25387053 NR Description: hypothetical protein F11A17.18 [imported] -
  misc_feature (1)..(336): Homolog of NCBI NO: 15221136 NR Description: serine threonine kinase, putative
  misc_feature (1)..(327): Homolog of NCBI NO: 9294138 NR Description: serine/threonine kinase [Arabidopsis thaliana]
  misc_feature (1)..(341): Homolog of NCBI NO: 20260556 NR Description: unknown protein [Arabidopsis thaliana]
  misc_feature (1)..(341): Homolog of NCBI NO: 11066952 NR Description: CBL-interacting protein kinase 1 [Arabidopsis
  misc_feature (1)..(341): Homolog of NCBI NO: 18401539 NR Description: expressed protein
  misc_feature (1)..(352): Homolog of NCBI NO: 23237825 NR Description: putative serine/threonine kinase
  misc_feature (1)..(365): Homolog of NCBI NO: 34894358 NR Description: unnamed protein product [Oryza sativa (japonica
MVLEFVNGGELFDKIAIKGKLSEHEGRRLFQQLIDGVSYCHDRGVYHRDLKPENVLVDRKGTIKISDFGLSALPQHLGSDGLLHTTCGSPNYIAPEVLQNRGYDGSLSDLWSCGVILYVMLVGCLPLDDRNLVVLYQKIFKGDCQIPKWLSPAAQDLLKRILQPNPMKRINVAGIREHEWFKKDYVPAVPHDDDEDVLPSPAPSIKPIDEPAQEKCSPINAFQLIGMASSLDLSGFFEEEDAAQRKIRFTSTHPPKDLFDKIESVVMEMGFKVHRGAGKLKVLKNSKCSRNPSSLLVCTEVFELGPSLYVVELRKSHGDSTLYRQLCERLSDELGACKTDQIARTESSSDDLSSVDGEAFPLSGF

SEQ ID NO: 2651 - protein, 246 aa, Zea mays subsp. mays
  peptide (1)..(246): Ceres Seq. ID no. 12410611
  misc_feature (1)..(62): Pfam Name: Protein kinase domain Pfam Description: Protein kinase domain
  misc_feature (1)..(232): Homolog of NCBI NO: 30677901 NR Description: CBL-interacting protein kinase 9 [Arabidopsis
  misc_feature (1)..(217): Homolog of NCBI NO: 8778506 NR Description: F21D18.2 [Arabidopsis thaliana]
  misc_feature (1)..(207): Homolog of NCBI NO: 25387053 NR Description: hypothetical protein F11A17.18 [imported] -
  misc_feature (1)..(217): Homolog of NCBI NO: 15221136 NR Description: serine threonine kinase, putative
  misc_feature (1)..(208): Homolog of NCBI NO: 9294138 NR Description: serine/threonine kinase [Arabidopsis thaliana]
  misc_feature (1)..(222): Homolog of NCBI NO: 20260556 NR Description: unknown protein [Arabidopsis thaliana]
  misc_feature (1)..(222): Homolog of NCBI NO: 11066952 NR Description: CBL-interacting protein kinase 1 [Arabidopsis
  misc_feature (1)..(222): Homolog of NCBI NO: 18401539 NR Description: expressed protein
  misc_feature (1)..(233): Homolog of NCBI NO: 23237825 NR Description: putative serine/threonine kinase
  misc_feature (1)..(246): Homolog of NCBI NO: 34894358 NR Description: unnamed protein product [Oryza sativa (japonica
MLVGCLPLDDRNLVVLYQKIFKGDCQIPKWLSPAAQDLLKRILQPNPMKRINVAGIREHEWFKKDYVPAVPHDDDEDVLPSPAPSIKPIDEPAQEKCSPINAFQLIGMASSLDLSGFFEEEDAAQRKIRFTSTHPPKDLFDKIESVVMEMGFKVHRGAGKLKVLKNSKCSRNPSSLLVCTEVFELGPSLYVVELRKSHGDSTLYRQLCERLSDELGACKTDQIARTESSSDDLSSVDGEAFPLSGF

SEQ ID NO: 2652 - DNA, 1366 bp, Zea mays subsp. mays
  misc_feature (1)..(1366): Ceres Seq. ID no. 12342621
  misc_feature: MA Experiment ID: 108536 Result: Up-regulated in Transcription
  misc_feature: MA Experiment 108536 PARAMETER Experiment Name: Zm_Meristem_P Parameter: Age (day) Value: 8
  misc_feature: MA Experiment 108536 PARAMETER Experiment Name: Zm_Meristem_P Parameter: Organism Value: Zea mays
  misc_feature: MA Experiment 108536 PARAMETER Experiment Name: Zm_Meristem_P Parameter: Plant Line Value: 35A19
  misc_feature: MA Experiment 108536 PARAMETER Experiment Name: Zm_Meristem_P Parameter: Tissue Value: Shoot Meristem vs. Above Shoot Meristem
  misc_feature: MA Experiment ID: 108556 Result: Up-regulated in Transcription
  misc_feature: MA Experiment 108556 PARAMETER Experiment Name: Zm_Drought_P Parameter: Age (day) Value: 9
  misc_feature: MA Experiment 108556 PARAMETER Experiment Name: Zm_Drought_P Parameter: Organism Value: Zea mays
  misc_feature: MA Experiment 108556 PARAMETER Experiment Name: Zm_Drought_P Parameter: Plant Line Value: 35A19
  misc_feature: MA Experiment 108556 PARAMETER Experiment Name: Zm_Drought_P Parameter: Timepoint (hr) Value: 24
  misc_feature: MA Experiment 108556 PARAMETER Experiment Name: Zm_Drought_P Parameter: Tissue Value: Aerial
  misc_feature: MA Experiment 108556 PARAMETER Experiment Name: Zm_Drought_P Parameter: Treatment Value: Drought vs. No Drought
  misc_feature: MA Experiment ID: 108689 Result: Up-regulated in Transcription
  misc_feature: MA Experiment 108689 PARAMETER Experiment Name: Zm_Drought_Roots_P Parameter: Age (day) Value: 9
  misc_feature: MA Experiment 108689 PARAMETER Experiment Name: Zm_Drought_Roots_P Parameter: Organism Value: Zea mays
  misc_feature: MA Experiment 108689 PARAMETER Experiment Name: Zm_Drought_Roots_P Parameter: Plant Line Value: 35A19
  misc_feature: MA Experiment 108689 PARAMETER Experiment Name: Zm_Drought_Roots_P Parameter: Timepoint (hr) Value: 24
  misc_feature: MA Experiment 108689 PARAMETER Experiment Name: Zm_Drought_Roots_P Parameter: Tissue Value: Roots
  misc_feature: MA Experiment 108689 PARAMETER Experiment Name: Zm_Drought_Roots_P Parameter: Treatment Value: Drought vs. No Drought
ctgatgtcacctgctgcctctctccaattctttcttcttctctccatgtaaaattatgtccaaacccaccctactcccgcgagcgcatttataaaataaagggcactgatgcctgctgtcttgttctgcccccctgttttccttttattctgctccgctctgttctcctgcgggcctggctgcgccggggaggcaaatgcttagcacaggacttggccttctggaatcccccgctaaaccataggcgtgttctattggaagttggaacaaaaccatggagagtgaaatcatggcctcctatgaaacaaagcagaattgcgaaattagggtatttgagagttcagacgagatggcaacagatctggcagagtttatttcacaagcttcagaaatttcagttaaggaaagaggatgctttgctattgccctttctggaggtcctcttgttagacatatgcggaagctctgtgaagcaccatacaacaagacccttgattggtctaaatggtacatcttctgggctgaagaacgtgcagttgcaaagaaccatgcagagagtaactacaaattaacaaaggaagaatttctctccaaggtgcctatccttaacggccacgtctactccatcaacgacaacgcgacggtggaagaggcagcgagcgactacgagttcgtgatgcggcagctggtgaaggtccggacggtgggagtctcggagagcaacgactgccccagattcgacctggtccttctgaacatcgggcctgacgggcacgtagcctcgctgttccccaaccacccagcgctggagctgaaaggcgactgggtgacctacatcaccgactccccggagcctccgcccgagaggatcaccttcacccttcccgtcataaactcggcgtccagcgtcgccattgttgccaccggagaggacagggcgagagccgtgtccttctccgtctctgcctgccaggaccaggaggaggaaggcccagcagacgacgacgctggaacgacgatgataccgccggctagcatggttcagccaaccgatgggaagttggtatggttcctggacgaggcggctgcttcgtctcttgaggcttcgaatggcgcttgcgagcatcaagaagggtactgagaacagactggatgctacctctgcgaacgccgcctacagtactctctggtttcttcagagtcgaaagtttgcatgcagttggatgtgggcaattaagagtgaagcggtttgtgtgtttttatgtcaagacctcacgcatatcgcgcggagtagctaagctcgaccgtatattggttgcgacgtatgatccttgttttatttaagtgtgttggcggttttatcctg

SEQ ID NO: 2653 - protein, 288 aa, Zea mays subsp. mays
  peptide (1)..(288): Ceres Seq. ID no. 12342622
  misc_feature (33)..(276): Pfam Name: Glucosamine-6-phosphate Pfam Description: Glucosamine-6-phosphate
  misc_feature (19)..(275): Homolog of NCBI NO: 14009294 NR Description: putative 6-phosphogluconolactonase [Brassica
  misc_feature (19)..(208): Homolog of NCBI NO: 21537412 NR Description: 6-phosphogluconolactonase-like protein
  misc_feature (18)..(282): Homolog of NCBI NO: 21536675 NR Description: 6-phosphogluconolactonase-like protein
  misc_feature (18)..(282): Homolog of NCBI NO: 15229127 NR Description: 6-phosphogluconolactonase - like protein
  misc_feature (10)..(275): Homolog of NCBI NO: 10177901 NR Description: 6-phosphogluconolactonase-like protein
  misc_feature (1)..(275): Homolog of NCBI NO: 18420789 NR Description: 6-phosphogluconolactonase-like protein
  misc_feature (1)..(275): Homolog of NCBI NO: 21554291 NR Description: 6-phosphogluconolactonase-like protein
  misc_feature (16)..(275): Homolog of NCBI NO: 28140256 NR Description: putative 6-phosphogluconolactonase [Elaeis
  misc_feature (12)..(276): Homolog of NCBI NO: 15222922 NR Description: unknown protein; protein id: At1g13700.1
  misc_feature (1)..(286): Homolog of NCBI NO: 34394567 NR Description: putative 6-phosphogluconolactonase
MESEIMASYETKQNCEIRVFESSDEMATDLAEFISQASEISVKERGCFAIALSGGPLVRHMRKLCEAPYNKTLDWSKWYIFWAEERAVAKNHAESNYKLTKEEFLSKVPILNGHVYSINDNATVEEAASDYEFVMRQLVKVRTVGVSESNDCPRFDLVLLNIGPDGHVASLFPNHPALELKGDWVTYITDSPEPPPERITFTLPVINSASSVAIVATGEDRARAVSFSVSACQDQEEEGPADDDAGTTMIPPASMVQPTDGKLVWFLDEAAASSLEASNGACEHQEGY

SEQ ID NO: 2654 - protein, 283 aa, Zea mays subsp. mays
  peptide (1)..(283): Ceres Seq. ID no. 12342623
  misc_feature (28)..(271): Pfam Name: Glucosamine-6-phosphate Pfam Description: Glucosamine-6-phosphate
  misc_feature (1)..(270): Homolog of NCBI NO: 21554291 NR Description: 6-phosphogluconolactonase-like protein
  misc_feature (11)..(270): Homolog of NCBI NO: 28140256 NR Description: putative 6-phosphogluconolactonase [Elaeis
  misc_feature (14)..(270): Homolog of NCBI NO: 14009294 NR Description: putative 6-phosphogluconolactonase [Brassica
  misc_feature (13)..(277): Homolog of NCBI NO: 21536675 NR Description: 6-phosphogluconolactonase-like protein
  misc_feature (5)..(270): Homolog of NCBI NO: 10177901 NR Description: 6-phosphogluconolactonase-like protein
  misc_feature (1)..(270): Homolog of NCBI NO: 18420789 NR Description: 6-phosphogluconolactonase-like protein
  misc_feature (13)..(277): Homolog of NCBI NO: 15229127 NR Description: 6-phosphogluconolactonase - like protein
  misc_feature (14)..(203): Homolog of NCBI NO: 21537412 NR Description: 6-phosphogluconolactonase-like protein
  misc_feature (7)..(271): Homolog of NCBI NO: 15222922 NR Description: unknown protein; protein id: At1g13700.1
  misc_feature (1)..(281): Homolog of NCBI NO: 34394567 NR Description: putative 6-phosphogluconolactonase
MASYETKQNCEIRVFESSDEMATDLAEFISQASEISVKERGCFAIALSGGPLVRHMRKLCEAPYNKTLDWSKWYIFWAEERAVAKNHAESNYKLTKEEFLSKVPILNGHVYSINDNATVEEAASDYEFVMRQLVKVRTVGVSESNDCPRFDLVLLNIGPDGHVASLFPNHPALELKGDWVTYITDSPEPPPERITFTLPVINSASSVAIVATGEDRARAVSFSVSACQDQEEEGPADDDAGTTMIPPASMVQPTDGKLVWFLDEAAASSLEASNGACEHQEGY

SEQ ID NO: 2655 - protein, 263 aa, Zea mays subsp. mays
  peptide (1)..(263): Ceres Seq. ID no. 12342624
  misc_feature (8)..(251): Pfam Name: Glucosamine-6-phosphate Pfam Description: Glucosamine-6-phosphate
  misc_feature (1)..(250): Homolog of NCBI NO: 14009294 NR Description: putative 6-phosphogluconolactonase [Brassica
  misc_feature (1)..(183): Homolog of NCBI NO: 21537412 NR Description: 6-phosphogluconolactonase-like protein
  misc_feature (1)..(257): Homolog of NCBI NO: 21536675 NR Description: 6-phosphogluconolactonase-like protein
  misc_feature (1)..(257): Homolog of NCBI NO: 15229127 NR Description: 6-phosphogluconolactonase - like protein
  misc_feature (1)..(250): Homolog of NCBI NO: 10177901 NR Description: 6-phosphogluconolactonase-like protein
  misc_feature (1)..(250): Homolog of NCBI NO: 18420789 NR Description: 6-phosphogluconolactonase-like protein
  misc_feature (1)..(250): Homolog of NCBI NO: 21554291 NR Description: 6-phosphogluconolactonase-like protein
  misc_feature (1)..(250): Homolog of NCBI NO: 28140256 NR Description: putative 6-phosphogluconolactonase [Elaeis
  misc_feature (1)..(251): Homolog of NCBI NO: 15222922 NR Description: unknown protein; protein id: At1g13700.1
  misc_feature (1)..(261): Homolog of NCBI NO: 34394567 NR Description: putative 6-phosphogluconolactonase
MATDLAEFISQASEISVKERGCFAIALSGGPLVRHMRKLCEAPYNKTLDWSKWYIFWAEERAVAKNHAESNYKLTKEEFLSKVPILNGHVYSINDNATVEEAASDYEFVMRQLVKVRTVGVSESNDCPRFDLVLLNIGPDGHVASLFPNHPALELKGDWVTYITDSPEPPPERITFTLPVINSASSVAIVATGEDRARAVSFSVSACQDQEEEGPADDDAGTTMIPPASMVQPTDGKLVWFLDEAAASSLEASNGACEHQEGY

SEQ ID NO: 2656 - DNA, 1212 bp, Zea mays subsp. mays
  misc_feature (1)..(1212): Ceres Seq. ID no. 12352091
  misc_feature: MA Experiment ID: 108504 Result: Up-regulated in Transcription
  misc_feature: MA Experiment 108504 PARAMETER Experiment Name: Zm_Drought_P Parameter: Age (day) Value: 8
  misc_feature: MA Experiment 108504 PARAMETER Experiment Name: Zm_Drought_P Parameter: Organism Value: Zea mays
  misc_feature: MA Experiment 108504 PARAMETER Experiment Name: Zm_Drought_P Parameter: Plant Line Value: 35A19
  misc_feature: MA Experiment 108504 PARAMETER Experiment Name: Zm_Drought_P Parameter: Timepoint (hr) Value: 12
  misc_feature: MA Experiment 108504 PARAMETER Experiment Name: Zm_Drought_P Parameter: Tissue Value: Aerial
  misc_feature: MA Experiment 108504 PARAMETER Experiment Name: Zm_Drought_P Parameter: Treatment Value: Drought vs. No Drought
  misc_feature: MA Experiment ID: 108515 Result: Up-regulated in Transcription
  misc_feature: MA Experiment 108515 PARAMETER Experiment Name: Zm_2mM_SA_P Parameter: Age (day) Value: 8
  misc_feature: MA Experiment 108515 PARAMETER Experiment Name: Zm_2mM_SA_P Parameter: Organism Value: Zea mays
  misc_feature: MA Experiment 108515 PARAMETER Experiment Name: Zm_2mM_SA_P Parameter: Plant Line Value: 35A19
  misc_feature: MA Experiment 108515 PARAMETER Experiment Name: Zm_2mM_SA_P Parameter: Timepoint (hr) Value: 12
  misc_feature: MA Experiment 108515 PARAMETER Experiment Name: Zm_2mM_SA_P Parameter: Tissue Value: Aerial
  misc_feature: MA Experiment 108515 PARAMETER Experiment Name: Zm_2mM_SA_P Parameter: Treatment Value: 2mM SA vs. No Treatment
  misc_feature: MA Experiment ID: 108522 Result: Up-regulated in Transcription
  misc_feature: MA Experiment 108522 PARAMETER Experiment Name: Zm_42deg_Heat_P Parameter: Age (day) Value: 8
  misc_feature: MA Experiment 108522 PARAMETER Experiment Name: Zm_42deg_Heat_P Parameter: Organism Value: Zea mays
  misc_feature: MA Experiment 108522 PARAMETER Experiment Name: Zm_42deg_Heat_P Parameter: Plant Line Value: 35A19
  misc_feature: MA Experiment 108522 PARAMETER Experiment Name: Zm_42deg_Heat_P Parameter: Temperature (deg C) Value: 42 vs. 22
  misc_feature: MA Experiment 108522 PARAMETER Experiment Name: Zm_42deg_Heat_P Parameter: Timepoint (hr) Value: 1
  misc_feature: MA Experiment 108522 PARAMETER Experiment Name: Zm_42deg_Heat_P Parameter: Tissue Value: Aerial
  misc_feature: MA Experiment ID: 108523 Result: Up-regulated in Transcription
  misc_feature: MA Experiment 108523 PARAMETER Experiment Name: Zm_42deg_Heat_P Parameter: Age (day) Value: 8
  misc_feature: MA Experiment 108523 PARAMETER Experiment Name: Zm_42deg_Heat_P Parameter: Organism Value: Zea mays
  misc_feature: MA Experiment 108523 PARAMETER Experiment Name: Zm_42deg_Heat_P Parameter: Plant Line Value: 35A19
  misc_feature: MA Experiment 108523 PARAMETER Experiment Name: Zm_42deg_Heat_P Parameter: Temperature (deg C) Value: 42 vs. 22
  misc_feature: MA Experiment 108523 PARAMETER Experiment Name: Zm_42deg_Heat_P Parameter: Timepoint (hr) Value: 6
  misc_feature: MA Experiment 108523 PARAMETER Experiment Name: Zm_42deg_Heat_P Parameter: Tissue Value: Aerial
  misc_feature: MA Experiment ID: 108527 Result: Up-regulated in Transcription
  misc_feature: MA Experiment 108527 PARAMETER Experiment Name: Zm_5mM_NO_P Parameter: Age (day) Value: 8
  misc_feature: MA Experiment 108527 PARAMETER Experiment Name: Zm_5mM_NO_P Parameter: Organism Value: Zea mays
  misc_feature: MA Experiment 108527 PARAMETER Experiment Name: Zm_5mM_NO_P Parameter: Plant Line Value: 35A19
  misc_feature: MA Experiment 108527 PARAMETER Experiment Name: Zm_5mM_NO_P Parameter: Timepoint (hr) Value: 6
  misc_feature: MA Experiment 108527 PARAMETER Experiment Name: Zm_5mM_NO_P Parameter: Tissue Value: Aerial
  misc_feature: MA Experiment 108527 PARAMETER Experiment Name: Zm_5mM_NO_P Parameter: Treatment Value: 5mM NO vs. No Treatment
  misc_feature: MA Experiment ID: 108528 Result: Up-regulated in Transcription
  misc_feature: MA Experiment 108528 PARAMETER Experiment Name: Zm_Imbibed_Seeds_P Parameter: Age (day) Value: 5 vs. 2
  misc_feature: MA Experiment 108528 PARAMETER Experiment Name: Zm_Imbibed_Seeds_P Parameter: Organism Value: Zea mays
  misc_feature: MA Experiment 108528 PARAMETER Experiment Name: Zm_Imbibed_Seeds_P Parameter: Plant Line Value: 35A19
  misc_feature: MA Experiment 108528 PARAMETER Experiment Name: Zm_Imbibed_Seeds_P Parameter: Tissue Value: Aerial vs. Embryo
  misc_feature: MA Experiment ID: 108530 Result: Up-regulated in Transcription
  misc_feature: MA Experiment 108530 PARAMETER Experiment Name: Zm_Imbibed_Seeds_P Parameter: Age (day) Value: 6 vs. 2
  misc_feature: MA Experiment 108530 PARAMETER Experiment Name: Zm_Imbibed_Seeds_P Parameter: Organism Value: Zea mays
  misc_feature: MA Experiment 108530 PARAMETER Experiment Name: Zm_Imbibed_Seeds_P Parameter: Plant Line Value: 35A19
  misc_feature: MA Experiment 108530 PARAMETER Experiment Name: Zm_Imbibed_Seeds_P Parameter: Tissue Value: Aerial vs. Embryo
  misc_feature: MA Experiment ID: 108535 Result: Up-regulated in Transcription
  misc_feature: MA Experiment 108535 PARAMETER Experiment Name: Zm_Meristem_P Parameter: Age (day) Value: 8
  misc_feature: MA Experiment 108535 PARAMETER Experiment Name: Zm_Meristem_P Parameter: Organism Value: Zea mays
  misc_feature: MA Experiment 108535 PARAMETER Experiment Name: Zm_Meristem_P Parameter: Plant Line Value: 35A19
  misc_feature: MA Experiment 108535 PARAMETER Experiment Name: Zm_Meristem_P Parameter: Tissue Value: Root Meristem vs. Above Root Meristem
  misc_feature: MA Experiment ID: 108543 Result: Down-regulated in Transcription
  misc_feature: MA Experiment ID: 108544 Result: Down-regulated in Transcription
  misc_feature: MA Experiment ID: 108545 Result: Up-regulated in Transcription
  misc_feature: MA Experiment 108545 PARAMETER Experiment Name: Zm_Imbibed_Seeds_P Parameter: Age (day) Value: 3 vs. 2
  misc_feature: MA Experiment 108545 PARAMETER Experiment Name: Zm_Imbibed_Seeds_P Parameter: Organism Value: Zea mays
  misc_feature: MA Experiment 108545 PARAMETER Experiment Name: Zm_Imbibed_Seeds_P Parameter: Plant Line Value: 35A19
  misc_feature: MA Experiment 108545 PARAMETER Experiment Name: Zm_Imbibed_Seeds_P Parameter: Tissue Value: Aerial vs. Embryo
  misc_feature: MA Experiment ID: 108597 Result: Up-regulated in Transcription
  misc_feature: MA Experiment 108597 PARAMETER Experiment Name: Zm_100uM_ABA_P Parameter: Age (day) Value: 9
  misc_feature: MA Experiment 108597 PARAMETER Experiment Name: Zm_100uM_ABA_P Parameter: Organism Value: Zea mays
  misc_feature: MA Experiment 108597 PARAMETER Experiment Name: Zm_100uM_ABA_P Parameter: Plant Line Value: 35A19
  misc_feature: MA Experiment 108597 PARAMETER Experiment Name: Zm_100uM_ABA_P Parameter: Timepoint (hr) Value: 24
  misc_feature: MA Experiment 108597 PARAMETER Experiment Name: Zm_100uM_ABA_P Parameter: Tissue Value: Aerial
  misc_feature: MA Experiment 108597 PARAMETER Experiment Name: Zm_100uM_ABA_P Parameter: Treatment Value: 100uM ABA vs. No Treatment
  misc_feature: MA Experiment ID: 20000478 Result: Up-regulated in Transcription
  misc_feature: MA Experiment 20000478 PARAMETER Experiment Name: Zm_5mM_SA_P Parameter: Age (day) Value: 11
  misc_feature: MA Experiment 20000478 PARAMETER Experiment Name: Zm_5mM_SA_P Parameter: Organism Value: Zea mays
  misc_feature: MA Experiment 20000478 PARAMETER Experiment Name: Zm_5mM_SA_P Parameter: Plant Line Value: 35A19
  misc_feature: MA Experiment 20000478 PARAMETER Experiment Name: Zm_5mM_SA_P Parameter: Timepoint (hr) Value: 72
  misc_feature: MA Experiment 20000478 PARAMETER Experiment Name: Zm_5mM_SA_P Parameter: Tissue Value: Aerial
  misc_feature: MA Experiment 20000478 PARAMETER Experiment Name: Zm_5mM_SA_P Parameter: Treatment Value: 5mM SA vs. No Treatment
  misc_feature: MA Experiment ID: 20000480 Result: Up-regulated in Transcription
  misc_feature: MA Experiment 20000480 PARAMETER Experiment Name: Zm_Drought_P Parameter: Age (day) Value: 11
  misc_feature: MA Experiment 20000480 PARAMETER Experiment Name: Zm_Drought_P Parameter: Organism Value: Zea mays
  misc_feature: MA Experiment 20000480 PARAMETER Experiment Name: Zm_Drought_P Parameter: Plant Line Value: 35A19
  misc_feature: MA Experiment 20000480 PARAMETER Experiment Name: Zm_Drought_P Parameter: Timepoint (hr) Value: 72
  misc_feature: MA Experiment 20000480 PARAMETER Experiment Name: Zm_Drought_P Parameter: Tissue Value: Aerial
  misc_feature: MA Experiment 20000480 PARAMETER Experiment Name: Zm_Drought_P Parameter: Treatment Value: Drought vs. No Drought
  misc_feature: MA Experiment ID: 20000487 Result: Down-regulated in Transcription
  misc_feature: MA Experiment 20000487 PARAMETER Experiment Name: Zm_50mM_NH4NO3_L_to_H_P Parameter: Organism Value: Zea mays
  misc_feature: MA Experiment 20000487 PARAMETER Experiment Name: Zm_50mM_NH4NO3_L_to_H_P Parameter: Timepoint (hr) Value: 4
  misc_feature: MA Experiment 20000487 PARAMETER Experiment Name: Zm_50mM_NH4NO3_L_to_H_P Parameter: Tissue Value: Leaves
  misc_feature: MA Experiment 20000487 PARAMETER Experiment Name: Zm_50mM_NH4NO3_L_to_H_P Parameter: Treatment Value: 50mM NH4NO3 vs. 100mM Mannitol
  misc_feature: MA Experiment ID: 20000532 Result: Up-regulated in Transcription
  misc_feature: MA Experiment 20000532 PARAMETER Experiment Name: Zm_0.001percent_MeJA_P Parameter: Age (day) Value: 10
  misc_feature: MA Experiment 20000532 PARAMETER Experiment Name: Zm_0.001percent_MeJA_P Parameter: Organism Value: Zea mays
  misc_feature: MA Experiment 20000532 PARAMETER Experiment Name: Zm_0.001percent_MeJA_P Parameter: Plant Line Value: 35A19
  misc_feature: MA Experiment 20000532 PARAMETER Experiment Name: Zm_0.001percent_MeJA_P Parameter: Timepoint (hr) Value: 48
  misc_feature: MA Experiment 20000532 PARAMETER Experiment Name: Zm_0.001percent_MeJA_P Parameter: Tissue Value: Aerial
  misc_feature: MA Experiment 20000532 PARAMETER Experiment Name: Zm_0.001percent_MeJA_P Parameter: Treatment Value: 0.001percent MeJA vs. No Treatment
  misc_feature: MA Experiment ID: 20001606 Result: Down-regulated in Transcription
  misc_feature: MA Experiment 20001606 PARAMETER Experiment Name: Zm_50ppm_KNO3_L-to-H_P Parameter: Age (day) Value: 19
  misc_feature: MA Experiment 20001606 PARAMETER Experiment Name: Zm_50ppm_KNO3_L-to-H_P Parameter: Organism Value: Zea mays
  misc_feature: MA Experiment 20001606 PARAMETER Experiment Name: Zm_50ppm_KNO3_L-to-H_P Parameter: Plant Line Value: 35A19
  misc_feature: MA Experiment 20001606 PARAMETER Experiment Name: Zm_50ppm_KNO3_L-to-H_P Parameter: Timepoint (hr) Value: 8
  misc_feature: MA Experiment 20001606 PARAMETER Experiment Name: Zm_50ppm_KNO3_L-to-H_P Parameter: Tissue Value: Shoots
  misc_feature: MA Experiment 20001606 PARAMETER Experiment Name: Zm_50ppm_KNO3_L-to-H_P Parameter: Treatment Value: 50ppm KNO3 vs. 50ppm KCl
gttgacatcggttcaccgtccgcccaggtaccttccgtacgtacaagaggcggtcgcgacgctctagcttgcattgcaccagcgcgcagagcggaaggaggtggaaagcgcccagagagatctcgagagagaggctggtcggcacagactagttcattccgtttggatagagacgcacgcaacgcaggccaccacaacgtgaggagcgggaggagggagagggaggatgcaggcgcatcaccgtcagtcgtactacgcggtgctcggcgtgcagccgggcgccaccgctgccgagatccgcgcctcctaccaccgcctcgccatgaggtggcacccggacaagatcgccagcggcggcggcgccggcgccgatccggcgcgcgcggaggaggccaagagcaggttccagcagatacacgaggcgtaccaagtgctgtcggatgacaagaggagggcgctgtacgacgccggcatgtacgacccgctggacgacgacgacgaccaggaggacgtcgagggattccacgacttcgtgcaggagatggtctcgctcatggccagagaggagcccgtgtacagcttggccgagctgcaatccatgctggacgggatgatcaaggatttcaccgcgccacagccttggcctagcggcttcttctacactggtggtggcggtggcggtggcggtggggcgtcgtcgccgtcgccgctcggcaaaccaagcagccaagagcagagtacggcttcgtcacgcttgcatccctacgggttcggggacgcgccgtgcttcagccgcacggcgttctcacaatgatggcgatgatgaataaattgatacatggatcgagcttttattcttctggcagcaatgggggtttcctcgctcgtgctcgtggaggtggagggatagtaggaacccgtgaccgtgaaagccatcgtccgccagggccagactctgattggcagttgcaattgctttggactgtggggatgaaagaaggtgaggtgggaagatagaccacaaggagagcacgtagtcgcctagaatcgccacccatcagcaaaagaaggggtgtttgtttgtttgtactgtttggtttggtttggttttcgtctcttgcctgccatggtagagatgagttatgccagagcatttgtatacaagggtatgccatcaagaataagttacgtcaatacaatttgtacataaat

SEQ ID NO: 2657 - protein, 195 aa, Zea mays subsp. mays
  peptide (1)..(195): Ceres Seq. ID no. 12352092
  misc_feature (8)..(83): Pfam Name: DnaJ domain Pfam Description: DnaJ domain
  misc_feature (6)..(130): Homolog of NCBI NO: 18405757 NR Description: DnaJ protein, putative
  misc_feature (6)..(130): Homolog of NCBI NO: 21554587 NR Description: DnaJ protein, putative [Arabidopsis thaliana]
  misc_feature (1)..(194): Homolog of NCBI NO: 34912486 NR Description: heat shock protein-like [Oryza sativa (japonica
MQAHHRQSYYAVLGVQPGATAAEIRASYHRLAMRWHPDKIASGGGAGADPARAEEAKSRFQQIHEAYQVLSDDKRRALYDAGMYDPLDDDDDQEDVEGFHDFVQEMVSLMAREEPVYSLAELQSMLDGMIKDFTAPQPWPSGFFYTGGGGGGGGGASSPSPLGKPSSQEQSTASSRLHPYGFGDAPCFSRTAFSQ

SEQ ID NO: 2658 - protein, 163 aa, Zea mays subsp. mays
  peptide (1)..(163): Ceres Seq. ID no. 12352093
  misc_feature (1)..(51): Pfam Name: DnaJ domain Pfam Description: DnaJ domain
  misc_feature (1)..(98): Homolog of NCBI NO: 18405757 NR Description: DnaJ protein, putative
  misc_feature (1)..(98): Homolog of NCBI NO: 21554587 NR Description: DnaJ protein, putative [Arabidopsis thaliana]
  misc_feature (1)..(162): Homolog of NCBI NO: 34912486 NR Description: heat shock protein-like [Oryza sativa (japonica
MRWHPDKIASGGGAGADPARAEEAKSRFQQIHEAYQVLSDDKRRALYDAGMYDPLDDDDDQEDVEGFHDFVQEMVSLMAREEPVYSLAELQSMLDGMIKDFTAPQPWPSGFFYTGGGGGGGGGASSPSPLGKPSSQEQSTASSRLHPYGFGDAPCFSRTAFSQ

SEQ ID NO: 2659 - protein, 147 aa, Zea mays subsp. mays
  peptide (1)..(147): Ceres Seq. ID no. 12352094
VDIGSPSAQVPSVRTRGGRDALACIAPARRAEGGGKRPERSRERGWSAQTSSFRLDRDARNAGHHNVRSGRREREDAGASPSVVLRGARRAAGRHRCRDPRLLPPPRHEVAPGQDRQRRRRRRRSGARGGGQEQVPADTRGVPSAVG

SEQ ID NO: 2660 - DNA, 1594 bp, Zea mays subsp. mays
  misc_feature (1)..(1594): Ceres Seq. ID no. 12387222
  misc_feature: MA Experiment ID: 108528 Result: Down-regulated in Transcription
  misc_feature: MA Experiment 108528 PARAMETER Experiment Name: Zm_Imbibed_Seeds_P Parameter: Age (day) Value: 5 vs. 2
  misc_feature: MA Experiment 108528 PARAMETER Experiment Name: Zm_Imbibed_Seeds_P Parameter: Organism Value: Zea mays
  misc_feature: MA Experiment 108528 PARAMETER Experiment Name: Zm_Imbibed_Seeds_P Parameter: Plant Line Value: 35A19
  misc_feature: MA Experiment 108528 PARAMETER Experiment Name: Zm_Imbibed_Seeds_P Parameter: Tissue Value: Aerial vs. Embryo
  misc_feature: MA Experiment ID: 108530 Result: Down-regulated in Transcription
  misc_feature: MA Experiment 108530 PARAMETER Experiment Name: Zm_Imbibed_Seeds_P Parameter: Age (day) Value: 6 vs. 2
  misc_feature: MA Experiment 108530 PARAMETER Experiment Name: Zm_Imbibed_Seeds_P Parameter: Organism Value: Zea mays
  misc_feature: MA Experiment 108530 PARAMETER Experiment Name: Zm_Imbibed_Seeds_P Parameter: Plant Line Value: 35A19
  misc_feature: MA Experiment 108530 PARAMETER Experiment Name: Zm_Imbibed_Seeds_P Parameter: Tissue Value: Aerial vs. Embryo
  misc_feature: MA Experiment ID: 108535 Result: Up-regulated in Transcription
  misc_feature: MA Experiment 108535 PARAMETER Experiment Name: Zm_Meristem_P Parameter: Age (day) Value: 8
  misc_feature: MA Experiment 108535 PARAMETER Experiment Name: Zm_Meristem_P Parameter: Organism Value: Zea mays
  misc_feature: MA Experiment 108535 PARAMETER Experiment Name: Zm_Meristem_P Parameter: Plant Line Value: 35A19
  misc_feature: MA Experiment 108535 PARAMETER Experiment Name: Zm_Meristem_P Parameter: Tissue Value: Root Meristem vs. Above Root Meristem
  misc_feature: MA Experiment ID: 108543 Result: Up-regulated in Transcription
  misc_feature: MA Experiment ID: 108544 Result: Down-regulated in Transcription
  misc_feature: MA Experiment ID: 108688 Result: Down-regulated in Transcription
  misc_feature: MA Experiment 108688 PARAMETER Experiment Name: Zm_Embryos-Flowers__P Parameter: Tissue Value: Immature Flowers vs. Aerial+
  misc_feature: MA Experiment ID: 20000108 Result: Up-regulated in Transcription
  misc_feature: MA Experiment 20000108 PARAMETER Experiment Name: Zm_Root-Tips_P Parameter: Age (day) Value: 12
  misc_feature: MA Experiment 20000108 PARAMETER Experiment Name: Zm_Root-Tips_P Parameter: Organism Value: Zea mays
  misc_feature: MA Experiment 20000108 PARAMETER Experiment Name: Zm_Root-Tips_P Parameter: Tissue Value: Root tips vs. Root mid region    35
  misc_feature: MA Experiment 20000108 PARAMETER Experiment Name: Zm_Root-Tips_P Parameter: Tissue Value: Root tips vs. Root mid region   Sequence Listing-Misc Features (4)
  misc_feature: MA Experiment ID: 20000487 Result: Down-regulated in Transcription
  misc_feature: MA Experiment 20000487 PARAMETER Experiment Name: Zm_50mM_NH4NO3_L_to_H_P Parameter: Organism Value: Zea mays
  misc_feature: MA Experiment 20000487 PARAMETER Experiment Name: Zm_50mM_NH4NO3_L_to_H_P Parameter: Timepoint (hr) Value: 4
  misc_feature: MA Experiment 20000487 PARAMETER Experiment Name: Zm_50mM_NH4NO3_L_to_H_P Parameter: Tissue Value: Leaves
  misc_feature: MA Experiment 20000487 PARAMETER Experiment Name: Zm_50mM_NH4NO3_L_to_H_P Parameter: Treatment Value: 50mM NH4NO3 vs. 100mM Mannitol
  misc_feature: MA Experiment ID: 20000535 Result: Up-regulated in Transcription
  misc_feature: MA Experiment 20000535 PARAMETER Experiment Name: Zm_Hybrid_Seed_Dev_P Parameter: DAP Value: 30 vs. 12
  misc_feature: MA Experiment 20000535 PARAMETER Experiment Name: Zm_Hybrid_Seed_Dev_P Parameter: Organism Value: Zea mays
  misc_feature: MA Experiment 20000535 PARAMETER Experiment Name: Zm_Hybrid_Seed_Dev_P Parameter: Plant Line Value: 35A19
  misc_feature: MA Experiment 20000535 PARAMETER Experiment Name: Zm_Hybrid_Seed_Dev_P Parameter: Tissue Value: Embryo vs. Unfert Floret
  misc_feature: MA Experiment ID: 20000626 Result: Up-regulated in Transcription
  misc_feature: MA Experiment 20000626 PARAMETER Experiment Name: Zm_Herbicide-Treatments_P Parameter: Timepoint (hr) Value: 12
  misc_feature: MA Experiment 20000626 PARAMETER Experiment Name: Zm_Herbicide-Treatments_P Parameter: Tissue Value: Aerial
  misc_feature: MA Experiment 20000626 PARAMETER Experiment Name: Zm_Herbicide-Treatments_P Parameter: Treatment Value: Roundup vs. No Treatment
  misc_feature: MA Experiment ID: 20000632 Result: Down-regulated in Transcription
  misc_feature: MA Experiment 20000632 PARAMETER Experiment Name: Zm_Herbicide-Treatments_P Parameter: Timepoint (hr) Value: 4
  misc_feature: MA Experiment 20000632 PARAMETER Experiment Name: Zm_Herbicide-Treatments_P Parameter: Tissue Value: Aerial
  misc_feature: MA Experiment 20000632 PARAMETER Experiment Name: Zm_Herbicide-Treatments_P Parameter: Treatment Value: Glean vs. No Treatment
agatctggatccaaacggcggctctgtttcgtgcgctgtcccgtctccctccgtctcgtcagcttcgtgccgtgcccgtgcgagccgctgccaacccgctccagctttgcccgttgccttggccgtcccgtccggccgtccctagaaaaggccgcgtcccacgttgccttggttcccccaccctgctgtctccctccctccttccttccttccccgccactgcgcagcgcgagtgcggcgacagccagtcacacactcacactccctcgaccgctctcggccccgtccgcgtcgccgcagggcgaggaggcaatggcggcaggcgggaatggcgccggcggggacaccagggcggccttcgcgcggatctacaagacgctcaaggaggagctgctcaccgacccggccttcgagttcaccgaggagtcacgccagtggatcgaccgcatggttgactacaatgtactcggaggcaagtgtaaccgtgggctctctgtggtcgacagctacaagctgctcaagggcgctgatgctctgggcgaggaggaaacgttccttgcttgcaccctcggctggtgcattgaatggcttcaggctttctttcttgtgcttgatgatatcatggatgactctcacactcgtcgcggccagccttgctggttcagggtgcctcaggttggcttaattgctgcgaatgacgggatcatccttcgcaaccatatctcacggatccttcggcgccactttaagggcaaaccttactatgctgatctccttgatttgttcaatgaggttgagttcaagacagcttcaggtcagctgctggaccttatcactacccatgagggagaaaaagatctaacaaagtataacataacagttcacggtcgaattgttcaatacaagacagcctattattcattttatctgccggttgcatgtgccctgctgctctctggcgagaatttggacaattatggtgatgtagagaacatccttgttgaaatgggaacatactttcaagtccaggatgactatctggattgttacggtgatcctgaatttatcggcaagattggaacggacattgaagattacaagtgctcatggctagttgtgcaagcccttgagcgtgctgatgagagccaaaagcgcattctatttgaaaattatggcaagaaagatccagcctgtgtggcaaaagtgaagaacctctacaaagaacttgacctagaggcggtatttcaggagtacgagaatgagagctacaagaagctgattgcagacattgaagcccagccaagcattgcggttcagaaagtgctgaaatccttcttgcacaagatctacaagaggcagaagtagggtgctcttggataaacgagctcaggagtcgttactccttcgcatgcttgacataaccggacttcctcacctggttgctctagtatgatgtggagcgtctagttaaaaaaatcgatgtagtatgaagcaccttgctgctctgaatattaacaggcaattaaggcaaggtgctgtttcggtttggtggaccgcatgttgcagataataaattagttgttttgtcatgcgg

SEQ ID NO: 2661 - protein, 454 aa, Zea mays subsp. mays
  peptide (1)..(454): Ceres Seq. ID no. 12387223
  misc_feature (146)..(417): Pfam Name: Polyprenyl synthetase Pfam Description: Polyprenyl synthetase
  misc_feature (146)..(417): Pfam Name: Polyprenyl synthetase Pfam Description: Polyprenyl synthetase
  misc_feature (105)..(454): Homolog of NCBI NO: 1346033 NR Description: Farnesyl pyrophosphate synthetase (FPP (FPS) (Farnesyl diphosphate synthetase) [Includes:
  misc_feature (104)..(454): Homolog of NCBI NO: 34911542 NR Description: putative farnesyl-pyrophosphate synthetase [Oryza
  misc_feature (158)..(454): Homolog of NCBI NO: 25458583 NR Description: probable farnesyl pyrophosphate synthase - rice >gi|4680193|gb|AAD27558.1|AF111710_4 putative farnesyl
  misc_feature (21)..(151): Homolog of NCBI NO: 25458583 NR Description: probable farnesyl pyrophosphate synthase - rice >gi|4680193|gb|AAD27558.1|AF111710_4 putative farnesyl
  misc_feature (106)..(454): Homolog of NCBI NO: 18958450 NR Description: farnesyl pyrophosphare synthase [Musa acuminata]
  misc_feature (104)..(454): Homolog of NCBI NO: 34911542 NR Description: putative farnesyl-pyrophosphate synthetase [Oryza
  misc_feature (21)..(151): Homolog of NCBI NO: 25458583 NR Description: probable farnesyl pyrophosphate synthase - rice >gi|4680193|gb|AAD27558.1|AF111710_4 putative farnesyl
  misc_feature (115)..(454): Homolog of NCBI NO: 25452945 NR Description: Farnesyl pyrophosphate synthetase 1 (FPP
  misc_feature (117)..(454): Homolog of NCBI NO: 13537421 NR Description: farnesyl pyrophosphate synthase [Humulus lupulus]
  misc_feature (115)..(454): Homolog of NCBI NO: 1346029 NR Description: Farnesyl pyrophosphate synthetase 2 (FPP
  misc_feature (115)..(454): Homolog of NCBI NO: 7433992 NR Description: farnesyl-pyrophosphate synthetase - Para rubber >gi|22676905|gb|AAM98379.1| farnesyl diphosphate synthase [Hevea
  misc_feature (115)..(454): Homolog of NCBI NO: 1346028 NR Description: Farnesyl pyrophosphate synthetase 1 (FPP
  misc_feature (106)..(454): Homolog of NCBI NO: 18958450 NR Description: farnesyl pyrophosphare synthase [Musa acuminata]
  misc_feature (158)..(454): Homolog of NCBI NO: 25458583 NR Description: probable farnesyl pyrophosphate synthase - rice >gi|4680193|gb|AAD27558.1|AF111710_4 putative farnesyl
  misc_feature (105)..(454): Homolog of NCBI NO: 1346033 NR Description: Farnesyl pyrophosphate synthetase (FPP (FPS) (Farnesyl diphosphate synthetase) [Includes:
  misc_feature (115)..(454): Homolog of NCBI NO: 1346028 NR Description: Farnesyl pyrophosphate synthetase 1 (FPP
  misc_feature (115)..(454): Homolog of NCBI NO: 7433992 NR Description: farnesyl-pyrophosphate synthetase - Para rubber >gi|22676905|gb|AAM98379.1| farnesyl diphosphate synthase [Hevea
  misc_feature (115)..(454): Homolog of NCBI NO: 1346029 NR Description: Farnesyl pyrophosphate synthetase 2 (FPP
  misc_feature (117)..(454): Homolog of NCBI NO: 13537421 NR Description: farnesyl pyrophosphate synthase [Humulus lupulus]
  misc_feature (115)..(454): Homolog of NCBI NO: 25452945 NR Description: Farnesyl pyrophosphate synthetase 1 (FPP
RSGSKRRLCFVRCPVSLRLVSFVPCPCEPLPTRSSFARCLGRPVRPSLEKAASHVALVPPPCCLPPSFLPSPPLRSASAATASHTLTLPRPLSAPSASPQGEEAMAAGGNGAGGDTRAAFARIYKTLKEELLTDPAFEFTEESRQWIDRMVDYNVLGGKCNRGLSVVDSYKLLKGADALGEEETFLACTLGWCIEWLQAFFLVLDDIMDDSHTRRGQPCWFRVPQVGLIAANDGIILRNHISRILRRHFKGKPYYADLLDLFNEVEFKTASGQLLDLITTHEGEKDLTKYNITVHGRIVQYKTAYYSFYLPVACALLLSGENLDNYGDVENILVEMGTYFQVQDDYLDCYGDPEFIGKIGTDIEDYKCSWLVVQALERADESQKRILFENYGKKDPACVAKVKNLYKELDLEAVFQEYENESYKKLIADIEAQPSIAVQKVLKSFLHKIYKRQK

SEQ ID NO: 2662 - protein, 350 aa, Zea mays subsp. mays
  peptide (1)..(350): Ceres Seq. ID no. 12387224
  misc_feature (42)..(313): Pfam Name: Polyprenyl synthetase Pfam Description: Polyprenyl synthetase
  misc_feature (42)..(313): Pfam Name: Polyprenyl synthetase Pfam Description: Polyprenyl synthetase
  misc_feature (1)..(350): Homolog of NCBI NO: 1346033 NR Description: Farnesyl pyrophosphate synthetase (FPP (FPS) (Farnesyl diphosphate synthetase) [Includes:
  misc_feature (1)..(350): Homolog of NCBI NO: 34911542 NR Description: putative farnesyl-pyrophosphate synthetase [Oryza
  misc_feature (54)..(350): Homolog of NCBI NO: 25458583 NR Description: probable farnesyl pyrophosphate synthase - rice >gi|4680193|gb|AAD27558.1|AF111710_4 putative farnesyl
  misc_feature (1)..(47): Homolog of NCBI NO: 25458583 NR Description: probable farnesyl pyrophosphate synthase - rice >gi|4680193|gb|AAD27558.1|AF111710_4 putative farnesyl
  misc_feature (2)..(350): Homolog of NCBI NO: 18958450 NR Description: farnesyl pyrophosphare synthase [Musa acuminata]
  misc_feature (1)..(350): Homolog of NCBI NO: 34911542 NR Description: putative farnesyl-pyrophosphate synthetase [Oryza
  misc_feature (1)..(47): Homolog of NCBI NO: 25458583 NR Description: probable farnesyl pyrophosphate synthase - rice >gi|4680193|gb|AAD27558.1|AF111710_4 putative farnesyl
  misc_feature (11)..(350): Homolog of NCBI NO: 25452945 NR Description: Farnesyl pyrophosphate synthetase 1 (FPP
  misc_feature (13)..(350): Homolog of NCBI NO: 13537421 NR Description: farnesyl pyrophosphate synthase [Humulus lupulus]
  misc_feature (11)..(350): Homolog of NCBI NO: 1346029 NR Description: Farnesyl pyrophosphate synthetase 2 (FPP
  misc_feature (11)..(350): Homolog of NCBI NO: 7433992 NR Description: farnesyl-pyrophosphate synthetase - Para rubber >gi|22676905|gb|AAM98379.1| farnesyl diphosphate synthase [Hevea
  misc_feature (11)..(350): Homolog of NCBI NO: 1346028 NR Description: Farnesyl pyrophosphate synthetase 1 (FPP
  misc_feature (2)..(350): Homolog of NCBI NO: 18958450 NR Description: farnesyl pyrophosphare synthase [Musa acuminata]
  misc_feature (54)..(350): Homolog of NCBI NO: 25458583 NR Description: probable farnesyl pyrophosphate synthase - rice >gi|4680193|gb|AAD27558.1|AF111710_4 putative farnesyl
  misc_feature (1)..(350): Homolog of NCBI NO: 1346033 NR Description: Farnesyl pyrophosphate synthetase (FPP (FPS) (Farnesyl diphosphate synthetase) [Includes:
  misc_feature (11)..(350): Homolog of NCBI NO: 1346028 NR Description: Farnesyl pyrophosphate synthetase 1 (FPP
  misc_feature (11)..(350): Homolog of NCBI NO: 7433992 NR Description: farnesyl-pyrophosphate synthetase - Para rubber >gi|22676905|gb|AAM98379.1| farnesyl diphosphate synthase [Hevea
  misc_feature (11)..(350): Homolog of NCBI NO: 1346029 NR Description: Farnesyl pyrophosphate synthetase 2 (FPP
  misc_feature (13)..(350): Homolog of NCBI NO: 13537421 NR Description: farnesyl pyrophosphate synthase [Humulus lupulus]
  misc_feature (11)..(350): Homolog of NCBI NO: 25452945 NR Description: Farnesyl pyrophosphate synthetase 1 (FPP
MAAGGNGAGGDTRAAFARIYKTLKEELLTDPAFEFTEESRQWIDRMVDYNVLGGKCNRGLSVVDSYKLLKGADALGEEETFLACTLGWCIEWLQAFFLVLDDIMDDSHTRRGQPCWFRVPQVGLIAANDGIILRNHISRILRRHFKGKPYYADLLDLFNEVEFKTASGQLLDLITTHEGEKDLTKYNITVHGRIVQYKTAYYSFYLPVACALLLSGENLDNYGDVENILVEMGTYFQVQDDYLDCYGDPEFIGKIGTDIEDYKCSWLVVQALERADESQKRILFENYGKKDPACVAKVKNLYKELDLEAVFQEYENESYKKLIADIEAQPSIAVQKVLKSFLHKIYKRQK

SEQ ID NO: 2663 - protein, 305 aa, Zea mays subsp. mays
  peptide (1)..(305): Ceres Seq. ID no. 12387225
  misc_feature (1)..(268): Pfam Name: Polyprenyl synthetase Pfam Description: Polyprenyl synthetase
  misc_feature (1)..(268): Pfam Name: Polyprenyl synthetase Pfam Description: Polyprenyl synthetase
  misc_feature (1)..(305): Homolog of NCBI NO: 1346033 NR Description: Farnesyl pyrophosphate synthetase (FPP (FPS) (Farnesyl diphosphate synthetase) [Includes:
  misc_feature (1)..(305): Homolog of NCBI NO: 34911542 NR Description: putative farnesyl-pyrophosphate synthetase [Oryza
  misc_feature (9)..(305): Homolog of NCBI NO: 25458583 NR Description: probable farnesyl pyrophosphate synthase - rice >gi|4680193|gb|AAD27558.1|AF111710_4 putative farnesyl
  misc_feature (1)..(305): Homolog of NCBI NO: 18958450 NR Description: farnesyl pyrophosphare synthase [Musa acuminata]
  misc_feature (1)..(305): Homolog of NCBI NO: 1346028 NR Description: Farnesyl pyrophosphate synthetase 1 (FPP
  misc_feature (1)..(305): Homolog of NCBI NO: 34911542 NR Description: putative farnesyl-pyrophosphate synthetase [Oryza
  misc_feature (1)..(305): Homolog of NCBI NO: 18958450 NR Description: farnesyl pyrophosphare synthase [Musa acuminata]
  misc_feature (1)..(305): Homolog of NCBI NO: 14279425 NR Description: farnesyl pyrophosphate synthase [Humulus lupulus]
  misc_feature (1)..(305): Homolog of NCBI NO: 25452945 NR Description: Farnesyl pyrophosphate synthetase 1 (FPP
  misc_feature (1)..(305): Homolog of NCBI NO: 13537421 NR Description: farnesyl pyrophosphate synthase [Humulus lupulus]
  misc_feature (1)..(305): Homolog of NCBI NO: 1346029 NR Description: Farnesyl pyrophosphate synthetase 2 (FPP
  misc_feature (1)..(305): Homolog of NCBI NO: 7433992 NR Description: farnesyl-pyrophosphate synthetase - Para rubber >gi|22676905|gb|AAM98379.1| farnesyl diphosphate synthase [Hevea
  misc_feature (1)..(305): Homolog of NCBI NO: 1346028 NR Description: Farnesyl pyrophosphate synthetase 1 (FPP
  misc_feature (9)..(305): Homolog of NCBI NO: 25458583 NR Description: probable farnesyl pyrophosphate synthase - rice >gi|4680193|gb|AAD27558.1|AF111710_4 putative farnesyl
  misc_feature (1)..(305): Homolog of NCBI NO: 1346033 NR Description: Farnesyl pyrophosphate synthetase (FPP (FPS) (Farnesyl diphosphate synthetase) [Includes:
  misc_feature (1)..(305): Homolog of NCBI NO: 7433992 NR Description: farnesyl-pyrophosphate synthetase - Para rubber >gi|22676905|gb|AAM98379.1| farnesyl diphosphate synthase [Hevea
  misc_feature (1)..(305): Homolog of NCBI NO: 1346029 NR Description: Farnesyl pyrophosphate synthetase 2 (FPP
  misc_feature (1)..(305): Homolog of NCBI NO: 13537421 NR Description: farnesyl pyrophosphate synthase [Humulus lupulus]
  misc_feature (1)..(305): Homolog of NCBI NO: 25452945 NR Description: Farnesyl pyrophosphate synthetase 1 (FPP
  misc_feature (1)..(305): Homolog of NCBI NO: 14279425 NR Description: farnesyl pyrophosphate synthase [Humulus lupulus]
MVDYNVLGGKCNRGLSVVDSYKLLKGADALGEEETFLACTLGWCIEWLQAFFLVLDDIMDDSHTRRGQPCWFRVPQVGLIAANDGIILRNHISRILRRHFKGKPYYADLLDLFNEVEFKTASGQLLDLITTHEGEKDLTKYNITVHGRIVQYKTAYYSFYLPVACALLLSGENLDNYGDVENILVEMGTYFQVQDDYLDCYGDPEFIGKIGTDIEDYKCSWLVVQALERADESQKRILFENYGKKDPACVAKVKNLYKELDLEAVFQEYENESYKKLIADIEAQPSIAVQKVLKSFLHKIYKRQK

SEQ ID NO: 2664 - DNA, 1614 bp, Zea mays subsp. mays; identical to SEQ ID NO: 1798
  misc_feature (1)..(1614): Ceres Seq. ID no. 12410981
  misc_feature: MA Experiment ID: 108527 Result: Down-regulated in Transcription
  misc_feature: MA Experiment 108527 PARAMETER Experiment Name: Zm_5mM_NO_P Parameter: Age (day) Value: 8
  misc_feature: MA Experiment 108527 PARAMETER Experiment Name: Zm_5mM_NO_P Parameter: Organism Value: Zea mays
  misc_feature: MA Experiment 108527 PARAMETER Experiment Name: Zm_5mM_NO_P Parameter: Plant Line Value: 35A19
  misc_feature: MA Experiment 108527 PARAMETER Experiment Name: Zm_5mM_NO_P Parameter: Timepoint (hr) Value: 6
  misc_feature: MA Experiment 108527 PARAMETER Experiment Name: Zm_5mM_NO_P Parameter: Tissue Value: Aerial
  misc_feature: MA Experiment 108527 PARAMETER Experiment Name: Zm_5mM_NO_P Parameter: Treatment Value: 5mM NO vs. No Treatment
  misc_feature: MA Experiment ID: 108528 Result: Up-regulated in Transcription
  misc_feature: MA Experiment 108528 PARAMETER Experiment Name: Zm_Imbibed_Seeds_P Parameter: Age (day) Value: 5 vs. 2
  misc_feature: MA Experiment 108528 PARAMETER Experiment Name: Zm_Imbibed_Seeds_P Parameter: Organism Value: Zea mays
  misc_feature: MA Experiment 108528 PARAMETER Experiment Name: Zm_Imbibed_Seeds_P Parameter: Plant Line Value: 35A19
  misc_feature: MA Experiment 108528 PARAMETER Experiment Name: Zm_Imbibed_Seeds_P Parameter: Tissue Value: Aerial vs. Embryo
  misc_feature: MA Experiment ID: 108530 Result: Up-regulated in Transcription
  misc_feature: MA Experiment 108530 PARAMETER Experiment Name: Zm_Imbibed_Seeds_P Parameter: Age (day) Value: 6 vs. 2
  misc_feature: MA Experiment 108530 PARAMETER Experiment Name: Zm_Imbibed_Seeds_P Parameter: Organism Value: Zea mays
  misc_feature: MA Experiment 108530 PARAMETER Experiment Name: Zm_Imbibed_Seeds_P Parameter: Plant Line Value: 35A19
  misc_feature: MA Experiment 108530 PARAMETER Experiment Name: Zm_Imbibed_Seeds_P Parameter: Tissue Value: Aerial vs. Embryo
  misc_feature: MA Experiment ID: 108543 Result: Down-regulated in Transcription
  misc_feature: MA Experiment ID: 108545 Result: Up-regulated in Transcription
  misc_feature: MA Experiment 108545 PARAMETER Experiment Name: Zm_Imbibed_Seeds_P Parameter: Age (day) Value: 3 vs. 2
  misc_feature: MA Experiment 108545 PARAMETER Experiment Name: Zm_Imbibed_Seeds_P Parameter: Organism Value: Zea mays
  misc_feature: MA Experiment 108545 PARAMETER Experiment Name: Zm_Imbibed_Seeds_P Parameter: Plant Line Value: 35A19
  misc_feature: MA Experiment 108545 PARAMETER Experiment Name: Zm_Imbibed_Seeds_P Parameter: Tissue Value: Aerial vs. Embryo
  misc_feature: MA Experiment ID: 108547 Result: Up-regulated in Transcription
  misc_feature: MA Experiment 108547 PARAMETER Experiment Name: Zm_Imbibed_Seeds_P Parameter: Age (day) Value: 4 vs. 2
  misc_feature: MA Experiment 108547 PARAMETER Experiment Name: Zm_Imbibed_Seeds_P Parameter: Organism Value: Zea mays
  misc_feature: MA Experiment 108547 PARAMETER Experiment Name: Zm_Imbibed_Seeds_P Parameter: Plant Line Value: 35A19
  misc_feature: MA Experiment 108547 PARAMETER Experiment Name: Zm_Imbibed_Seeds_P Parameter: Tissue Value: Aerial vs. Embryo
  misc_feature: MA Experiment ID: 20000626 Result: Down-regulated in Transcription
  misc_feature: MA Experiment 20000626 PARAMETER Experiment Name: Zm_Herbicide-Treatments_P Parameter: Timepoint (hr) Value: 12
  misc_feature: MA Experiment 20000626 PARAMETER Experiment Name: Zm_Herbicide-Treatments_P Parameter: Tissue Value: Aerial
  misc_feature: MA Experiment 20000626 PARAMETER Experiment Name: Zm_Herbicide-Treatments_P Parameter: Treatment Value: Roundup vs. No Treatment
  misc_feature: MA Experiment ID: 20000630 Result: Down-regulated in Transcription
  misc_feature: MA Experiment 20000630 PARAMETER Experiment Name: Zm_Herbicide-Treatments_P Parameter: Timepoint (hr) Value: 4
  misc_feature: MA Experiment 20000630 PARAMETER Experiment Name: Zm_Herbicide-Treatments_P Parameter: Tissue Value: Aerial
  misc_feature: MA Experiment 20000630 PARAMETER Experiment Name: Zm_Herbicide-Treatments_P Parameter: Treatment Value: Roundup vs. No Treatment

SEQ ID NO: 2665 - protein, 352 aa, Zea mays subsp. mays; identical to SEQ ID NO: 1799
  peptide (1)..(352): Ceres Seq. ID no. 12410982
  misc_feature (1)..(119): Pfam Name: Cupin Pfam Description: Cupin
  misc_feature (16)..(352): Homolog of NCBI NO: 29247944 NR Description: GLP_26_54603_52153 [Giardia lamblia ATCC 50803]
  misc_feature (34)..(352): Homolog of NCBI NO: 29247944 NR Description: GLP_26_54603_52153 [Giardia lamblia ATCC 50803]
  misc_feature (55)..(352): Homolog of NCBI NO: 23104258 NR Description: hypothetical protein [Azotobacter vinelandii]
  misc_feature (108)..(108): Xaa is any aa, unknown or other
  misc_feature (109)..(109): Xaa is any aa, unknown or other

SEQ ID NO: 2666 - protein, 344 aa, Zea mays subsp. mays; identical to SEQ ID NO: 1800
  peptide (1)..(344): Ceres Seq. ID no. 12410983
  misc_feature (79)..(135): Pfam Name: Carboxylesterase Pfam Description: Carboxylesterase
  misc_feature (3)..(331): Homolog of NCBI NO: 34904770 NR Description: similar to carboxylesterase [Oryza sativa
  misc_feature (1)..(334): Homolog of NCBI NO: 34904760 NR Description: similar to carboxylesterase [Oryza sativa
  misc_feature (1)..(332): Homolog of NCBI NO: 34393714 NR Description: putative esterase [Oryza sativa (japonica
  misc_feature (1)..(332): Homolog of NCBI NO: 34904774 NR Description: similar to carboxylesterase [Oryza sativa
  misc_feature (15)..(327): Homolog of NCBI NO: 34904772 NR Description: similar to carboxylesterase [Oryza sativa
  misc_feature (1)..(328): Homolog of NCBI NO: 15237783 NR Description: putative protein; protein id: At5g23530.1, by cDNA: 9482. [Arabidopsis thaliana] >gi|8809707|dbj|BAA97248.1| similarity to unknown protein~gb|AAF27018.1~gene_id:MQM1.21
  misc_feature (1)..(328): Homolog of NCBI NO: 21618039 NR Description: unknown [Arabidopsis thaliana]
  misc_feature (1)..(332): Homolog of NCBI NO: 15240483 NR Description: putative protein; protein id: At5g27320.1, by cDNA: gi_15451145 [Arabidopsis thaliana] Unknown protein [Arabidopsis thaliana]
  misc_feature (2)..(334): Homolog of NCBI NO: 34904758 NR Description: hypothetical protein~predicted by GeneMark.hmm
  misc_feature (34)..(339): Homolog of NCBI NO: 15229371 NR Description: putative protein; protein id: At3g63010.1
  misc_feature (77)..(77): Xaa is any aa, unknown or other
  misc_feature (78)..(78): Xaa is any aa, unknown or other

SEQ ID NO: 2667 - DNA, 1242 bp, Zea mays subsp. mays
  misc_feature (1)..(1242): Ceres Seq. ID no. 12410601
  misc_feature: MA Experiment ID: 20000108 Result: Up-regulated in Transcription
  misc_feature: MA Experiment 20000108 PARAMETER Experiment Name: Zm_Root-Tips_P Parameter: Age (day) Value: 12
  misc_feature: MA Experiment 20000108 PARAMETER Experiment Name: Zm_Root-Tips_P Parameter: Organism Value: Zea mays
  misc_feature: MA Experiment 20000108 PARAMETER Experiment Name: Zm_Root-Tips_P Parameter: Tissue Value: Root tips vs. Root mid region    35
  misc_feature: MA Experiment 20000108 PARAMETER Experiment Name: Zm_Root-Tips_P Parameter: Tissue Value: Root tips vs. Root mid region   Sequence Listing-Misc Features (4)
  misc_feature: MA Experiment ID: 20000487 Result: Up-regulated in Transcription
  misc_feature: MA Experiment 20000487 PARAMETER Experiment Name: Zm_50mM_NH4NO3_L_to_H_P Parameter: Organism Value: Zea mays
  misc_feature: MA Experiment 20000487 PARAMETER Experiment Name: Zm_50mM_NH4NO3_L_to_H_P Parameter: Timepoint (hr) Value: 4
  misc_feature: MA Experiment 20000487 PARAMETER Experiment Name: Zm_50mM_NH4NO3_L_to_H_P Parameter: Tissue Value: Leaves
  misc_feature: MA Experiment 20000487 PARAMETER Experiment Name: Zm_50mM_NH4NO3_L_to_H_P Parameter: Treatment Value: 50mM NH4NO3 vs. 100mM Mannitol
  misc_feature: MA Experiment ID: 20000488 Result: Up-regulated in Transcription
  misc_feature: MA Experiment 20000488 PARAMETER Experiment Name: Zm_50mM_NH4NO3_L_to_H_P Parameter: Organism Value: Zea mays
  misc_feature: MA Experiment 20000488 PARAMETER Experiment Name: Zm_50mM_NH4NO3_L_to_H_P Parameter: Timepoint (hr) Value: 8
  misc_feature: MA Experiment 20000488 PARAMETER Experiment Name: Zm_50mM_NH4NO3_L_to_H_P Parameter: Tissue Value: Leaves
  misc_feature: MA Experiment 20000488 PARAMETER Experiment Name: Zm_50mM_NH4NO3_L_to_H_P Parameter: Treatment Value: 50mM NH4NO3 vs. 100mM Mannitol
aaccctgaactgggccggccgtcgctgcattcccccttccgctgcccaacgacccttcccgtccgctggcaaccctcgcctccgcgtggcactccagggctccagaccccgccgccgccctaagccagacgctgaggcttgtggtctcttcgccggagacgagcaccaaccaggatgcaatgtttggtccggaatgtctgccgagccggaagccgtggagcggcggcgaggctcctggagcttgccgcggctggtccgggtgcgacgcagccatccgtggccgtcaaactcctcaggccgccttacgagttcacacgtccgatcggggtagttcaacccgtacgtgtgcagagccgggccgtttcgcgtgatggcctcgttcctgccgcggccacctccggttttggtctctgcgcacaagttatcgtcgcgatgaggggtctgtcgacggtggggagtgcggccgaggtcgtttctgattcggacgattccacctcccctgcggttgagcaccccccgcgcatcaagttcaagaggcccgacaagaccgccaggcacattatgaatatcctaaacaaagaggcggtcgaaaaggtccgctcggaaagggagattcctgatgtgcagcctggatgcatcattcagatgagattgcaagttcctgagaacaaacggcgtgagtcgacgctgaaggggattgtgataggaaggcgcaacgccgggatcaatacaaccttcagattgcgtagattagtggctggtgtcggagtcgagtctgtctttccactttactcgccaaacatcaaagaaatcaaggtattggacaggaagaaagtcaggagagctaagctgtattacctgagggacaggatgaacgcacttagaaaatgagtctttcagcttgtttcaaggaatttcgccgtgcggatcagcacggtttctgaagtgcaacggttgcagccctgagaattgcattgtctggttccacatcgttgcaaagccatagcctgtagttgtcgattgccatgcttggttttgagctgcaagtgctagcagatatatgttttccgacacaataaaaaattgcggttattcccttttcgatttacgacactgtagcttcatagcacaaaataacgtgctcagatctattacttccctccgcacctttactatctaggatgtatgtgttttttgacataagcaagctggaaagtgaaaactcttatgtgatgcttcctg

SEQ ID NO: 2668 - protein, 238 aa, Zea mays subsp. mays
  peptide (1)..(238): Ceres Seq. ID no. 12410602
  misc_feature (130)..(235): Pfam Name: Ribosomal protein L19 Pfam Description: Ribosomal protein L19
  misc_feature (128)..(232): Homolog of NCBI NO: 23014871 NR Description: hypothetical protein [Magnetospirillum
  misc_feature (94)..(233): Homolog of NCBI NO: 14140122 NR Description: putative plastid ribosomal protein L19 precursor
  misc_feature (91)..(236): Homolog of NCBI NO: 8809601 NR Description: contains similarity to plastid ribosomal protein
  misc_feature (33)..(236): Homolog of NCBI NO: 21592584 NR Description: contains similarity to plastid ribosomal protein
  misc_feature (33)..(236): Homolog of NCBI NO: 18422764 NR Description: putative protein
  misc_feature (105)..(236): Homolog of NCBI NO: 7582403 NR Description: plastid ribosomal protein L19 precursor [Spinacia
  misc_feature (58)..(236): Homolog of NCBI NO: 18414915 NR Description: putative protein
  misc_feature (68)..(238): Homolog of NCBI NO: 18395422 NR Description: expressed protein
  misc_feature (86)..(238): Homolog of NCBI NO: 15239778 NR Description: putative protein
  misc_feature (60)..(238): Homolog of NCBI NO: 15234249 NR Description: putative protein
MQCLVRNVCRAGSRGAAARLLELAAAGPGATQPSVAVKLLRPPYEFTRPIGVVQPVRVQSRAVSRDGLVPAAATSGFGLCAQVIVAMRGLSTVGSAAEVVSDSDDSTSPAVEHPPRIKFKRPDKTARHIMNILNKEAVEKVRSEREIPDVQPGCIIQMRLQVPENKRRESTLKGIVIGRRNAGINTTFRLRRLVAGVGVESVFPLYSPNIKEIKVLDRKKVRRAKLYYLRDRMNALRK

SEQ ID NO: 2669 - protein, 152 aa, Zea mays subsp. mays
  peptide (1)..(152): Ceres Seq. ID no. 12410603
  misc_feature (44)..(149): Pfam Name: Ribosomal protein L19 Pfam Description: Ribosomal protein L19
  misc_feature (42)..(146): Homolog of NCBI NO: 23014871 NR Description: hypothetical protein [Magnetospirillum
  misc_feature (8)..(147): Homolog of NCBI NO: 14140122 NR Description: putative plastid ribosomal protein L19 precursor
  misc_feature (5)..(150): Homolog of NCBI NO: 8809601 NR Description: contains similarity to plastid ribosomal protein
  misc_feature (1)..(150): Homolog of NCBI NO: 21592584 NR Description: contains similarity to plastid ribosomal protein
  misc_feature (1)..(150): Homolog of NCBI NO: 18422764 NR Description: putative protein
  misc_feature (19)..(150): Homolog of NCBI NO: 7582403 NR Description: plastid ribosomal protein L19 precursor [Spinacia
  misc_feature (1)..(150): Homolog of NCBI NO: 18414915 NR Description: putative protein
  misc_feature (1)..(152): Homolog of NCBI NO: 18395422 NR Description: expressed protein
  misc_feature (1)..(152): Homolog of NCBI NO: 15239778 NR Description: putative protein
  misc_feature (1)..(152): Homolog of NCBI NO: 15234249 NR Description: putative protein
MRGLSTVGSAAEVVSDSDDSTSPAVEHPPRIKFKRPDKTARHIMNILNKEAVEKVRSEREIPDVQPGCIIQMRLQVPENKRRESTLKGIVIGRRNAGINTTFRLRRLVAGVGVESVFPLYSPNIKEIKVLDRKKVRRAKLYYLRDRMNALRK

SEQ ID NO: 2670 - DNA, 1435 bp, Zea mays subsp. mays
  misc_feature (1)..(1435): Ceres Seq. ID no. 12352690
  misc_feature: MA Experiment ID: 108527 Result: Down-regulated in Transcription
  misc_feature: MA Experiment 108527 PARAMETER Experiment Name: Zm_5mM_NO_P Parameter: Age (day) Value: 8
  misc_feature: MA Experiment 108527 PARAMETER Experiment Name: Zm_5mM_NO_P Parameter: Organism Value: Zea mays
  misc_feature: MA Experiment 108527 PARAMETER Experiment Name: Zm_5mM_NO_P Parameter: Plant Line Value: 35A19
  misc_feature: MA Experiment 108527 PARAMETER Experiment Name: Zm_5mM_NO_P Parameter: Timepoint (hr) Value: 6
  misc_feature: MA Experiment 108527 PARAMETER Experiment Name: Zm_5mM_NO_P Parameter: Tissue Value: Aerial
  misc_feature: MA Experiment 108527 PARAMETER Experiment Name: Zm_5mM_NO_P Parameter: Treatment Value: 5mM NO vs. No Treatment
  misc_feature: MA Experiment ID: 108528 Result: Up-regulated in Transcription
  misc_feature: MA Experiment 108528 PARAMETER Experiment Name: Zm_Imbibed_Seeds_P Parameter: Age (day) Value: 5 vs. 2
  misc_feature: MA Experiment 108528 PARAMETER Experiment Name: Zm_Imbibed_Seeds_P Parameter: Organism Value: Zea mays
  misc_feature: MA Experiment 108528 PARAMETER Experiment Name: Zm_Imbibed_Seeds_P Parameter: Plant Line Value: 35A19
  misc_feature: MA Experiment 108528 PARAMETER Experiment Name: Zm_Imbibed_Seeds_P Parameter: Tissue Value: Aerial vs. Embryo
  misc_feature: MA Experiment ID: 108529 Result: Down-regulated in Transcription
  misc_feature: MA Experiment 108529 PARAMETER Experiment Name: Zm_Imbibed_Seeds_P Parameter: Age (day) Value: 5 vs. 2
  misc_feature: MA Experiment 108529 PARAMETER Experiment Name: Zm_Imbibed_Seeds_P Parameter: Organism Value: Zea mays
  misc_feature: MA Experiment 108529 PARAMETER Experiment Name: Zm_Imbibed_Seeds_P Parameter: Plant Line Value: 35A19
  misc_feature: MA Experiment 108529 PARAMETER Experiment Name: Zm_Imbibed_Seeds_P Parameter: Tissue Value: Roots vs. Embryo
  misc_feature: MA Experiment ID: 108530 Result: Up-regulated in Transcription
  misc_feature: MA Experiment 108530 PARAMETER Experiment Name: Zm_Imbibed_Seeds_P Parameter: Age (day) Value: 6 vs. 2
  misc_feature: MA Experiment 108530 PARAMETER Experiment Name: Zm_Imbibed_Seeds_P Parameter: Organism Value: Zea mays
  misc_feature: MA Experiment 108530 PARAMETER Experiment Name: Zm_Imbibed_Seeds_P Parameter: Plant Line Value: 35A19
  misc_feature: MA Experiment 108530 PARAMETER Experiment Name: Zm_Imbibed_Seeds_P Parameter: Tissue Value: Aerial vs. Embryo
  misc_feature: MA Experiment ID: 108536 Result: Down-regulated in Transcription
  misc_feature: MA Experiment 108536 PARAMETER Experiment Name: Zm_Meristem_P Parameter: Age (day) Value: 8
  misc_feature: MA Experiment 108536 PARAMETER Experiment Name: Zm_Meristem_P Parameter: Organism Value: Zea mays
  misc_feature: MA Experiment 108536 PARAMETER Experiment Name: Zm_Meristem_P Parameter: Plant Line Value: 35A19
  misc_feature: MA Experiment 108536 PARAMETER Experiment Name: Zm_Meristem_P Parameter: Tissue Value: Shoot Meristem vs. Above Shoot Meristem
  misc_feature: MA Experiment ID: 108543 Result: Up-regulated in Transcription
  misc_feature: MA Experiment ID: 108545 Result: Up-regulated in Transcription
  misc_feature: MA Experiment 108545 PARAMETER Experiment Name: Zm_Imbibed_Seeds_P Parameter: Age (day) Value: 3 vs. 2
  misc_feature: MA Experiment 108545 PARAMETER Experiment Name: Zm_Imbibed_Seeds_P Parameter: Organism Value: Zea mays
  misc_feature: MA Experiment 108545 PARAMETER Experiment Name: Zm_Imbibed_Seeds_P Parameter: Plant Line Value: 35A19
  misc_feature: MA Experiment 108545 PARAMETER Experiment Name: Zm_Imbibed_Seeds_P Parameter: Tissue Value: Aerial vs. Embryo
  misc_feature: MA Experiment ID: 108546 Result: Down-regulated in Transcription
  misc_feature: MA Experiment 108546 PARAMETER Experiment Name: Zm_Imbibed_Seeds_P Parameter: Age (day) Value: 3 vs. 2
  misc_feature: MA Experiment 108546 PARAMETER Experiment Name: Zm_Imbibed_Seeds_P Parameter: Organism Value: Zea mays
  misc_feature: MA Experiment 108546 PARAMETER Experiment Name: Zm_Imbibed_Seeds_P Parameter: Plant Line Value: 35A19
  misc_feature: MA Experiment 108546 PARAMETER Experiment Name: Zm_Imbibed_Seeds_P Parameter: Tissue Value: Roots vs. Embryo
  misc_feature: MA Experiment ID: 108547 Result: Up-regulated in Transcription
  misc_feature: MA Experiment 108547 PARAMETER Experiment Name: Zm_Imbibed_Seeds_P Parameter: Age (day) Value: 4 vs. 2
  misc_feature: MA Experiment 108547 PARAMETER Experiment Name: Zm_Imbibed_Seeds_P Parameter: Organism Value: Zea mays
  misc_feature: MA Experiment 108547 PARAMETER Experiment Name: Zm_Imbibed_Seeds_P Parameter: Plant Line Value: 35A19
  misc_feature: MA Experiment 108547 PARAMETER Experiment Name: Zm_Imbibed_Seeds_P Parameter: Tissue Value: Aerial vs. Embryo
  misc_feature: MA Experiment ID: 108556 Result: Down-regulated in Transcription
  misc_feature: MA Experiment 108556 PARAMETER Experiment Name: Zm_Drought_P Parameter: Age (day) Value: 9
  misc_feature: MA Experiment 108556 PARAMETER Experiment Name: Zm_Drought_P Parameter: Organism Value: Zea mays
  misc_feature: MA Experiment 108556 PARAMETER Experiment Name: Zm_Drought_P Parameter: Plant Line Value: 35A19
  misc_feature: MA Experiment 108556 PARAMETER Experiment Name: Zm_Drought_P Parameter: Timepoint (hr) Value: 24
  misc_feature: MA Experiment 108556 PARAMETER Experiment Name: Zm_Drought_P Parameter: Tissue Value: Aerial
  misc_feature: MA Experiment 108556 PARAMETER Experiment Name: Zm_Drought_P Parameter: Treatment Value: Drought vs. No Drought
  misc_feature: MA Experiment ID: 108559 Result: Down-regulated in Transcription
  misc_feature: MA Experiment 108559 PARAMETER Experiment Name: Zm_5mM_NO_P Parameter: Age (day) Value: 8
  misc_feature: MA Experiment 108559 PARAMETER Experiment Name: Zm_5mM_NO_P Parameter: Organism Value: Zea mays
  misc_feature: MA Experiment 108559 PARAMETER Experiment Name: Zm_5mM_NO_P Parameter: Plant Line Value: 35A19
  misc_feature: MA Experiment 108559 PARAMETER Experiment Name: Zm_5mM_NO_P Parameter: Timepoint (hr) Value: 12
  misc_feature: MA Experiment 108559 PARAMETER Experiment Name: Zm_5mM_NO_P Parameter: Tissue Value: Aerial
  misc_feature: MA Experiment 108559 PARAMETER Experiment Name: Zm_5mM_NO_P Parameter: Treatment Value: 5mM NO vs. No Treatment
  misc_feature: MA Experiment ID: 108687 Result: Down-regulated in Transcription
  misc_feature: MA Experiment 108687 PARAMETER Experiment Name: Zm_Embryos-Flowers__P Parameter: Tissue Value: Embryo vs. Aerial+
  misc_feature: MA Experiment ID: 108688 Result: Down-regulated in Transcription
  misc_feature: MA Experiment 108688 PARAMETER Experiment Name: Zm_Embryos-Flowers__P Parameter: Tissue Value: Immature Flowers vs. Aerial+
  misc_feature: MA Experiment ID: 20000479 Result: Down-regulated in Transcription
  misc_feature: MA Experiment 20000479 PARAMETER Experiment Name: Zm_Drought_P Parameter: Age (day) Value: 10
  misc_feature: MA Experiment 20000479 PARAMETER Experiment Name: Zm_Drought_P Parameter: Organism Value: Zea mays
  misc_feature: MA Experiment 20000479 PARAMETER Experiment Name: Zm_Drought_P Parameter: Plant Line Value: 35A19
  misc_feature: MA Experiment 20000479 PARAMETER Experiment Name: Zm_Drought_P Parameter: Timepoint (hr) Value: 48
  misc_feature: MA Experiment 20000479 PARAMETER Experiment Name: Zm_Drought_P Parameter: Tissue Value: Aerial
  misc_feature: MA Experiment 20000479 PARAMETER Experiment Name: Zm_Drought_P Parameter: Treatment Value: Drought vs. No Drought
  misc_feature: MA Experiment ID: 20000480 Result: Down-regulated in Transcription
  misc_feature: MA Experiment 20000480 PARAMETER Experiment Name: Zm_Drought_P Parameter: Age (day) Value: 11
  misc_feature: MA Experiment 20000480 PARAMETER Experiment Name: Zm_Drought_P Parameter: Organism Value: Zea mays
  misc_feature: MA Experiment 20000480 PARAMETER Experiment Name: Zm_Drought_P Parameter: Plant Line Value: 35A19
  misc_feature: MA Experiment 20000480 PARAMETER Experiment Name: Zm_Drought_P Parameter: Timepoint (hr) Value: 72
  misc_feature: MA Experiment 20000480 PARAMETER Experiment Name: Zm_Drought_P Parameter: Tissue Value: Aerial
  misc_feature: MA Experiment 20000480 PARAMETER Experiment Name: Zm_Drought_P Parameter: Treatment Value: Drought vs. No Drought
  misc_feature: MA Experiment ID: 20000535 Result: Down-regulated in Transcription
  misc_feature: MA Experiment 20000535 PARAMETER Experiment Name: Zm_Hybrid_Seed_Dev_P Parameter: DAP Value: 30 vs. 12
  misc_feature: MA Experiment 20000535 PARAMETER Experiment Name: Zm_Hybrid_Seed_Dev_P Parameter: Organism Value: Zea mays
  misc_feature: MA Experiment 20000535 PARAMETER Experiment Name: Zm_Hybrid_Seed_Dev_P Parameter: Plant Line Value: 35A19
  misc_feature: MA Experiment 20000535 PARAMETER Experiment Name: Zm_Hybrid_Seed_Dev_P Parameter: Tissue Value: Embryo vs. Unfert Floret
  misc_feature: MA Experiment ID: 20000626 Result: Down-regulated in Transcription
  misc_feature: MA Experiment 20000626 PARAMETER Experiment Name: Zm_Herbicide-Treatments_P Parameter: Timepoint (hr) Value: 12
  misc_feature: MA Experiment 20000626 PARAMETER Experiment Name: Zm_Herbicide-Treatments_P Parameter: Tissue Value: Aerial
  misc_feature: MA Experiment 20000626 PARAMETER Experiment Name: Zm_Herbicide-Treatments_P Parameter: Treatment Value: Roundup vs. No Treatment
accaaacccactcgcaacaacggataacgctctcttccttcggctcctcccctctcgctcctatcctctcccctccaatggcgaccgccatttcctctctagtaactcctccgaccctccaccgccgctgcctgggccctgcctgcgtctccgtctccgtgtgcacccctatccgcatctccttccggcccgccgccgcgcctcaggtgtcgcgccggggctcggcgctgcgggtgtccgcctcctcggcggtgctcgaggcgccagaggcggtggcggcgcggaagctctacgtggggaatatccccaggaccgttacaaacgacgagctccgcgacatgttcgctgcgcacggcaccgtcgagcgggccgaggttatgtacgacaagtatacgaatcgcagccggcggtttgggtttgtcacgatgagcacagcggaagaggccaatgctgcagttgaggctctcaatgggactgaggttggtgatagaaaaattaaagtgaacgtcacagagagcttcttaccgaacattgaccgatcagcaccagaaccagaggctctgtttgtagatagtcagtacaaggtttatgttggtaatcttgcgaagactgtaacaaccgaagttcttaaaaacttcttctccgaaaaggggaatatcctcagtgcaacagtctcccacattccggggacctccaagtcaaaggggtatggctttgtcacattctcttctgaggaagaagttgaagctgctgttgctactttcaataacgcggtaagcttctcttgcaaattttatgcatttctgccatttctttccaacctcataaaatagtagtcaccatttggctattgccaaacaaaagaaaaacgttgtgctacaatcttctatgttatcatttaggtgtcaaatagatggaaatatggaattaacatattgactgttaattgtacagatgagttagaattacatcatctcaactacgtcaactggtgccatattgttctgacatatcattcccacagaaacttatttgctgatattaataacattgcccgttcttcaaccgtacttcagcacacatcaagaccataatctcctatatttgctattcaaaagatttctgaagccttgaaagttggcatgcttttgatatcaaactttggaacataacctgtcgctaatgttttatattgttctacaattaaatgtggtgtcaggaattggaaggacaactcattcgtgtgaatagagcttagattagcagaaatttgcaggggcaccggaggagggggaatatcttggcgaatacatgtagtaggagggatgttttgaggctagattttgataacaaagtgatcaagaccttcaatgtgatttcgatatgtcatacaatttttgtaccataacagtatatttttcttaacggcacttct

SEQ ID NO: 2671 - protein, 276 aa, Zea mays subsp. mays
  peptide (1)..(276): Ceres Seq. ID no. 12352691
  misc_feature (195)..(256): Pfam Name: RNA recognition motif. (a.k.a. RRM, RBD, or RNP domain) Pfam Description: RNA recognition motif. (a.k.a. RRM, RBD, or RNP
  misc_feature (89)..(255): Homolog of NCBI NO: 7446342 NR Description: RNA-binding protein precursor, 33K - wood tobacco
  misc_feature (89)..(270): Homolog of NCBI NO: 100376 NR Description: ribonucleoprotein precursor - common tobacco
  misc_feature (95)..(255): Homolog of NCBI NO: 15231200 NR Description: chloroplast RNA-binding protein cp33
  misc_feature (95)..(255): Homolog of NCBI NO: 17064758 NR Description: ubiquitin / ribosomal protein CEP52 [Arabidopsis
  misc_feature (95)..(255): Homolog of NCBI NO: 681912 NR Description: cp33 [Arabidopsis thaliana]
  misc_feature (27)..(255): Homolog of NCBI NO: 34913270 NR Description: putative ribonucleoprotein
  misc_feature (156)..(256): Homolog of NCBI NO: 20159727 NR Description: plastid-specific ribosomal protein 2 precursor
  misc_feature (83)..(258): Homolog of NCBI NO: 11357772 NR Description: hypothetical protein F4F15.260 - Arabidopsis
  misc_feature (83)..(258): Homolog of NCBI NO: 30693595 NR Description: RNA recognition motif (RRM)-containing protein
  misc_feature (79)..(258): Homolog of NCBI NO: 7578881 NR Description: plastid-specific ribosomal protein 2 precursor
QTHSQQRITLSSFGSSPLAPILSPPMATAISSLVTPPTLHRRCLGPACVSVSVCTPIRISFRPAAAPQVSRRGSALRVSASSAVLEAPEAVAARKLYVGNIPRTVTNDELRDMFAAHGTVERAEVMYDKYTNRSRRFGFVTMSTAEEANAAVEALNGTEVGDRKIKVNVTESFLPNIDRSAPEPEALFVDSQYKVYVGNLAKTVTTEVLKNFFSEKGNILSATVSHIPGTSKSKGYGFVTFSSEEEVEAAVATFNNAVSFSCKFYAFLPFLSNLIK

SEQ ID NO: 2672 - protein, 251 aa, Zea mays subsp. mays
  peptide (1)..(251): Ceres Seq. ID no. 12352692
  misc_feature (170)..(231): Pfam Name: RNA recognition motif. (a.k.a. RRM, RBD, or RNP domain) Pfam Description: RNA recognition motif. (a.k.a. RRM, RBD, or RNP
  misc_feature (64)..(230): Homolog of NCBI NO: 7446342 NR Description: RNA-binding protein precursor, 33K - wood tobacco
  misc_feature (64)..(245): Homolog of NCBI NO: 100376 NR Description: ribonucleoprotein precursor - common tobacco
  misc_feature (70)..(230): Homolog of NCBI NO: 17064758 NR Description: ubiquitin / ribosomal protein CEP52 [Arabidopsis
  misc_feature (70)..(230): Homolog of NCBI NO: 15231200 NR Description: chloroplast RNA-binding protein cp33
  misc_feature (70)..(230): Homolog of NCBI NO: 681912 NR Description: cp33 [Arabidopsis thaliana]
  misc_feature (2)..(230): Homolog of NCBI NO: 34913270 NR Description: putative ribonucleoprotein
  misc_feature (131)..(231): Homolog of NCBI NO: 20159727 NR Description: plastid-specific ribosomal protein 2 precursor
  misc_feature (58)..(233): Homolog of NCBI NO: 11357772 NR Description: hypothetical protein F4F15.260 - Arabidopsis
  misc_feature (58)..(233): Homolog of NCBI NO: 30693595 NR Description: RNA recognition motif (RRM)-containing protein
  misc_feature (54)..(233): Homolog of NCBI NO: 7578881 NR Description: plastid-specific ribosomal protein 2 precursor
MATAISSLVTPPTLHRRCLGPACVSVSVCTPIRISFRPAAAPQVSRRGSALRVSASSAVLEAPEAVAARKLYVGNIPRTVTNDELRDMFAAHGTVERAEVMYDKYTNRSRRFGFVTMSTAEEANAAVEALNGTEVGDRKIKVNVTESFLPNIDRSAPEPEALFVDSQYKVYVGNLAKTVTTEVLKNFFSEKGNILSATVSHIPGTSKSKGYGFVTFSSEEEVEAAVATFNNAVSFSCKFYAFLPFLSNLIK

SEQ ID NO: 2673 - protein, 164 aa, Zea mays subsp. mays
  peptide (1)..(164): Ceres Seq. ID no. 12352693
  misc_feature (83)..(144): Pfam Name: RNA recognition motif. (a.k.a. RRM, RBD, or RNP domain) Pfam Description: RNA recognition motif. (a.k.a. RRM, RBD, or RNP
  misc_feature (1)..(143): Homolog of NCBI NO: 7446342 NR Description: RNA-binding protein precursor, 33K - wood tobacco
  misc_feature (1)..(158): Homolog of NCBI NO: 100376 NR Description: ribonucleoprotein precursor - common tobacco
  misc_feature (1)..(143): Homolog of NCBI NO: 17064758 NR Description: ubiquitin / ribosomal protein CEP52 [Arabidopsis
  misc_feature (1)..(143): Homolog of NCBI NO: 15231200 NR Description: chloroplast RNA-binding protein cp33
  misc_feature (1)..(143): Homolog of NCBI NO: 681912 NR Description: cp33 [Arabidopsis thaliana]
  misc_feature (1)..(143): Homolog of NCBI NO: 34913270 NR Description: putative ribonucleoprotein
  misc_feature (44)..(144): Homolog of NCBI NO: 20159727 NR Description: plastid-specific ribosomal protein 2 precursor
  misc_feature (1)..(146): Homolog of NCBI NO: 11357772 NR Description: hypothetical protein F4F15.260 - Arabidopsis
  misc_feature (1)..(146): Homolog of NCBI NO: 30693595 NR Description: RNA recognition motif (RRM)-containing protein
  misc_feature (1)..(146): Homolog of NCBI NO: 7578881 NR Description: plastid-specific ribosomal protein 2 precursor
MFAAHGTVERAEVMYDKYTNRSRRFGFVTMSTAEEANAAVEALNGTEVGDRKIKVNVTESFLPNIDRSAPEPEALFVDSQYKVYVGNLAKTVTTEVLKNFFSEKGNILSATVSHIPGTSKSKGYGFVTFSSEEEVEAAVATFNNAVSFSCKFYAFLPFLSNLIK

SEQ ID NO: 2674 - DNA, 1881 bp, Zea mays subsp. mays
  misc_feature (1)..(1881): Ceres Seq. ID no. 12341608
  misc_feature: MA Experiment ID: 108527 Result: Down-regulated in Transcription
  misc_feature: MA Experiment 108527 PARAMETER Experiment Name: Zm_5mM_NO_P Parameter: Age (day) Value: 8
  misc_feature: MA Experiment 108527 PARAMETER Experiment Name: Zm_5mM_NO_P Parameter: Organism Value: Zea mays
  misc_feature: MA Experiment 108527 PARAMETER Experiment Name: Zm_5mM_NO_P Parameter: Plant Line Value: 35A19
  misc_feature: MA Experiment 108527 PARAMETER Experiment Name: Zm_5mM_NO_P Parameter: Timepoint (hr) Value: 6
  misc_feature: MA Experiment 108527 PARAMETER Experiment Name: Zm_5mM_NO_P Parameter: Tissue Value: Aerial
  misc_feature: MA Experiment 108527 PARAMETER Experiment Name: Zm_5mM_NO_P Parameter: Treatment Value: 5mM NO vs. No Treatment
  misc_feature: MA Experiment ID: 108535 Result: Down-regulated in Transcription
  misc_feature: MA Experiment 108535 PARAMETER Experiment Name: Zm_Meristem_P Parameter: Age (day) Value: 8
  misc_feature: MA Experiment 108535 PARAMETER Experiment Name: Zm_Meristem_P Parameter: Organism Value: Zea mays
  misc_feature: MA Experiment 108535 PARAMETER Experiment Name: Zm_Meristem_P Parameter: Plant Line Value: 35A19
  misc_feature: MA Experiment 108535 PARAMETER Experiment Name: Zm_Meristem_P Parameter: Tissue Value: Root Meristem vs. Above Root Meristem
  misc_feature: MA Experiment ID: 108536 Result: Up-regulated in Transcription
  misc_feature: MA Experiment 108536 PARAMETER Experiment Name: Zm_Meristem_P Parameter: Age (day) Value: 8
  misc_feature: MA Experiment 108536 PARAMETER Experiment Name: Zm_Meristem_P Parameter: Organism Value: Zea mays
  misc_feature: MA Experiment 108536 PARAMETER Experiment Name: Zm_Meristem_P Parameter: Plant Line Value: 35A19
  misc_feature: MA Experiment 108536 PARAMETER Experiment Name: Zm_Meristem_P Parameter: Tissue Value: Shoot Meristem vs. Above Shoot Meristem
  misc_feature: MA Experiment ID: 108544 Result: Up-regulated in Transcription
  misc_feature: MA Experiment ID: 108545 Result: Down-regulated in Transcription
  misc_feature: MA Experiment 108545 PARAMETER Experiment Name: Zm_Imbibed_Seeds_P Parameter: Age (day) Value: 3 vs. 2
  misc_feature: MA Experiment 108545 PARAMETER Experiment Name: Zm_Imbibed_Seeds_P Parameter: Organism Value: Zea mays
  misc_feature: MA Experiment 108545 PARAMETER Experiment Name: Zm_Imbibed_Seeds_P Parameter: Plant Line Value: 35A19
  misc_feature: MA Experiment 108545 PARAMETER Experiment Name: Zm_Imbibed_Seeds_P Parameter: Tissue Value: Aerial vs. Embryo
  misc_feature: MA Experiment ID: 108559 Result: Down-regulated in Transcription
  misc_feature: MA Experiment 108559 PARAMETER Experiment Name: Zm_5mM_NO_P Parameter: Age (day) Value: 8
  misc_feature: MA Experiment 108559 PARAMETER Experiment Name: Zm_5mM_NO_P Parameter: Organism Value: Zea mays
  misc_feature: MA Experiment 108559 PARAMETER Experiment Name: Zm_5mM_NO_P Parameter: Plant Line Value: 35A19
  misc_feature: MA Experiment 108559 PARAMETER Experiment Name: Zm_5mM_NO_P Parameter: Timepoint (hr) Value: 12
  misc_feature: MA Experiment 108559 PARAMETER Experiment Name: Zm_5mM_NO_P Parameter: Tissue Value: Aerial
  misc_feature: MA Experiment 108559 PARAMETER Experiment Name: Zm_5mM_NO_P Parameter: Treatment Value: 5mM NO vs. No Treatment
  misc_feature: MA Experiment ID: 20000479 Result: Down-regulated in Transcription
  misc_feature: MA Experiment 20000479 PARAMETER Experiment Name: Zm_Drought_P Parameter: Age (day) Value: 10
  misc_feature: MA Experiment 20000479 PARAMETER Experiment Name: Zm_Drought_P Parameter: Organism Value: Zea mays
  misc_feature: MA Experiment 20000479 PARAMETER Experiment Name: Zm_Drought_P Parameter: Plant Line Value: 35A19
  misc_feature: MA Experiment 20000479 PARAMETER Experiment Name: Zm_Drought_P Parameter: Timepoint (hr) Value: 48
  misc_feature: MA Experiment 20000479 PARAMETER Experiment Name: Zm_Drought_P Parameter: Tissue Value: Aerial
  misc_feature: MA Experiment 20000479 PARAMETER Experiment Name: Zm_Drought_P Parameter: Treatment Value: Drought vs. No Drought
  misc_feature: MA Experiment ID: 20000480 Result: Down-regulated in Transcription
  misc_feature: MA Experiment 20000480 PARAMETER Experiment Name: Zm_Drought_P Parameter: Age (day) Value: 11
  misc_feature: MA Experiment 20000480 PARAMETER Experiment Name: Zm_Drought_P Parameter: Organism Value: Zea mays
  misc_feature: MA Experiment 20000480 PARAMETER Experiment Name: Zm_Drought_P Parameter: Plant Line Value: 35A19
  misc_feature: MA Experiment 20000480 PARAMETER Experiment Name: Zm_Drought_P Parameter: Timepoint (hr) Value: 72
  misc_feature: MA Experiment 20000480 PARAMETER Experiment Name: Zm_Drought_P Parameter: Tissue Value: Aerial
  misc_feature: MA Experiment 20000480 PARAMETER Experiment Name: Zm_Drought_P Parameter: Treatment Value: Drought vs. No Drought
  misc_feature: MA Experiment ID: 20000488 Result: Up-regulated in Transcription
  misc_feature: MA Experiment 20000488 PARAMETER Experiment Name: Zm_50mM_NH4NO3_L_to_H_P Parameter: Organism Value: Zea mays
  misc_feature: MA Experiment 20000488 PARAMETER Experiment Name: Zm_50mM_NH4NO3_L_to_H_P Parameter: Timepoint (hr) Value: 8
  misc_feature: MA Experiment 20000488 PARAMETER Experiment Name: Zm_50mM_NH4NO3_L_to_H_P Parameter: Tissue Value: Leaves
  misc_feature: MA Experiment 20000488 PARAMETER Experiment Name: Zm_50mM_NH4NO3_L_to_H_P Parameter: Treatment Value: 50mM NH4NO3 vs. 100mM Mannitol
  misc_feature: MA Experiment ID: 20000535 Result: Down-regulated in Transcription
  misc_feature: MA Experiment 20000535 PARAMETER Experiment Name: Zm_Hybrid_Seed_Dev_P Parameter: DAP Value: 30 vs. 12
  misc_feature: MA Experiment 20000535 PARAMETER Experiment Name: Zm_Hybrid_Seed_Dev_P Parameter: Organism Value: Zea mays
  misc_feature: MA Experiment 20000535 PARAMETER Experiment Name: Zm_Hybrid_Seed_Dev_P Parameter: Plant Line Value: 35A19
  misc_feature: MA Experiment 20000535 PARAMETER Experiment Name: Zm_Hybrid_Seed_Dev_P Parameter: Tissue Value: Embryo vs. Unfert Floret
aggcagagcactgcacgccaccttatctctaaccggagatcaaagaagtagccgttaacgatggcttccgacgagctcgcaaaggccgtcgagcccaggaagaagggcaacgtcaagtatgcctccatatgtgccatcctggcctccatggcctctgtcatccttggctatgacattggggtgatgagtggagcggccatgtacatcaagaaggacctgaatatcacggacgtgcagctggagatcctgatcgggatcctcagtctctactcgctgttcggatccttcgctggcgcgcggacgtccgacaggatcgggcgccgcttgaccgtcgtgttcgccgctgtcatcttcttcgtgggctcgttgctcatgggtttcgccgtcaactacggcatgctcatggcgggccgcttcgtggccggagtcggtgtgggctacgggggcatgatcgcgcccgtgtacacggccgagatctcgcctgcggcgtcccgtggcttcctgaccaccttcccggaggtgttcatcaacatcggcatcctgcttggctacctgtccaacttcgcgttcgcgcgcctcccgctccacctcggctggcgcgtcatgctcgccattggcgcagttccgtccggcctgctcgcgctcctggtgttctgcatgcccgagtcgcctcggtggctggtcttgaagggccgcctcgcggacgccagggctgtgctagagaagacctctgccacgccagaggaggccgccgagcggctggccgacatcaaggccgcggcggggattccgaagggcctcgacggggacgtagtcaccgtacccggcaaggagcaaggcggcggtgagttgcaggtgtggaagaagctcatcctgtccccgaccccggctgtccgacgcatactgctctcggccgtgggtctccacttcttccagcaggcttctggcagcgactccgtcgtccagtacagcgcccgcctgttcaagagcgcggggatcaccgacgacaacaagctcctgggcgtcacctgcgcggtgggcgtgaccaagacgttcttcatcctggtggccacgttcctgctggaccgcgcggggcgtcggcctctgctgctgatcagcacgggcgggatgatcgtctcgctcatctgcctcgggtcggggctcaccgtcgcggggcatcacccggacaccaaggtcgcgtgggccgtcgccctgtgcatcgcgtccaccctgtcctacatcgccttcttctccatcggcctcgggcccatcacgggcgtgtacacctcggaaatattcccgctgcaggtgcgcgcgctgggcttcgcggtgggtgtggcgagcaaccgcgtcaccagcgccgtcatctccatgaccttcctgtccctctccaaggccatcaccatcggcggcagcttcttcctctactccggcatcgccgcggtcgcttgggttttcttcttcacgtgcctcccggagacacgcggccggacgctggaggagatgggcaagctgttcggcatgccagacacgggcatggctgaagaagcagaagacgccgcagccaaggagaaggtggtggaactgcctagcagcaagtaggtggctatcccagagcacaggtcaagtgaagtagatggacaagatcattgtcttttcaactaattagatgggcaagaataactaagactgccctatgaggtgtcgtggttcaaccagagatcattctgctccttttcttttcccttcctttttcgagtaccattcccattcgtcgtggtcagtacgatgttgggtcgttgggagttagtggtgtcagagtccgcgtgtgctttgcaagccagggctgaacccacaatcatcagtaacaaaaattcttcc

SEQ ID NO: 2675 - protein, 513 aa, Zea mays subsp. mays
  peptide (1)..(513): Ceres Seq. ID no. 12341609
  misc_feature (24)..(486): Pfam Name: Sugar (and other) transporter Pfam Description: Sugar (and other) transporter
  misc_feature (6)..(486): Homolog of NCBI NO: 15234491 NR Description: sugar transporter like protein; protein id:
  misc_feature (11)..(504): Homolog of NCBI NO: 12004316 NR Description: mannitol transporter [Apium graveolens var. dulce]
  misc_feature (1)..(487): Homolog of NCBI NO: 34392081 NR Description: polyol transporter [Plantago major]
  misc_feature (11)..(487): Homolog of NCBI NO: 15226696 NR Description: putative sugar transporter; protein id:
  misc_feature (11)..(487): Homolog of NCBI NO: 15226682 NR Description: putative sugar transporter; protein id:
  misc_feature (1)..(486): Homolog of NCBI NO: 7484647 NR Description: probable sugar transport protein 205 - beet
  misc_feature (1)..(486): Homolog of NCBI NO: 1778095 NR Description: putative sugar transporter
  misc_feature (1)..(486): Homolog of NCBI NO: 15230212 NR Description: sugar transport, putative; protein id:
  misc_feature (10)..(487): Homolog of NCBI NO: 28316433 NR Description: sorbitol transporter [Prunus cerasus]
  misc_feature (1)..(512): Homolog of NCBI NO: 16118827 NR Description: putative sugar transporter [Oryza sativa]
MASDELAKAVEPRKKGNVKYASICAILASMASVILGYDIGVMSGAAMYIKKDLNITDVQLEILIGILSLYSLFGSFAGARTSDRIGRRLTVVFAAVIFFVGSLLMGFAVNYGMLMAGRFVAGVGVGYGGMIAPVYTAEISPAASRGFLTTFPEVFINIGILLGYLSNFAFARLPLHLGWRVMLAIGAVPSGLLALLVFCMPESPRWLVLKGRLADARAVLEKTSATPEEAAERLADIKAAAGIPKGLDGDVVTVPGKEQGGGELQVWKKLILSPTPAVRRILLSAVGLHFFQQASGSDSVVQYSARLFKSAGITDDNKLLGVTCAVGVTKTFFILVATFLLDRAGRRPLLLISTGGMIVSLICLGSGLTVAGHHPDTKVAWAVALCIASTLSYIAFFSIGLGPITGVYTSEIFPLQVRALGFAVGVASNRVTSAVISMTFLSLSKAITIGGSFFLYSGIAAVAWVFFFTCLPETRGRTLEEMGKLFGMPDTGMAEEAEDAAAKEKVVELPSSK

SEQ ID NO: 2676 - protein, 484 aa, Zea mays subsp. mays
  peptide (1)..(484): Ceres Seq. ID no. 12341610
  misc_feature (1)..(457): Pfam Name: Sugar (and other) transporter Pfam Description: Sugar (and other) transporter
  misc_feature (1)..(457): Homolog of NCBI NO: 15234491 NR Description: sugar transporter like protein; protein id:
  misc_feature (1)..(475): Homolog of NCBI NO: 12004316 NR Description: mannitol transporter [Apium graveolens var. dulce]
  misc_feature (1)..(458): Homolog of NCBI NO: 34392081 NR Description: polyol transporter [Plantago major]
  misc_feature (1)..(458): Homolog of NCBI NO: 15226696 NR Description: putative sugar transporter; protein id:
  misc_feature (1)..(458): Homolog of NCBI NO: 15226682 NR Description: putative sugar transporter; protein id:
  misc_feature (1)..(457): Homolog of NCBI NO: 7484647 NR Description: probable sugar transport protein 205 - beet
  misc_feature (1)..(457): Homolog of NCBI NO: 1778095 NR Description: putative sugar transporter
  misc_feature (1)..(457): Homolog of NCBI NO: 15230212 NR Description: sugar transport, putative; protein id:
  misc_feature (1)..(458): Homolog of NCBI NO: 28316433 NR Description: sorbitol transporter [Prunus cerasus]
  misc_feature (1)..(483): Homolog of NCBI NO: 16118827 NR Description: putative sugar transporter [Oryza sativa]
MASVILGYDIGVMSGAAMYIKKDLNITDVQLEILIGILSLYSLFGSFAGARTSDRIGRRLTVVFAAVIFFVGSLLMGFAVNYGMLMAGRFVAGVGVGYGGMIAPVYTAEISPAASRGFLTTFPEVFINIGILLGYLSNFAFARLPLHLGWRVMLAIGAVPSGLLALLVFCMPESPRWLVLKGRLADARAVLEKTSATPEEAAERLADIKAAAGIPKGLDGDVVTVPGKEQGGGELQVWKKLILSPTPAVRRILLSAVGLHFFQQASGSDSVVQYSARLFKSAGITDDNKLLGVTCAVGVTKTFFILVATFLLDRAGRRPLLLISTGGMIVSLICLGSGLTVAGHHPDTKVAWAVALCIASTLSYIAFFSIGLGPITGVYTSEIFPLQVRALGFAVGVASNRVTSAVISMTFLSLSKAITIGGSFFLYSGIAAVAWVFFFTCLPETRGRTLEEMGKLFGMPDTGMAEEAEDAAAKEKVVELPSSK

SEQ ID NO: 2677 - protein, 472 aa, Zea mays subsp. mays
  peptide (1)..(472): Ceres Seq. ID no. 12341611
  misc_feature (1)..(445): Pfam Name: Sugar (and other) transporter Pfam Description: Sugar (and other) transporter
  misc_feature (1)..(445): Homolog of NCBI NO: 15234491 NR Description: sugar transporter like protein; protein id:
  misc_feature (1)..(463): Homolog of NCBI NO: 12004316 NR Description: mannitol transporter [Apium graveolens var. dulce]
  misc_feature (1)..(446): Homolog of NCBI NO: 34392081 NR Description: polyol transporter [Plantago major]
  misc_feature (1)..(446): Homolog of NCBI NO: 15226696 NR Description: putative sugar transporter; protein id:
  misc_feature (1)..(446): Homolog of NCBI NO: 15226682 NR Description: putative sugar transporter; protein id:
  misc_feature (1)..(445): Homolog of NCBI NO: 7484647 NR Description: probable sugar transport protein 205 - beet
  misc_feature (1)..(445): Homolog of NCBI NO: 1778095 NR Description: putative sugar transporter
  misc_feature (1)..(445): Homolog of NCBI NO: 15230212 NR Description: sugar transport, putative; protein id:
  misc_feature (1)..(446): Homolog of NCBI NO: 28316433 NR Description: sorbitol transporter [Prunus cerasus]
  misc_feature (1)..(471): Homolog of NCBI NO: 16118827 NR Description: putative sugar transporter [Oryza sativa]
MSGAAMYIKKDLNITDVQLEILIGILSLYSLFGSFAGARTSDRIGRRLTVVFAAVIFFVGSLLMGFAVNYGMLMAGRFVAGVGVGYGGMIAPVYTAEISPAASRGFLTTFPEVFINIGILLGYLSNFAFARLPLHLGWRVMLAIGAVPSGLLALLVFCMPESPRWLVLKGRLADARAVLEKTSATPEEAAERLADIKAAAGIPKGLDGDVVTVPGKEQGGGELQVWKKLILSPTPAVRRILLSAVGLHFFQQASGSDSVVQYSARLFKSAGITDDNKLLGVTCAVGVTKTFFILVATFLLDRAGRRPLLLISTGGMIVSLICLGSGLTVAGHHPDTKVAWAVALCIASTLSYIAFFSIGLGPITGVYTSEIFPLQVRALGFAVGVASNRVTSAVISMTFLSLSKAITIGGSFFLYSGIAAVAWVFFFTCLPETRGRTLEEMGKLFGMPDTGMAEEAEDAAAKEKVVELPSSK

SEQ ID NO: 2678 - DNA, 1230 bp, Zea mays subsp. mays
  misc_feature (1)..(1230): Ceres Seq. ID no. 12410593
  misc_feature: MA Experiment ID: 108527 Result: Down-regulated in Transcription
  misc_feature: MA Experiment 108527 PARAMETER Experiment Name: Zm_5mM_NO_P Parameter: Age (day) Value: 8
  misc_feature: MA Experiment 108527 PARAMETER Experiment Name: Zm_5mM_NO_P Parameter: Organism Value: Zea mays
  misc_feature: MA Experiment 108527 PARAMETER Experiment Name: Zm_5mM_NO_P Parameter: Plant Line Value: 35A19
  misc_feature: MA Experiment 108527 PARAMETER Experiment Name: Zm_5mM_NO_P Parameter: Timepoint (hr) Value: 6
  misc_feature: MA Experiment 108527 PARAMETER Experiment Name: Zm_5mM_NO_P Parameter: Tissue Value: Aerial
  misc_feature: MA Experiment 108527 PARAMETER Experiment Name: Zm_5mM_NO_P Parameter: Treatment Value: 5mM NO vs. No Treatment
  misc_feature: MA Experiment ID: 108530 Result: Up-regulated in Transcription
  misc_feature: MA Experiment 108530 PARAMETER Experiment Name: Zm_Imbibed_Seeds_P Parameter: Age (day) Value: 6 vs. 2
  misc_feature: MA Experiment 108530 PARAMETER Experiment Name: Zm_Imbibed_Seeds_P Parameter: Organism Value: Zea mays
  misc_feature: MA Experiment 108530 PARAMETER Experiment Name: Zm_Imbibed_Seeds_P Parameter: Plant Line Value: 35A19
  misc_feature: MA Experiment 108530 PARAMETER Experiment Name: Zm_Imbibed_Seeds_P Parameter: Tissue Value: Aerial vs. Embryo
  misc_feature: MA Experiment ID: 108545 Result: Up-regulated in Transcription
  misc_feature: MA Experiment 108545 PARAMETER Experiment Name: Zm_Imbibed_Seeds_P Parameter: Age (day) Value: 3 vs. 2
  misc_feature: MA Experiment 108545 PARAMETER Experiment Name: Zm_Imbibed_Seeds_P Parameter: Organism Value: Zea mays
  misc_feature: MA Experiment 108545 PARAMETER Experiment Name: Zm_Imbibed_Seeds_P Parameter: Plant Line Value: 35A19
  misc_feature: MA Experiment 108545 PARAMETER Experiment Name: Zm_Imbibed_Seeds_P Parameter: Tissue Value: Aerial vs. Embryo
  misc_feature: MA Experiment ID: 108547 Result: Up-regulated in Transcription
  misc_feature: MA Experiment 108547 PARAMETER Experiment Name: Zm_Imbibed_Seeds_P Parameter: Age (day) Value: 4 vs. 2
  misc_feature: MA Experiment 108547 PARAMETER Experiment Name: Zm_Imbibed_Seeds_P Parameter: Organism Value: Zea mays
  misc_feature: MA Experiment 108547 PARAMETER Experiment Name: Zm_Imbibed_Seeds_P Parameter: Plant Line Value: 35A19
  misc_feature: MA Experiment 108547 PARAMETER Experiment Name: Zm_Imbibed_Seeds_P Parameter: Tissue Value: Aerial vs. Embryo
  misc_feature: MA Experiment ID: 20000626 Result: Down-regulated in Transcription
  misc_feature: MA Experiment 20000626 PARAMETER Experiment Name: Zm_Herbicide-Treatments_P Parameter: Timepoint (hr) Value: 12
  misc_feature: MA Experiment 20000626 PARAMETER Experiment Name: Zm_Herbicide-Treatments_P Parameter: Tissue Value: Aerial
  misc_feature: MA Experiment 20000626 PARAMETER Experiment Name: Zm_Herbicide-Treatments_P Parameter: Treatment Value: Roundup vs. No Treatment
  misc_feature: MA Experiment ID: 20000630 Result: Down-regulated in Transcription
  misc_feature: MA Experiment 20000630 PARAMETER Experiment Name: Zm_Herbicide-Treatments_P Parameter: Timepoint (hr) Value: 4
  misc_feature: MA Experiment 20000630 PARAMETER Experiment Name: Zm_Herbicide-Treatments_P Parameter: Tissue Value: Aerial
  misc_feature: MA Experiment 20000630 PARAMETER Experiment Name: Zm_Herbicide-Treatments_P Parameter: Treatment Value: Roundup vs. No Treatment
aacactatcccctttcgccggcgccgctcccgctccatcccacccgcgctctccagtctccacggatcgatcgaagcttccgtcttccggcgcgatgttcccgtgccgccccctggctccgccgcacctgccgcgtgccccttccctcgcgcggcttccactgtcgtcgctgcggccgccgtcgtcgtcgctgcgcgtggtgcggtgcatggcgaaggagcggcgggtacggatggtggcgaagcagatccagcgggagctcgccgacatgctcacccgcgaccccgtgctgcagcgcgccgtgctccccgaagccgcgctcggcgctgaccgctacctctcgtcgctcaccaccatcgccgacgtcgagctctccaacgacctccaggtgtgcaaagtgtacgtgtccgtgtttggggacgagagggggaagaaggtggccatcgaggggctcaaggccaagaccaagtacgtcaggagccagataggcaggaggatgaagcttcgcctcacgccggagataaggttcatcgaggatgagtctatggagcgtggaagcaggatccttgctatacttgacaaactaaaggaggaaagggagcaacaagaaggaaaagatggggaggaagatgatgattcatatatatcagaagaagatgatggtgactgggatgcagatgagccagatgaggaggacatcatttacgtaaaatagcccattgtcttctaggaacttggccatcattcatccagaacacaacagtcctcttcagagtttaattcagtgaagttcactgctcgcctgcttgtcgaagcactccaaagtatatcagcacttgaagaggtctacagagacatctcttttgccaattgaagcaggacatatcacacccttgctgccatttagaagctggtcatgtccttttttatggcttttcaatgcgggggatatttcaaagaggaatttggaagagtatttttttccctgtccactggaatactggattatgatatctgaccattgacgcaagacagtttgggctgatgctcattcctctgttatgttaactagcacttgtttaatttgtacttgcctagttatcttgctgtatttcagtctccatttcttctatggttttggtacagtatttcgtctttctataagccattatgtaatagagtagcatcagtatgattttaatgataatttatcactctctcatctgatct

SEQ ID NO: 2679 - protein, 237 aa, Zea mays subsp. mays
  peptide (1)..(237): Ceres Seq. ID no. 12410594
  misc_feature (75)..(195): Pfam Name: Ribosome-binding factor A Pfam Description: Ribosome-binding factor A
  misc_feature (70)..(205): Homolog of NCBI NO: 33239584 NR Description: Ribosome-binding factor A
  misc_feature (72)..(200): Homolog of NCBI NO: 37523601 NR Description: ribosome binding facror A [Gloeobacter violaceus]
  misc_feature (70)..(213): Homolog of NCBI NO: 16331339 NR Description: hypothetical protein [Synechocystis sp. PCC 6803]
  misc_feature (70)..(202): Homolog of NCBI NO: 33866739 NR Description: possible Ribosome-binding factor A [Synechococcus
  misc_feature (70)..(203): Homolog of NCBI NO: 22299172 NR Description: ribosome binding factor A [Thermosynechococcus
  misc_feature (70)..(206): Homolog of NCBI NO: 23039367 NR Description: hypothetical protein [Trichodesmium erythraeum
  misc_feature (70)..(212): Homolog of NCBI NO: 17227559 NR Description: ribosome binding facror A [Nostoc sp. PCC 7120]
  misc_feature (70)..(217): Homolog of NCBI NO: 23127176 NR Description: hypothetical protein [Nostoc punctiforme]
  misc_feature (56)..(237): Homolog of NCBI NO: 3914555 NR Description: Putative ribosome-binding factor A, chloroplast
  misc_feature (42)..(237): Homolog of NCBI NO: 30690114 NR Description: expressed protein [Arabidopsis thaliana]
TLSPFAGAAPAPSHPRSPVSTDRSKLPSSGAMFPCRPLAPPHLPRAPSLARLPLSSLRPPSSSLRVVRCMAKERRVRMVAKQIQRELADMLTRDPVLQRAVLPEAALGADRYLSSLTTIADVELSNDLQVCKVYVSVFGDERGKKVAIEGLKAKTKYVRSQIGRRMKLRLTPEIRFIEDESMERGSRILAILDKLKEEREQQEGKDGEEDDDSYISEEDDGDWDADEPDEEDIIYVK

SEQ ID NO: 2680 - protein, 206 aa, Zea mays subsp. mays
  peptide (1)..(206): Ceres Seq. ID no. 12410595
  misc_feature (44)..(164): Pfam Name: Ribosome-binding factor A Pfam Description: Ribosome-binding factor A
  misc_feature (39)..(174): Homolog of NCBI NO: 33239584 NR Description: Ribosome-binding factor A
  misc_feature (41)..(169): Homolog of NCBI NO: 37523601 NR Description: ribosome binding facror A [Gloeobacter violaceus]
  misc_feature (39)..(182): Homolog of NCBI NO: 16331339 NR Description: hypothetical protein [Synechocystis sp. PCC 6803]
  misc_feature (39)..(171): Homolog of NCBI NO: 33866739 NR Description: possible Ribosome-binding factor A [Synechococcus
  misc_feature (39)..(172): Homolog of NCBI NO: 22299172 NR Description: ribosome binding factor A [Thermosynechococcus
  misc_feature (39)..(175): Homolog of NCBI NO: 23039367 NR Description: hypothetical protein [Trichodesmium erythraeum
  misc_feature (39)..(181): Homolog of NCBI NO: 17227559 NR Description: ribosome binding facror A [Nostoc sp. PCC 7120]
  misc_feature (39)..(186): Homolog of NCBI NO: 23127176 NR Description: hypothetical protein [Nostoc punctiforme]
  misc_feature (25)..(206): Homolog of NCBI NO: 3914555 NR Description: Putative ribosome-binding factor A, chloroplast
  misc_feature (11)..(206): Homolog of NCBI NO: 30690114 NR Description: expressed protein [Arabidopsis thaliana]
MFPCRPLAPPHLPRAPSLARLPLSSLRPPSSSLRVVRCMAKERRVRMVAKQIQRELADMLTRDPVLQRAVLPEAALGADRYLSSLTTIADVELSNDLQVCKVYVSVFGDERGKKVAIEGLKAKTKYVRSQIGRRMKLRLTPEIRFIEDESMERGSRILAILDKLKEEREQQEGKDGEEDDDSYISEEDDGDWDADEPDEEDIIYVK

SEQ ID NO: 2681 - protein, 168 aa, Zea mays subsp. mays
  peptide (1)..(168): Ceres Seq. ID no. 12410596
  misc_feature (6)..(126): Pfam Name: Ribosome-binding factor A Pfam Description: Ribosome-binding factor A
  misc_feature (1)..(136): Homolog of NCBI NO: 33239584 NR Description: Ribosome-binding factor A
  misc_feature (3)..(131): Homolog of NCBI NO: 37523601 NR Description: ribosome binding facror A [Gloeobacter violaceus]
  misc_feature (1)..(144): Homolog of NCBI NO: 16331339 NR Description: hypothetical protein [Synechocystis sp. PCC 6803]
  misc_feature (1)..(133): Homolog of NCBI NO: 33866739 NR Description: possible Ribosome-binding factor A [Synechococcus
  misc_feature (1)..(134): Homolog of NCBI NO: 22299172 NR Description: ribosome binding factor A [Thermosynechococcus
  misc_feature (1)..(137): Homolog of NCBI NO: 23039367 NR Description: hypothetical protein [Trichodesmium erythraeum
  misc_feature (1)..(143): Homolog of NCBI NO: 17227559 NR Description: ribosome binding facror A [Nostoc sp. PCC 7120]
  misc_feature (1)..(148): Homolog of NCBI NO: 23127176 NR Description: hypothetical protein [Nostoc punctiforme]
  misc_feature (1)..(168): Homolog of NCBI NO: 3914555 NR Description: Putative ribosome-binding factor A, chloroplast
  misc_feature (1)..(168): Homolog of NCBI NO: 30690114 NR Description: expressed protein [Arabidopsis thaliana]
MAKERRVRMVAKQIQRELADMLTRDPVLQRAVLPEAALGADRYLSSLTTIADVELSNDLQVCKVYVSVFGDERGKKVAIEGLKAKTKYVRSQIGRRMKLRLTPEIRFIEDESMERGSRILAILDKLKEEREQQEGKDGEEDDDSYISEEDDGDWDADEPDEEDIIYVK

SEQ ID NO: 2682 - DNA, 1670 bp, Zea mays subsp. mays
  misc_feature (1)..(1670): Ceres Seq. ID no. 12353627
  misc_feature: MA Experiment ID: 108522 Result: Up-regulated in Transcription
  misc_feature: MA Experiment 108522 PARAMETER Experiment Name: Zm_42deg_Heat_P Parameter: Age (day) Value: 8
  misc_feature: MA Experiment 108522 PARAMETER Experiment Name: Zm_42deg_Heat_P Parameter: Organism Value: Zea mays
  misc_feature: MA Experiment 108522 PARAMETER Experiment Name: Zm_42deg_Heat_P Parameter: Plant Line Value: 35A19
  misc_feature: MA Experiment 108522 PARAMETER Experiment Name: Zm_42deg_Heat_P Parameter: Temperature (deg C) Value: 42 vs. 22
  misc_feature: MA Experiment 108522 PARAMETER Experiment Name: Zm_42deg_Heat_P Parameter: Timepoint (hr) Value: 1
  misc_feature: MA Experiment 108522 PARAMETER Experiment Name: Zm_42deg_Heat_P Parameter: Tissue Value: Aerial
aaatttctgggcctctctcctccagcctgcatagccaacccttttgataaagaaacgggcctacactacacgggacacctgcctcctccccttctcccatctctccccctctccctctcgtggccacgactgccgctgccgccctacgccaggtgtccaggtcatctccggcccattcgccggcgacgagcaccccactagatcgaccgagatatggacggcctgtggcatctgggggacgagctccgcgggcagcccaaggtggtggaggaccgccagtggtcgctcatgacgtccaagctggcagagatcaccaggtccaggggcgagaggacgaacgacctcgactacgccaggatgaacgccgcccccgacgccaagcggtggggcaaggcggcgtcctaccagcaccatgacgagggcaggatggaccaccacgtcggcctcagcctcaagatgaacgatctcaagatgaacgaggccgccgctgccgccgtcatgaagctccccttccgcggcgtgccctacaacgtcaacccgatgtaccccaaggggagcaacgccaacgccaatgtcaacgcgttcaagatgaatgtcggggtgaacaagtactccagcagcgcgaacgggaaagacgccggcgggaaaagcagtggcggtggcagcaacaacaacagcggcggcggaggcaacggcaatgggaccgccaacggcagttccgcggtcgacaagcgcttcaagacgttgccgacgagcgagatgctgccaaagaacgaagtccttggtgggtacatctttgtctgcaacaacgataccatgcaggaggacctcaagaggcagctttttggattgccagcaagatatcgtgattcagtccgggcaattactcctggcctgcctcttttcctctataactacaccactcaccagcttcatggggtatttgaggctgccagtttcggtgggtctaatatcgatcccactgcatggggaggataagaagtgtaaaggtgaatctagattcccagcgcaggtgaggatccgcgttaggaagctctgcaagccgttggaagaggattccttcaggccagttttgcaccactatgatggcccaaagtttcgccttgagctctccatcgcggagaccctgtccctgctagacctatgcgagaaggaaggcatctgagctgttggctgcctcgtgaggttctagtaaatatcaatcatccttgtatgttctgtggatggtggttggcaatgttgtttatttttcaagcgcaagctgctgccggtctcgttttccctgtcctggatggaagcaaagggacctggtactttgaaggccccccctcaaacataagctgtgagcctgtcagtgcacgtgtccgccgttgtcgtcaagaaccaaaccaaatcatgaaatcttgcgccgacggagagttggagcgtgtatgttttgctatctctatctacatgtctcagtagagtggatataccctggggtccccaaaagatgggggcctgtatgtaacactacgtgtaatggttaaggtgaatgtgccgtgaggccccccaaaagttggagtgtgtattttttgttgtcaccttgaaccgactttgcgtatgctttttttagtgctgctaccttttgcgctgtgtttggcttctgg

SEQ ID NO: 2683 - protein, 261 aa, Zea mays subsp. mays
  peptide (1)..(261): Ceres Seq. ID no. 12353628
  misc_feature (1)..(152): Homolog of NCBI NO: 15232081 NR Description: gda-1, putative
  misc_feature (1)..(155): Homolog of NCBI NO: 2369766 NR Description: hypothetical protein [Citrus x paradisi]
  misc_feature (125)..(259): Homolog of NCBI NO: 9757950 NR Description: gene_id:MJC20.15~similar to unknown
  misc_feature (71)..(259): Homolog of NCBI NO: 34913876 NR Description: B1156H12.22 [Oryza sativa (japonica
  misc_feature (32)..(259): Homolog of NCBI NO: 18422167 NR Description: putative protein
  misc_feature (119)..(259): Homolog of NCBI NO: 584825 NR Description: B2 PROTEIN
  misc_feature (116)..(259): Homolog of NCBI NO: 21665866 NR Description: GDA2 protein [Pisum sativum]
  misc_feature (79)..(259): Homolog of NCBI NO: 21592623 NR Description: gda-1, putative [Arabidopsis thaliana]
  misc_feature (79)..(259): Homolog of NCBI NO: 15232081 NR Description: gda-1, putative
  misc_feature (79)..(259): Homolog of NCBI NO: 2369766 NR Description: hypothetical protein [Citrus x paradisi]
MDGLWHLGDELRGQPKVVEDRQWSLMTSKLAEITRSRGERTNDLDYARMNAAPDAKRWGKAASYQHHDEGRMDHHVGLSLKMNDLKMNEAAAAAVMKLPFRGVPYNVNPMYPKGSNANANVNAFKMNVGVNKYSSSANGKDAGGKSSGGGSNNNSGGGGNGNGTANGSSAVDKRFKTLPTSEMLPKNEVLGGYIFVCNNDTMQEDLKRQLFGLPARYRDSVRAITPGLPLFLYNYTTHQLHGVFEAASFGGSNIDPTAWGG

SEQ ID NO: 2684 - protein, 236 aa, Zea mays subsp. mays
  peptide (1)..(236): Ceres Seq. ID no. 12353629
  misc_feature (1)..(127): Homolog of NCBI NO: 15232081 NR Description: gda-1, putative
  misc_feature (1)..(130): Homolog of NCBI NO: 2369766 NR Description: hypothetical protein [Citrus x paradisi]
  misc_feature (100)..(234): Homolog of NCBI NO: 9757950 NR Description: gene_id:MJC20.15~similar to unknown
  misc_feature (46)..(234): Homolog of NCBI NO: 34913876 NR Description: B1156H12.22 [Oryza sativa (japonica
  misc_feature (7)..(234): Homolog of NCBI NO: 18422167 NR Description: putative protein
  misc_feature (94)..(234): Homolog of NCBI NO: 584825 NR Description: B2 PROTEIN
  misc_feature (91)..(234): Homolog of NCBI NO: 21665866 NR Description: GDA2 protein [Pisum sativum]
  misc_feature (54)..(234): Homolog of NCBI NO: 21592623 NR Description: gda-1, putative [Arabidopsis thaliana]
  misc_feature (54)..(234): Homolog of NCBI NO: 15232081 NR Description: gda-1, putative
  misc_feature (54)..(234): Homolog of NCBI NO: 2369766 NR Description: hypothetical protein [Citrus x paradisi]
MTSKLAEITRSRGERTNDLDYARMNAAPDAKRWGKAASYQHHDEGRMDHHVGLSLKMNDLKMNEAAAAAVMKLPFRGVPYNVNPMYPKGSNANANVNAFKMNVGVNKYSSSANGKDAGGKSSGGGSNNNSGGGGNGNGTANGSSAVDKRFKTLPTSEMLPKNEVLGGYIFVCNNDTMQEDLKRQLFGLPARYRDSVRAITPGLPLFLYNYTTHQLHGVFEAASFGGSNIDPTAWGG

SEQ ID NO: 2685 - protein, 213 aa, Zea mays subsp. mays
  peptide (1)..(213): Ceres Seq. ID no. 12353630
  misc_feature (1)..(104): Homolog of NCBI NO: 15232081 NR Description: gda-1, putative
  misc_feature (1)..(107): Homolog of NCBI NO: 2369766 NR Description: hypothetical protein [Citrus x paradisi]
  misc_feature (77)..(211): Homolog of NCBI NO: 9757950 NR Description: gene_id:MJC20.15~similar to unknown
  misc_feature (23)..(211): Homolog of NCBI NO: 34913876 NR Description: B1156H12.22 [Oryza sativa (japonica
  misc_feature (1)..(211): Homolog of NCBI NO: 18422167 NR Description: putative protein
  misc_feature (71)..(211): Homolog of NCBI NO: 584825 NR Description: B2 PROTEIN
  misc_feature (68)..(211): Homolog of NCBI NO: 21665866 NR Description: GDA2 protein [Pisum sativum]
  misc_feature (31)..(211): Homolog of NCBI NO: 21592623 NR Description: gda-1, putative [Arabidopsis thaliana]
  misc_feature (31)..(211): Homolog of NCBI NO: 15232081 NR Description: gda-1, putative
  misc_feature (31)..(211): Homolog of NCBI NO: 2369766 NR Description: hypothetical protein [Citrus x paradisi]
MNAAPDAKRWGKAASYQHHDEGRMDHHVGLSLKMNDLKMNEAAAAAVMKLPFRGVPYNVNPMYPKGSNANANVNAFKMNVGVNKYSSSANGKDAGGKSSGGGSNNNSGGGGNGNGTANGSSAVDKRFKTLPTSEMLPKNEVLGGYIFVCNNDTMQEDLKRQLFGLPARYRDSVRAITPGLPLFLYNYTTHQLHGVFEAASFGGSNIDPTAWGG

SEQ ID NO: 2686 - DNA, 862 bp, Zea mays subsp. mays
  misc_feature (1)..(862): Ceres Seq. ID no. 13499085
  misc_feature: MA Experiment ID: 108543 Result: Up-regulated in Transcription
  misc_feature: MA Experiment ID: 108544 Result: Up-regulated in Transcription
aagcaagcgaagcatcgccagattggtatatcgatcgattgatcggtggcggaggaaggggaggacggggggcagatggcggcgtgccggggcttcttcgagtgcctgctcaggctgctcaacttcatcctcaccgtcgccggcctcgctatggttggttacgggatctacctgctcgtcgagtggatgaagatatccgaggacggcatcggcggggcttcgacggcggaggtgctcgtctctggccggccgttgttgggggctgtcattctcggtgacagcttcctcgacaatctacccaaagcatggtttatttatttgtttattggtgttggcaccatcgtcatcttggtgtctctgtttggctgcattggagcagggacaagaaacacctgctgtttgtgtttctatgctttcttggtcatattgttgatccttgctgaagctgcagctgctgcattcattttctttgaccatggctggaaagatgtaattccagtggacaaaacacataactttgatgttatgtatgactttctgaaggaaaactgggagattgcaagatgggtcgctctgggcgttgttgtttttgaggcagtgctcttgctgttagctctggctgtcagggcaatgaacaaacctgctgagtatgacagtgatgacgaaattatagcaattggccgaagccctaccatccggcagccactgatccatacccaaaatgttcctgccactggtgttcctgtcccaacacttgatcaacgtgcaagtagaaatgatgcctggagccaaaggatgcgagagaagtatggtctggacacgagccagttcacatacaacccttcagacccaagcaggtacc

SEQ ID NO: 2687 - protein, 262 aa, Zea mays subsp. mays
  peptide (1)..(262): Ceres Seq. ID no. 13499086
  misc_feature (9)..(173): Pfam Name: Tetraspanin family Pfam Description: Tetraspanin family
  misc_feature (3)..(261): Homolog of NCBI NO: 18398417 NR Description: senescence-associated protein family [Arabidopsis
MAACRGFFECLLRLLNFILTVAGLAMVGYGIYLLVEWMKISEDGIGGASTAEVLVSGRPLLGAVILGDSFLDNLPKAWFIYLFIGVGTIVILVSLFGCIGAGTRNTCCLCFYAFLVILLILAEAAAAAFIFFDHGWKDVIPVDKTHNFDVMYDFLKENWEIARWVALGVVVFEAVLLLLALAVRAMNKPAEYDSDDEIIAIGRSPTIRQPLIHTQNVPATGVPVPTLDQRASRNDAWSQRMREKYGLDTSQFTYNPSDPSRY

SEQ ID NO: 2688 - protein, 237 aa, Zea mays subsp. mays
  peptide (1)..(237): Ceres Seq. ID no. 13499087
  misc_feature (1)..(148): Pfam Name: Tetraspanin family Pfam Description: Tetraspanin family
  misc_feature (1)..(236): Homolog of NCBI NO: 18398417 NR Description: senescence-associated protein family [Arabidopsis
MVGYGIYLLVEWMKISEDGIGGASTAEVLVSGRPLLGAVILGDSFLDNLPKAWFIYLFIGVGTIVILVSLFGCIGAGTRNTCCLCFYAFLVILLILAEAAAAAFIFFDHGWKDVIPVDKTHNFDVMYDFLKENWEIARWVALGVVVFEAVLLLLALAVRAMNKPAEYDSDDEIIAIGRSPTIRQPLIHTQNVPATGVPVPTLDQRASRNDAWSQRMREKYGLDTSQFTYNPSDPSRY

SEQ ID NO: 2689 - protein, 225 aa, Zea mays subsp. mays
  peptide (1)..(225): Ceres Seq. ID no. 13499088
  misc_feature (1)..(136): Pfam Name: Tetraspanin family Pfam Description: Tetraspanin family
  misc_feature (1)..(224): Homolog of NCBI NO: 18398417 NR Description: senescence-associated protein family [Arabidopsis
MKISEDGIGGASTAEVLVSGRPLLGAVILGDSFLDNLPKAWFIYLFIGVGTIVILVSLFGCIGAGTRNTCCLCFYAFLVILLILAEAAAAAFIFFDHGWKDVIPVDKTHNFDVMYDFLKENWEIARWVALGVVVFEAVLLLLALAVRAMNKPAEYDSDDEIIAIGRSPTIRQPLIHTQNVPATGVPVPTLDQRASRNDAWSQRMREKYGLDTSQFTYNPSDPSRY

SEQ ID NO: 2690 - DNA, 1421 bp, Zea mays subsp. mays
  misc_feature (1)..(1421): Ceres Seq. ID no. 12410589
  misc_feature: MA Experiment ID: 108529 Result: Up-regulated in Transcription
  misc_feature: MA Experiment 108529 PARAMETER Experiment Name: Zm_Imbibed_Seeds_P Parameter: Age (day) Value: 5 vs. 2
  misc_feature: MA Experiment 108529 PARAMETER Experiment Name: Zm_Imbibed_Seeds_P Parameter: Organism Value: Zea mays
  misc_feature: MA Experiment 108529 PARAMETER Experiment Name: Zm_Imbibed_Seeds_P Parameter: Plant Line Value: 35A19
  misc_feature: MA Experiment 108529 PARAMETER Experiment Name: Zm_Imbibed_Seeds_P Parameter: Tissue Value: Roots vs. Embryo
  misc_feature: MA Experiment ID: 108535 Result: Down-regulated in Transcription
  misc_feature: MA Experiment 108535 PARAMETER Experiment Name: Zm_Meristem_P Parameter: Age (day) Value: 8
  misc_feature: MA Experiment 108535 PARAMETER Experiment Name: Zm_Meristem_P Parameter: Organism Value: Zea mays
  misc_feature: MA Experiment 108535 PARAMETER Experiment Name: Zm_Meristem_P Parameter: Plant Line Value: 35A19
  misc_feature: MA Experiment 108535 PARAMETER Experiment Name: Zm_Meristem_P Parameter: Tissue Value: Root Meristem vs. Above Root Meristem
  misc_feature: MA Experiment ID: 108543 Result: Down-regulated in Transcription
  misc_feature: MA Experiment ID: 108544 Result: Up-regulated in Transcription
  misc_feature: MA Experiment ID: 108546 Result: Up-regulated in Transcription
  misc_feature: MA Experiment 108546 PARAMETER Experiment Name: Zm_Imbibed_Seeds_P Parameter: Age (day) Value: 3 vs. 2
  misc_feature: MA Experiment 108546 PARAMETER Experiment Name: Zm_Imbibed_Seeds_P Parameter: Organism Value: Zea mays
  misc_feature: MA Experiment 108546 PARAMETER Experiment Name: Zm_Imbibed_Seeds_P Parameter: Plant Line Value: 35A19
  misc_feature: MA Experiment 108546 PARAMETER Experiment Name: Zm_Imbibed_Seeds_P Parameter: Tissue Value: Roots vs. Embryo
  misc_feature: MA Experiment ID: 20000108 Result: Down-regulated in Transcription
  misc_feature: MA Experiment 20000108 PARAMETER Experiment Name: Zm_Root-Tips_P Parameter: Age (day) Value: 12
  misc_feature: MA Experiment 20000108 PARAMETER Experiment Name: Zm_Root-Tips_P Parameter: Organism Value: Zea mays
  misc_feature: MA Experiment 20000108 PARAMETER Experiment Name: Zm_Root-Tips_P Parameter: Tissue Value: Root tips vs. Root mid region    35
  misc_feature: MA Experiment 20000108 PARAMETER Experiment Name: Zm_Root-Tips_P Parameter: Tissue Value: Root tips vs. Root mid region   Sequence Listing-Misc Features (4)
  misc_feature: MA Experiment ID: 20000492 Result: Down-regulated in Transcription
  misc_feature: MA Experiment 20000492 PARAMETER Experiment Name: Zm_Hybrid_Seed_Dev_P Parameter: DAP Value: 12
  misc_feature: MA Experiment 20000492 PARAMETER Experiment Name: Zm_Hybrid_Seed_Dev_P Parameter: Organism Value: Zea mays
  misc_feature: MA Experiment 20000492 PARAMETER Experiment Name: Zm_Hybrid_Seed_Dev_P Parameter: Plant Line Value: 35A19
  misc_feature: MA Experiment 20000492 PARAMETER Experiment Name: Zm_Hybrid_Seed_Dev_P Parameter: Tissue Value: Fert Kernel vs. Unfert Floret
aatatcatgcgcaggggctgaaagcctgaaactgctcaagacgccaccgtcttcctccgcgatcttcagttctctgtctctccctctctctttcctctagctcccaaccaagccaagagtacgtcgtcaagcgcgccgcgcgtgtgtgtgtcagtaggctacagggctcggaggaacgccgtcatgagcttgatcagcatgatggaggcgcggctgccgccgggggttccggttccacccgagggacgacgagctcgtgctcgactacctctgccgcaagctctccggcaaaggcggcggcggagcgtacggcggcatcgccatggtcgacgtcgacctcaacaagtgcgagccgtgggatcttccagacgaggcgtgcgtgggcggccgcgagtggtacttcttcagcctgcacgaccgcaagtacgccacggggcagcggaccaaccgcgccacgcgcaccgggtactggaaggccacgggcaaggaccgccccatctccgtctccggccgccgcggggccggcgacaccgccgcgctggtcgggatgcgcaagacgctggtgttctaccagggcagggcgccccgcgggagcaagaccgagtgggtcatgcacgagttccgcgtggacggcccgcccgttgccgaccgccccggctcacctctcctccagctccagctccaggaggattgggtcctgtgcagggtgttctacaagagccgaactgccagcacaagaccagcagcaggccccgacgaggccgggccgctgtccagccagctgatcggcggcctgccgatgccgcgaatggccgcccctgctgacgccgcctacctgtccttcgacgtcacacctgccgctggcggctactaccaccaccaagactccggccccgcggacgcgcgccaccacctgccgccgccgccggcgcagcctttcagcaggagtagcctgtccagcttgcgggacttgctcagcagcatggcctgaaggcagcgacgccgccgccgccgttcgggagacggagctccacctgcagctggagggctggaccgaggcggcctacgcgcagcagcagggcggcgccatgccggcgcacccgcagcagacgtggagcccgtttctgagctcgggatgacggcacgcggctgggggctcacgtgtgcgtggcgccctggcgcctggcgggcatcgcgtgcgtagtgaatagtcaacaatttgcttgtctttcttgcaatgtaacgttgacttggttagtgcatgcgatctctgccgtttgttaggcgtagggtaaaaacccacgcagcggataggtggaatgccttggtgattattggtgcagtaacttttgtacagttgattgttgcagaaaattactctctctttgtctgccttctaaaaaaaaaaaagaaannaaaaa

SEQ ID NO: 2691 - protein, 222 aa, Zea mays subsp. mays
  peptide (1)..(222): Ceres Seq. ID no. 12410590
  misc_feature (1)..(103): Pfam Name: No apical meristem (NAM) protein Pfam Description: No apical meristem (NAM) protein
  misc_feature (1)..(182): Homolog of NCBI NO: 27529808 NR Description: OsNAC1 protein [Oryza sativa]
  misc_feature (1)..(149): Homolog of NCBI NO: 15229637 NR Description: organ separation protein, putative; protein id:
  misc_feature (1)..(132): Homolog of NCBI NO: 28411877 NR Description: putative NAM [Oryza sativa (japonica
  misc_feature (1)..(133): Homolog of NCBI NO: 15222818 NR Description: NAC1
  misc_feature (1)..(133): Homolog of NCBI NO: 15795128 NR Description: NAM (no apical meristem) protein-like
  misc_feature (16)..(221): Homolog of NCBI NO: 5852096 NR Description: zwh19.1 [Oryza sativa (indica cultivar-group)]
  misc_feature (16)..(221): Homolog of NCBI NO: 5679845 NR Description: l1332.9 [Oryza sativa (indica cultivar-group)]
  misc_feature (16)..(222): Homolog of NCBI NO: 38344327 NR Description: OSJNBa0058K23.9 [Oryza sativa (japonica
  misc_feature (1)..(143): Homolog of NCBI NO: 15148912 NR Description: NAC domain protein NAC1 [Phaseolus vulgaris]
  misc_feature (1)..(178): Homolog of NCBI NO: 38636961 NR Description: putative NAC domain protein NAC1
MVDVDLNKCEPWDLPDEACVGGREWYFFSLHDRKYATGQRTNRATRTGYWKATGKDRPISVSGRRGAGDTAALVGMRKTLVFYQGRAPRGSKTEWVMHEFRVDGPPVADRPGSPLLQLQLQEDWVLCRVFYKSRTASTRPAAGPDEAGPLSSQLIGGLPMPRMAAPADAAYLSFDVTPAAGGYYHHQDSGPADARHHLPPPPAQPFSRSSLSSLRDLLSSMA

SEQ ID NO: 2692 - protein, 213 aa, Zea mays subsp. mays
  peptide (1)..(213): Ceres Seq. ID no. 12410591
MSLISMMEARLPPGVPVPPEGRRARARLPLPQALRQRRRRSVRRHRHGRRRPQQVRAVGSSRRGVRGRPRVVLLQPARPQVRHGAADQPRHAHRVLEGHGQGPPHLRLRPPRGRRHRRAGRDAQDAGVLPGQGAPREQDRVGHARVPRGRPARCRPPRLTSPPAPAPGGLGPVQGVLQEPNCQHKTSSRPRRGRAAVQPADRRPADAANGRPC

SEQ ID NO: 2693 - protein, 208 aa, Zea mays subsp. mays
  peptide (1)..(208): Ceres Seq. ID no. 12410592
MMEARLPPGVPVPPEGRRARARLPLPQALRQRRRRSVRRHRHGRRRPQQVRAVGSSRRGVRGRPRVVLLQPARPQVRHGAADQPRHAHRVLEGHGQGPPHLRLRPPRGRRHRRAGRDAQDAGVLPGQGAPREQDRVGHARVPRGRPARCRPPRLTSPPAPAPGGLGPVQGVLQEPNCQHKTSSRPRRGRAAVQPADRRPADAANGRPC

SEQ ID NO: 2694 - DNA, 1291 bp, Zea mays subsp. mays
  misc_feature (1)..(1291): Ceres Seq. ID no. 12365243
  misc_feature: MA Experiment ID: 108527 Result: Down-regulated in Transcription
  misc_feature: MA Experiment 108527 PARAMETER Experiment Name: Zm_5mM_NO_P Parameter: Age (day) Value: 8
  misc_feature: MA Experiment 108527 PARAMETER Experiment Name: Zm_5mM_NO_P Parameter: Organism Value: Zea mays
  misc_feature: MA Experiment 108527 PARAMETER Experiment Name: Zm_5mM_NO_P Parameter: Plant Line Value: 35A19
  misc_feature: MA Experiment 108527 PARAMETER Experiment Name: Zm_5mM_NO_P Parameter: Timepoint (hr) Value: 6
  misc_feature: MA Experiment 108527 PARAMETER Experiment Name: Zm_5mM_NO_P Parameter: Tissue Value: Aerial
  misc_feature: MA Experiment 108527 PARAMETER Experiment Name: Zm_5mM_NO_P Parameter: Treatment Value: 5mM NO vs. No Treatment
  misc_feature: MA Experiment ID: 108529 Result: Up-regulated in Transcription
  misc_feature: MA Experiment 108529 PARAMETER Experiment Name: Zm_Imbibed_Seeds_P Parameter: Age (day) Value: 5 vs. 2
  misc_feature: MA Experiment 108529 PARAMETER Experiment Name: Zm_Imbibed_Seeds_P Parameter: Organism Value: Zea mays
  misc_feature: MA Experiment 108529 PARAMETER Experiment Name: Zm_Imbibed_Seeds_P Parameter: Plant Line Value: 35A19
  misc_feature: MA Experiment 108529 PARAMETER Experiment Name: Zm_Imbibed_Seeds_P Parameter: Tissue Value: Roots vs. Embryo
  misc_feature: MA Experiment ID: 108535 Result: Down-regulated in Transcription
  misc_feature: MA Experiment 108535 PARAMETER Experiment Name: Zm_Meristem_P Parameter: Age (day) Value: 8
  misc_feature: MA Experiment 108535 PARAMETER Experiment Name: Zm_Meristem_P Parameter: Organism Value: Zea mays
  misc_feature: MA Experiment 108535 PARAMETER Experiment Name: Zm_Meristem_P Parameter: Plant Line Value: 35A19
  misc_feature: MA Experiment 108535 PARAMETER Experiment Name: Zm_Meristem_P Parameter: Tissue Value: Root Meristem vs. Above Root Meristem
  misc_feature: MA Experiment ID: 108543 Result: Up-regulated in Transcription
  misc_feature: MA Experiment ID: 108546 Result: Up-regulated in Transcription
  misc_feature: MA Experiment 108546 PARAMETER Experiment Name: Zm_Imbibed_Seeds_P Parameter: Age (day) Value: 3 vs. 2
  misc_feature: MA Experiment 108546 PARAMETER Experiment Name: Zm_Imbibed_Seeds_P Parameter: Organism Value: Zea mays
  misc_feature: MA Experiment 108546 PARAMETER Experiment Name: Zm_Imbibed_Seeds_P Parameter: Plant Line Value: 35A19
  misc_feature: MA Experiment 108546 PARAMETER Experiment Name: Zm_Imbibed_Seeds_P Parameter: Tissue Value: Roots vs. Embryo
  misc_feature: MA Experiment ID: 108559 Result: Down-regulated in Transcription
  misc_feature: MA Experiment 108559 PARAMETER Experiment Name: Zm_5mM_NO_P Parameter: Age (day) Value: 8
  misc_feature: MA Experiment 108559 PARAMETER Experiment Name: Zm_5mM_NO_P Parameter: Organism Value: Zea mays
  misc_feature: MA Experiment 108559 PARAMETER Experiment Name: Zm_5mM_NO_P Parameter: Plant Line Value: 35A19
  misc_feature: MA Experiment 108559 PARAMETER Experiment Name: Zm_5mM_NO_P Parameter: Timepoint (hr) Value: 12
  misc_feature: MA Experiment 108559 PARAMETER Experiment Name: Zm_5mM_NO_P Parameter: Tissue Value: Aerial
  misc_feature: MA Experiment 108559 PARAMETER Experiment Name: Zm_5mM_NO_P Parameter: Treatment Value: 5mM NO vs. No Treatment
  misc_feature: MA Experiment ID: 20000108 Result: Down-regulated in Transcription
  misc_feature: MA Experiment 20000108 PARAMETER Experiment Name: Zm_Root-Tips_P Parameter: Age (day) Value: 12
  misc_feature: MA Experiment 20000108 PARAMETER Experiment Name: Zm_Root-Tips_P Parameter: Organism Value: Zea mays
  misc_feature: MA Experiment 20000108 PARAMETER Experiment Name: Zm_Root-Tips_P Parameter: Tissue Value: Root tips vs. Root mid region    35
  misc_feature: MA Experiment 20000108 PARAMETER Experiment Name: Zm_Root-Tips_P Parameter: Tissue Value: Root tips vs. Root mid region   Sequence Listing-Misc Features (4)
  misc_feature: MA Experiment ID: 20000478 Result: Down-regulated in Transcription
  misc_feature: MA Experiment 20000478 PARAMETER Experiment Name: Zm_5mM_SA_P Parameter: Age (day) Value: 11
  misc_feature: MA Experiment 20000478 PARAMETER Experiment Name: Zm_5mM_SA_P Parameter: Organism Value: Zea mays
  misc_feature: MA Experiment 20000478 PARAMETER Experiment Name: Zm_5mM_SA_P Parameter: Plant Line Value: 35A19
  misc_feature: MA Experiment 20000478 PARAMETER Experiment Name: Zm_5mM_SA_P Parameter: Timepoint (hr) Value: 72
  misc_feature: MA Experiment 20000478 PARAMETER Experiment Name: Zm_5mM_SA_P Parameter: Tissue Value: Aerial
  misc_feature: MA Experiment 20000478 PARAMETER Experiment Name: Zm_5mM_SA_P Parameter: Treatment Value: 5mM SA vs. No Treatment
  misc_feature: MA Experiment ID: 20000535 Result: Down-regulated in Transcription
  misc_feature: MA Experiment 20000535 PARAMETER Experiment Name: Zm_Hybrid_Seed_Dev_P Parameter: DAP Value: 30 vs. 12
  misc_feature: MA Experiment 20000535 PARAMETER Experiment Name: Zm_Hybrid_Seed_Dev_P Parameter: Organism Value: Zea mays
  misc_feature: MA Experiment 20000535 PARAMETER Experiment Name: Zm_Hybrid_Seed_Dev_P Parameter: Plant Line Value: 35A19
  misc_feature: MA Experiment 20000535 PARAMETER Experiment Name: Zm_Hybrid_Seed_Dev_P Parameter: Tissue Value: Embryo vs. Unfert Floret
  misc_feature: MA Experiment ID: 20001608 Result: Down-regulated in Transcription
  misc_feature: MA Experiment 20001608 PARAMETER Experiment Name: Zm_50ppm_KNO3_L-to-H_P Parameter: Age (day) Value: 21
  misc_feature: MA Experiment 20001608 PARAMETER Experiment Name: Zm_50ppm_KNO3_L-to-H_P Parameter: Organism Value: Zea mays
  misc_feature: MA Experiment 20001608 PARAMETER Experiment Name: Zm_50ppm_KNO3_L-to-H_P Parameter: Plant Line Value: 35A19
  misc_feature: MA Experiment 20001608 PARAMETER Experiment Name: Zm_50ppm_KNO3_L-to-H_P Parameter: Timepoint (hr) Value: 48
  misc_feature: MA Experiment 20001608 PARAMETER Experiment Name: Zm_50ppm_KNO3_L-to-H_P Parameter: Tissue Value: Shoots
  misc_feature: MA Experiment 20001608 PARAMETER Experiment Name: Zm_50ppm_KNO3_L-to-H_P Parameter: Treatment Value: 50ppm KNO3 vs. 50ppm KCl
actgtccagccagccatccaggcccaggagcgcgagttctgtgcctgtgcctctgctccacctcccctgcccctgcgccccaagtccacgtccaccacttagcactcacgctgctcgctcgctcgctcgtacacgcgcccgcttcgcgcagggaaggaaccgtgggagggaagcggacggacatgatgcacgccaagtcggagtcggacgtgacgagcctggcggcgtcgtcgccgcctcggtcgccgaagcggggcggcggcgccgccggcaacggcggctactacgtgcagagcccgtcgcgggagtcgccacgacggcggctacaagtcctcgtcgatgcagccccacgccggtctacaacagccccaacgagtcgccgtcgcacccctcctacggccgccactcccgctcctcctccgtcagccgcttctccggcaacctccgcaagggcgccgccggggaccgcaaggtgctcaacgacaaggggtggcccgagtgcaacgtcatcgaggaggagggcccgtacgaggacctcgccggcgatagcggcctctcccgccgctgccagatcatactcggcttcctcaccttcgtcctcctcttcaccgtcttctgcctcatcatctggggcgccgcccggccgtacgagcccgaggtcatcgtcaagagcttggtgatggacgacttctacgcgggtgaaggcacggaccacagcggcgttccaacaaaattggtcacaacaaactgctctctgcacatagctgtctacaaccctgccacaatgtttggaattcatgtcacttctggccccatccacctgatgtattcagagatcccaatagcagtcggtcaggttcggaggtattaccagccgaggaagagccaccggatggtgacggcggtcatccacggcgagaaggtgccgctgtacggcgccgggggcagcctgatgctgtcgacaagcacgggcggggcggtgcccctgacgctggacttggacctgacctcgcggggctacgtgatcggcaagctcgtgcgggtgacgcacaaggtgcacgtgacgtgccccgtcgtcgtggacgccaagaagaccaagcccgtcaggttctccaagaaggcctgcgccgtgtacagggcctgaacttcaaatgcgttttcgtaggctgcgatccgacggcgcattagcaacgcgcgtaggatgccgtgcctgtatttagttatcgtattggtggtgaagaacaataagctgcacacacatatggtctgtttgagccttttggttctgccg

SEQ ID NO: 2695 - protein, 380 aa, Zea mays subsp. mays
  peptide (1)..(380): Ceres Seq. ID no. 12365244
  misc_feature (117)..(375): Homolog of NCBI NO: 9294055 NR Description: gene_id:MOB24.18~unknown protein [Arabidopsis
  misc_feature (127)..(375): Homolog of NCBI NO: 15230135 NR Description: hypothetical protein; protein id: At3g24600.1
  misc_feature (117)..(318): Homolog of NCBI NO: 28416677 NR Description: At5g42860 [Arabidopsis thaliana]
  misc_feature (117)..(318): Homolog of NCBI NO: 15239097 NR Description: putative protein; protein id: At5g42860.1
  misc_feature (117)..(378): Homolog of NCBI NO: 5777621 NR Description: CAA30379.1 protein [Oryza sativa]
  misc_feature (117)..(378): Homolog of NCBI NO: 38345517 NR Description: OSJNBa0039K24.20 [Oryza sativa (japonica
  misc_feature (117)..(318): Homolog of NCBI NO: 18401556 NR Description: expressed protein
  misc_feature (121)..(376): Homolog of NCBI NO: 34904260 NR Description: P0452F10.18 [Oryza sativa (japonica
  misc_feature (280)..(379): Homolog of NCBI NO: 34898370 NR Description: ESTD24835(R2634) corresponds to a region of the gene.~Similar to Arabidopsis thaliana chromosome II BAC T06D20
  misc_feature (117)..(223): Homolog of NCBI NO: 34898370 NR Description: ESTD24835(R2634) corresponds to a region of the gene.~Similar to Arabidopsis thaliana chromosome II BAC T06D20
LSSQPSRPRSASSVPVPLLHLPCPCAPSPRPPLSTHAARSLARTRARFAQGRNRGREADGHDARQVGVGRDEPGGVVAASVAEAGRRRRRQRRLLRAEPVAGVATTAATSPRRCSPTPVYNSPNESPSHPSYGRHSRSSSVSRFSGNLRKGAAGDRKVLNDKGWPECNVIEEEGPYEDLAGDSGLSRRCQIILGFLTFVLLFTVFCLIIWGAARPYEPEVIVKSLVMDDFYAGEGTDHSGVPTKLVTTNCSLHIAVYNPATMFGIHVTSGPIHLMYSEIPIAVGQVRRYYQPRKSHRMVTAVIHGEKVPLYGAGGSLMLSTSTGGAVPLTLDLDLTSRGYVIGKLVRVTHKVHVTCPVVVDAKKTKPVRFSKKACAVYRA

SEQ ID NO: 2696 - protein, 225 aa, Zea mays subsp. mays
  peptide (1)..(225): Ceres Seq. ID no. 12365245
  misc_feature (19)..(225): Homolog of NCBI NO: 13592175 NR Description: ppg3 [Leishmania major]
  misc_feature (64)..(225): Homolog of NCBI NO: 11359723 NR Description: proteophosphoglycan, membrane-associated
  misc_feature (19)..(224): Homolog of NCBI NO: 11359723 NR Description: proteophosphoglycan, membrane-associated
  misc_feature (62)..(103): Homolog of NCBI NO: 28416677 NR Description: At5g42860 [Arabidopsis thaliana]
  misc_feature (62)..(103): Homolog of NCBI NO: 15239097 NR Description: putative protein; protein id: At5g42860.1
  misc_feature (62)..(103): Homolog of NCBI NO: 18401556 NR Description: expressed protein
  misc_feature (23)..(174): Homolog of NCBI NO: 34898370 NR Description: ESTD24835(R2634) corresponds to a region of the gene.~Similar to Arabidopsis thaliana chromosome II BAC T06D20
  misc_feature (66)..(225): Homolog of NCBI NO: 13592175 NR Description: ppg3 [Leishmania major]
  misc_feature (66)..(224): Homolog of NCBI NO: 5420387 NR Description: proteophosphoglycan [Leishmania major]
  misc_feature (18)..(225): Homolog of NCBI NO: 13592175 NR Description: ppg3 [Leishmania major]
CPASHPGPGARVLCLCLCSTSPAPAPQVHVHHLALTLLARSLVHAPASRREGTVGGKRTDMMHAKSESDVTSLAASSPPRSPKRGGGAAGNGGYYVQSPSRESPRRRLQVLVDAAPRRSTTAPTSRRRTPPTAATPAPPPSAASPATSARAPPGTARCSTTRGGPSATSSRRRARTRTSPAIAASPAAARSYSASSPSSSSSPSSASSSGAPPGRTSPRSSSRAW

SEQ ID NO: 2697 - DNA, 1431 bp, Zea mays subsp. mays
  misc_feature (1)..(1431): Ceres Seq. ID no. 12414588
  misc_feature: MA Experiment ID: 108535 Result: Down-regulated in Transcription
  misc_feature: MA Experiment 108535 PARAMETER Experiment Name: Zm_Meristem_P Parameter: Age (day) Value: 8
  misc_feature: MA Experiment 108535 PARAMETER Experiment Name: Zm_Meristem_P Parameter: Organism Value: Zea mays
  misc_feature: MA Experiment 108535 PARAMETER Experiment Name: Zm_Meristem_P Parameter: Plant Line Value: 35A19
  misc_feature: MA Experiment 108535 PARAMETER Experiment Name: Zm_Meristem_P Parameter: Tissue Value: Root Meristem vs. Above Root Meristem
  misc_feature: MA Experiment ID: 108543 Result: Up-regulated in Transcription
  misc_feature: MA Experiment ID: 108689 Result: Down-regulated in Transcription
  misc_feature: MA Experiment 108689 PARAMETER Experiment Name: Zm_Drought_Roots_P Parameter: Age (day) Value: 9
  misc_feature: MA Experiment 108689 PARAMETER Experiment Name: Zm_Drought_Roots_P Parameter: Organism Value: Zea mays
  misc_feature: MA Experiment 108689 PARAMETER Experiment Name: Zm_Drought_Roots_P Parameter: Plant Line Value: 35A19
  misc_feature: MA Experiment 108689 PARAMETER Experiment Name: Zm_Drought_Roots_P Parameter: Timepoint (hr) Value: 24
  misc_feature: MA Experiment 108689 PARAMETER Experiment Name: Zm_Drought_Roots_P Parameter: Tissue Value: Roots
  misc_feature: MA Experiment 108689 PARAMETER Experiment Name: Zm_Drought_Roots_P Parameter: Treatment Value: Drought vs. No Drought
agcgagaggatgacaccacgaggcaaataaacccagacgtagttcagctagccgcttctacctccctctcccccccccgcctgcgcgctgccgcgagagctcgttcctgatggggaactgcgccggcgtggaggggaacgccgagatcaacccttccttcagtgcccccaattcctcagggaccgccggttctaagagcgtcagcaagaacgcggccgacaccggcaccttcggcaccaagacgtccggctcgtcgtcgtcggtgccgccaacccctcgtacggaggcggagatcctggagtcgtcgaatgtccgcaagttcagcttcggcgagctcaaaggctccacgaggaacttcaggccggacagcctgctcggggaggggggcttcgggtccgtgttcaaggggtggatggatgagcgcacgctcgcgcccgtgaggccgggcgccgggatcatcgtcgccgtcaagaagctcaagctcgacagcttccaagggcaccgggaatggctggcggaggtcaattacctggggcagttatcccaccctaatctcgtgaaactcatcggctactgcttggaggacgaacagcggcttcttgtgtacgagtacatgccgagagggagcctggagcatcatcttttcaggaggggctcgaacttccagccgctcccatggaacttacgcatgaaggttgctctcgaggctgccagaggtcttgctttcctgcacggcgaccaggccaaagttatctaccgcgatttcaagacctccaatatccttctcgactcggagtacaacgcaaaactgtctgatttcggtttggcaaaggacggtccaagcggtgataagagccatgtttctactagggtcatggggacacaaggatacgctgcccctgaatatcttgcgacaggccatttgacagcgaagagcgatgtgtacagctacggtgtggttcttctggagctgctgtctgggcagcgcgctctggacaagaaccgcccgcccggtcagcacaatctggtggagtgggctagaccttacatcaccaacaagaggagggtcattcatgtcctggactcacggctgggttcccagtattcccttcccgcggctcagaaggtggcaaccctggcgctgcaatgcttatcgatggacgcacgatgcaggcctgccatggatcaggttgtgactgcattagaacaacttcaaaggccaagggctcactgaaaaagatgtccatctacctctgtggagtctggagcatcctcctgtaatactttaggggagtaaaaaacagagaacgggtgagggtttgaagggctacgtggcttgtgaagagaatataatattcccttgctttgtgtacagctagttgcttcgtcgttgtaacttgggtctctacttatatattttattagtcttcg

SEQ ID NO: 2698 - protein, 374 aa, Zea mays subsp. mays
  peptide (1)..(374): Ceres Seq. ID no. 12414589
  misc_feature (34)..(369): Homolog of NCBI NO: 15225520 NR Description: putative protein kinase
  misc_feature (42)..(374): Homolog of NCBI NO: 166809 NR Description: protein kinase
  misc_feature (42)..(374): Homolog of NCBI NO: 15241749 NR Description: serine/threonine-specific protein kinase NAK
  misc_feature (270)..(369): Homolog of NCBI NO: 8778537 NR Description: F22G5.5 [Arabidopsis thaliana]
  misc_feature (18)..(270): Homolog of NCBI NO: 8778537 NR Description: F22G5.5 [Arabidopsis thaliana]
  misc_feature (26)..(369): Homolog of NCBI NO: 15227001 NR Description: putative protein kinase; protein id: At2g28930.1
  misc_feature (18)..(369): Homolog of NCBI NO: 15222437 NR Description: protein kinase APK1A; protein id: At1g07570.1
  misc_feature (1)..(374): Homolog of NCBI NO: 34897424 NR Description: putative protein kinase [Oryza sativa (japonica
  misc_feature (1)..(369): Homolog of NCBI NO: 14719339 NR Description: putative protein kinase [Oryza sativa]
  misc_feature (1)..(374): Homolog of NCBI NO: 34906046 NR Description: putative serine/threonine-specific protein kinase
MGNCAGVEGNAEINPSFSAPNSSGTAGSKSVSKNAADTGTFGTKTSGSSSSVPPTPRTEAEILESSNVRKFSFGELKGSTRNFRPDSLLGEGGFGSVFKGWMDERTLAPVRPGAGIIVAVKKLKLDSFQGHREWLAEVNYLGQLSHPNLVKLIGYCLEDEQRLLVYEYMPRGSLEHHLFRRGSNFQPLPWNLRMKVALEAARGLAFLHGDQAKVIYRDFKTSNILLDSEYNAKLSDFGLAKDGPSGDKSHVSTRVMGTQGYAAPEYLATGHLTAKSDVYSYGVVLLELLSGQRALDKNRPPGQHNLVEWARPYITNKRRVIHVLDSRLGSQYSLPAAQKVATLALQCLSMDARCRPAMDQVVTALEQLQRPRAH

SEQ ID NO: 2699 - protein, 273 aa, Zea mays subsp. mays
  peptide (1)..(273): Ceres Seq. ID no. 12414590
  misc_feature (1)..(268): Homolog of NCBI NO: 15225520 NR Description: putative protein kinase
  misc_feature (1)..(273): Homolog of NCBI NO: 166809 NR Description: protein kinase
  misc_feature (1)..(273): Homolog of NCBI NO: 15241749 NR Description: serine/threonine-specific protein kinase NAK
  misc_feature (169)..(268): Homolog of NCBI NO: 8778537 NR Description: F22G5.5 [Arabidopsis thaliana]
  misc_feature (1)..(169): Homolog of NCBI NO: 8778537 NR Description: F22G5.5 [Arabidopsis thaliana]
  misc_feature (1)..(268): Homolog of NCBI NO: 15227001 NR Description: putative protein kinase; protein id: At2g28930.1
  misc_feature (1)..(268): Homolog of NCBI NO: 15222437 NR Description: protein kinase APK1A; protein id: At1g07570.1
  misc_feature (1)..(273): Homolog of NCBI NO: 34897424 NR Description: putative protein kinase [Oryza sativa (japonica
  misc_feature (1)..(268): Homolog of NCBI NO: 14719339 NR Description: putative protein kinase [Oryza sativa]
  misc_feature (1)..(273): Homolog of NCBI NO: 34906046 NR Description: putative serine/threonine-specific protein kinase
MDERTLAPVRPGAGIIVAVKKLKLDSFQGHREWLAEVNYLGQLSHPNLVKLIGYCLEDEQRLLVYEYMPRGSLEHHLFRRGSNFQPLPWNLRMKVALEAARGLAFLHGDQAKVIYRDFKTSNILLDSEYNAKLSDFGLAKDGPSGDKSHVSTRVMGTQGYAAPEYLATGHLTAKSDVYSYGVVLLELLSGQRALDKNRPPGQHNLVEWARPYITNKRRVIHVLDSRLGSQYSLPAAQKVATLALQCLSMDARCRPAMDQVVTALEQLQRPRAH

SEQ ID NO: 2700 - protein, 206 aa, Zea mays subsp. mays
  peptide (1)..(206): Ceres Seq. ID no. 12414591
  misc_feature (1)..(201): Homolog of NCBI NO: 15225520 NR Description: putative protein kinase
  misc_feature (1)..(206): Homolog of NCBI NO: 166809 NR Description: protein kinase
  misc_feature (1)..(206): Homolog of NCBI NO: 15241749 NR Description: serine/threonine-specific protein kinase NAK
  misc_feature (102)..(201): Homolog of NCBI NO: 8778537 NR Description: F22G5.5 [Arabidopsis thaliana]
  misc_feature (1)..(102): Homolog of NCBI NO: 8778537 NR Description: F22G5.5 [Arabidopsis thaliana]
  misc_feature (1)..(201): Homolog of NCBI NO: 15227001 NR Description: putative protein kinase; protein id: At2g28930.1
  misc_feature (1)..(201): Homolog of NCBI NO: 15222437 NR Description: protein kinase APK1A; protein id: At1g07570.1
  misc_feature (1)..(206): Homolog of NCBI NO: 34897424 NR Description: putative protein kinase [Oryza sativa (japonica
  misc_feature (1)..(201): Homolog of NCBI NO: 14719339 NR Description: putative protein kinase [Oryza sativa]
  misc_feature (1)..(206): Homolog of NCBI NO: 34906046 NR Description: putative serine/threonine-specific protein kinase
MPRGSLEHHLFRRGSNFQPLPWNLRMKVALEAARGLAFLHGDQAKVIYRDFKTSNILLDSEYNAKLSDFGLAKDGPSGDKSHVSTRVMGTQGYAAPEYLATGHLTAKSDVYSYGVVLLELLSGQRALDKNRPPGQHNLVEWARPYITNKRRVIHVLDSRLGSQYSLPAAQKVATLALQCLSMDARCRPAMDQVVTALEQLQRPRAH

SEQ ID NO: 2701 - DNA, 749 bp, Zea mays subsp. mays
  misc_feature (1)..(749): Ceres Seq. ID no. 12414219
  misc_feature: MA Experiment ID: 108535 Result: Up-regulated in Transcription
  misc_feature: MA Experiment 108535 PARAMETER Experiment Name: Zm_Meristem_P Parameter: Age (day) Value: 8
  misc_feature: MA Experiment 108535 PARAMETER Experiment Name: Zm_Meristem_P Parameter: Organism Value: Zea mays
  misc_feature: MA Experiment 108535 PARAMETER Experiment Name: Zm_Meristem_P Parameter: Plant Line Value: 35A19
  misc_feature: MA Experiment 108535 PARAMETER Experiment Name: Zm_Meristem_P Parameter: Tissue Value: Root Meristem vs. Above Root Meristem
  misc_feature: MA Experiment ID: 108544 Result: Down-regulated in Transcription
  misc_feature: MA Experiment ID: 20000488 Result: Up-regulated in Transcription
  misc_feature: MA Experiment 20000488 PARAMETER Experiment Name: Zm_50mM_NH4NO3_L_to_H_P Parameter: Organism Value: Zea mays
  misc_feature: MA Experiment 20000488 PARAMETER Experiment Name: Zm_50mM_NH4NO3_L_to_H_P Parameter: Timepoint (hr) Value: 8
  misc_feature: MA Experiment 20000488 PARAMETER Experiment Name: Zm_50mM_NH4NO3_L_to_H_P Parameter: Tissue Value: Leaves
  misc_feature: MA Experiment 20000488 PARAMETER Experiment Name: Zm_50mM_NH4NO3_L_to_H_P Parameter: Treatment Value: 50mM NH4NO3 vs. 100mM Mannitol
  misc_feature: MA Experiment ID: 20000492 Result: Up-regulated in Transcription
  misc_feature: MA Experiment 20000492 PARAMETER Experiment Name: Zm_Hybrid_Seed_Dev_P Parameter: DAP Value: 12
  misc_feature: MA Experiment 20000492 PARAMETER Experiment Name: Zm_Hybrid_Seed_Dev_P Parameter: Organism Value: Zea mays
  misc_feature: MA Experiment 20000492 PARAMETER Experiment Name: Zm_Hybrid_Seed_Dev_P Parameter: Plant Line Value: 35A19
  misc_feature: MA Experiment 20000492 PARAMETER Experiment Name: Zm_Hybrid_Seed_Dev_P Parameter: Tissue Value: Fert Kernel vs. Unfert Floret
gaaccctagctcccgcaactgccgccgccaccccacgcctgcagccatgccgcccaagctcgacccgtcgcaggtggtggaggtgttcgtccgtgtgaccggcggcgaggtaggcgcggcgtcttcgctggcccccaagatcggtccgctcggtctttctcccaagaagatcggagaggacatcgccaaggagacggccaaggactggaagggcctccgcgtcaccgtcaagctcactgtccagaaccgacaggccaaggtctccgtcgttccctctgccgcggccctcgtcatcaaggcgctcaaggagcccgagagggaccgcaagaaggtcaagaacatcaagcacagcggcaacatcagtctcgacgatgtcatcgagattgccaggaccatgaggcccaggtccatggccaaggaaatgtccggcagcgtcaaggagattctcggcacctgcgtcagcgtcggctgcaccgtcgacggcaaggaccccaaggacctgcagcaggagattgacgacggcgaggtggagatcccgtccgcttaagaagggattggagcctaggagggttgtcttggtctctgaagtaattctctctagctagatttgtctgttgaagtaattttctctagctagatttttgttaaaatgtatctctgctacccattgctatggttttctggtggatgcgtgctttttccttttatatatatatatatatatatatataaaaggaacagtgtctttc

SEQ ID NO: 2702 - protein, 181 aa, Zea mays subsp. mays
  peptide (1)..(181): Ceres Seq. ID no. 12414220
  misc_feature (91)..(159): Pfam Name: Ribosomal protein L11, RNA binding domain Pfam Description: Ribosomal protein L11, RNA binding domain
  misc_feature (3)..(181): Homolog of NCBI NO: 34865048 NR Description: similar to 60S RIBOSOMAL PROTEIN L12 [Rattus
  misc_feature (25)..(181): Homolog of NCBI NO: 1710485 NR Description: 60S RIBOSOMAL PROTEIN L12
  misc_feature (16)..(179): Homolog of NCBI NO: 19075397 NR Description: 60s ribosomal protein l12 [Schizosaccharomyces
  misc_feature (16)..(157): Homolog of NCBI NO: 3986695 NR Description: ribosomal protein L12 [Cichorium intybus]
  misc_feature (16)..(179): Homolog of NCBI NO: 6094002 NR Description: 60S RIBOSOMAL PROTEIN L12
  misc_feature (16)..(180): Homolog of NCBI NO: 15239409 NR Description: 60S ribosomal protein L12 - like
  misc_feature (16)..(179): Homolog of NCBI NO: 15231814 NR Description: 60S RIBOSOMAL PROTEIN L12 -like; protein id:
  misc_feature (16)..(179): Homolog of NCBI NO: 15228098 NR Description: 60S ribosomal protein L12
  misc_feature (16)..(179): Homolog of NCBI NO: 40287508 NR Description: 60S ribosomal protein L12 [Capsicum annuum]
  misc_feature (16)..(181): Homolog of NCBI NO: 38567975 NR Description: OSJNBa0093F12.16 [Oryza sativa (japonica
NPSSRNCRRHPTPAAMPPKLDPSQVVEVFVRVTGGEVGAASSLAPKIGPLGLSPKKIGEDIAKETAKDWKGLRVTVKLTVQNRQAKVSVVPSAAALVIKALKEPERDRKKVKNIKHSGNISLDDVIEIARTMRPRSMAKEMSGSVKEILGTCVSVGCTVDGKDPKDLQQEIDDGEVEIPSA

SEQ ID NO: 2703 - protein, 166 aa, Zea mays subsp. mays
  peptide (1)..(166): Ceres Seq. ID no. 12414221
  misc_feature (76)..(144): Pfam Name: Ribosomal protein L11, RNA binding domain Pfam Description: Ribosomal protein L11, RNA binding domain
  misc_feature (1)..(166): Homolog of NCBI NO: 34865048 NR Description: similar to 60S RIBOSOMAL PROTEIN L12 [Rattus
  misc_feature (10)..(166): Homolog of NCBI NO: 1710485 NR Description: 60S RIBOSOMAL PROTEIN L12
  misc_feature (1)..(164): Homolog of NCBI NO: 19075397 NR Description: 60s ribosomal protein l12 [Schizosaccharomyces
  misc_feature (1)..(142): Homolog of NCBI NO: 3986695 NR Description: ribosomal protein L12 [Cichorium intybus]
  misc_feature (1)..(164): Homolog of NCBI NO: 6094002 NR Description: 60S RIBOSOMAL PROTEIN L12
  misc_feature (1)..(165): Homolog of NCBI NO: 15239409 NR Description: 60S ribosomal protein L12 - like
  misc_feature (1)..(164): Homolog of NCBI NO: 15231814 NR Description: 60S RIBOSOMAL PROTEIN L12 -like; protein id:
  misc_feature (1)..(164): Homolog of NCBI NO: 15228098 NR Description: 60S ribosomal protein L12
  misc_feature (1)..(164): Homolog of NCBI NO: 40287508 NR Description: 60S ribosomal protein L12 [Capsicum annuum]
  misc_feature (1)..(166): Homolog of NCBI NO: 38567975 NR Description: OSJNBa0093F12.16 [Oryza sativa (japonica
MPPKLDPSQVVEVFVRVTGGEVGAASSLAPKIGPLGLSPKKIGEDIAKETAKDWKGLRVTVKLTVQNRQAKVSVVPSAAALVIKALKEPERDRKKVKNIKHSGNISLDDVIEIARTMRPRSMAKEMSGSVKEILGTCVSVGCTVDGKDPKDLQQEIDDGEVEIPSA

SEQ ID NO: 2704 - DNA, 1572 bp, Zea mays subsp. mays
  misc_feature (1)..(1572): Ceres Seq. ID no. 12405776
  misc_feature: MA Experiment ID: 108535 Result: Up-regulated in Transcription
  misc_feature: MA Experiment 108535 PARAMETER Experiment Name: Zm_Meristem_P Parameter: Age (day) Value: 8
  misc_feature: MA Experiment 108535 PARAMETER Experiment Name: Zm_Meristem_P Parameter: Organism Value: Zea mays
  misc_feature: MA Experiment 108535 PARAMETER Experiment Name: Zm_Meristem_P Parameter: Plant Line Value: 35A19
  misc_feature: MA Experiment 108535 PARAMETER Experiment Name: Zm_Meristem_P Parameter: Tissue Value: Root Meristem vs. Above Root Meristem
agcagtcagcacgtctccgtccccgacgatgccggggagcaatgccaatggagggcgcagcctgtacggacacggccgaccggccatcttcacccccctctccttgccgccctcggttccggactctgctcccctgccccatacccccaccgctcctcacgcctcgcctgactgccgaggcaaccccggaagctcctcccgcgcgcgaacatgatttggcctgaacaacgcagaggaagtgatcttatgtagctacaaaagatagtaatggggatatccaaggtgacaggcattgccgccacagcttttcttgtcacatctgttagtctgtgccagttgggaatgaggattattatgcttccattcctagccaccggtattgttgcttccattgtcacggttgcatcgcatgatgccatcaacctaccgtggatcttggggaagaactcggtcggaagatttcctctttggtcgattatactgtttggtcctttcttgacgcttgctcggacatatgcgatggttaagagatacatgaggaaggaggccgtgtatgacaagatcgtggaaggcctatatctcggaggatggccgtttctcttgaaacatttgccccctggaaacccatctgtcatagattgcacttgtgagcttccaagaagttcattcgttccagcagacgagtatctttgccttgcaacttgggataccagagctccaacaccgcaccagatcgaaaaggctgcacgttgggcttgtgaaaagaaatctgaggggaagccagtttatgtccattgcgcatttggtcatggaagaagtgcctgtgttgtgtgtgcaattctagtagcgctgggtactgctgagaactggaaagatgctgagaacatcatccgtgaaagaagaaagataaaaatgaacgcccttcaccgtaaaaccttggaagagtggtccaaacaacgagttcgtcagaaaaaggataagtagttgtttgaccagatgcatggagttgccctggatatggtgttattgctgcaccaatttattttaatccaatattccatagctcatgtatagtcgagtggaatgaggaatatcatagggagcccagctcgtgtgtaggatctatctatggagtacctatgacactgtcatagtaacatattgatttgagattctagatttggtgagaaccccataacctgtatcacaaagccttcaaggttggccagcttgccgagggcaagagccatttggctcatgaagctcatgttggcgtcgtcagtcagagatccaccggccatggtgtcagcaagcgactgatgcagctgctccaagccctgcgagagagcttcctctgcctgctgtgatgactgctgaaggctgcatatgccgaccacttgctgctctgtcagtggatctagctggggcagcagtgtctgcaacagaatggaatttcgtatactttattattggaactgcaaattcttcttgtactaaggggaaatctgatttacattggaacagttcttgtgatctcagtaatgaaaaagtaacatcgcctgagttccctgc

SEQ ID NO: 2705 - protein, 238 aa, Zea mays subsp. mays
  peptide (1)..(238): Ceres Seq. ID no. 12405777
  misc_feature (98)..(230): Pfam Name: Dual specificity phosphatase, catalytic domain Pfam Description: Dual specificity phosphatase, catalytic domain
  misc_feature (15)..(238): Homolog of NCBI NO: 23030039 NR Description: hypothetical protein [Microbulbifer degradans
  misc_feature (1)..(232): Homolog of NCBI NO: 28896859 NR Description: hypothetical protein [Vibrio parahaemolyticus
  misc_feature (58)..(230): Homolog of NCBI NO: 16129372 NR Description: putative enzymes [Escherichia coli K12]
  misc_feature (58)..(230): Homolog of NCBI NO: 3041758 NR Description: unnamed protein product [Escherichia coli]
  misc_feature (58)..(230): Homolog of NCBI NO: 26247698 NR Description: Hypothetical protein ynbD [Escherichia coli
  misc_feature (1)..(230): Homolog of NCBI NO: 15801736 NR Description: putative enzymes [Escherichia coli O157:H7
  misc_feature (2)..(236): Homolog of NCBI NO: 34908470 NR Description: P0489B03.9 [Oryza sativa (japonica
MGISKVTGIAATAFLVTSVSLCQLGMRIIMLPFLATGIVASIVTVASHDAINLPWILGKNSVGRFPLWSIILFGPFLTLARTYAMVKRYMRKEAVYDKIVEGLYLGGWPFLLKHLPPGNPSVIDCTCELPRSSFVPADEYLCLATWDTRAPTPHQIEKAARWACEKKSEGKPVYVHCAFGHGRSACVVCAILVALGTAENWKDAENIIRERRKIKMNALHRKTLEEWSKQRVRQKKDK

SEQ ID NO: 2706 - protein, 213 aa, Zea mays subsp. mays
  peptide (1)..(213): Ceres Seq. ID no. 12405778
  misc_feature (73)..(205): Pfam Name: Dual specificity phosphatase, catalytic domain Pfam Description: Dual specificity phosphatase, catalytic domain
  misc_feature (1)..(213): Homolog of NCBI NO: 23030039 NR Description: hypothetical protein [Microbulbifer degradans
  misc_feature (1)..(207): Homolog of NCBI NO: 28896859 NR Description: hypothetical protein [Vibrio parahaemolyticus
  misc_feature (33)..(205): Homolog of NCBI NO: 16129372 NR Description: putative enzymes [Escherichia coli K12]
  misc_feature (33)..(205): Homolog of NCBI NO: 3041758 NR Description: unnamed protein product [Escherichia coli]
  misc_feature (33)..(205): Homolog of NCBI NO: 26247698 NR Description: Hypothetical protein ynbD [Escherichia coli
  misc_feature (1)..(205): Homolog of NCBI NO: 15801736 NR Description: putative enzymes [Escherichia coli O157:H7
  misc_feature (1)..(211): Homolog of NCBI NO: 34908470 NR Description: P0489B03.9 [Oryza sativa (japonica
MRIIMLPFLATGIVASIVTVASHDAINLPWILGKNSVGRFPLWSIILFGPFLTLARTYAMVKRYMRKEAVYDKIVEGLYLGGWPFLLKHLPPGNPSVIDCTCELPRSSFVPADEYLCLATWDTRAPTPHQIEKAARWACEKKSEGKPVYVHCAFGHGRSACVVCAILVALGTAENWKDAENIIRERRKIKMNALHRKTLEEWSKQRVRQKKDK

SEQ ID NO: 2707 - protein, 209 aa, Zea mays subsp. mays
  peptide (1)..(209): Ceres Seq. ID no. 12405779
  misc_feature (69)..(201): Pfam Name: Dual specificity phosphatase, catalytic domain Pfam Description: Dual specificity phosphatase, catalytic domain
  misc_feature (1)..(209): Homolog of NCBI NO: 23030039 NR Description: hypothetical protein [Microbulbifer degradans
  misc_feature (1)..(203): Homolog of NCBI NO: 28896859 NR Description: hypothetical protein [Vibrio parahaemolyticus
  misc_feature (29)..(201): Homolog of NCBI NO: 16129372 NR Description: putative enzymes [Escherichia coli K12]
  misc_feature (29)..(201): Homolog of NCBI NO: 3041758 NR Description: unnamed protein product [Escherichia coli]
  misc_feature (29)..(201): Homolog of NCBI NO: 26247698 NR Description: Hypothetical protein ynbD [Escherichia coli
  misc_feature (1)..(201): Homolog of NCBI NO: 15801736 NR Description: putative enzymes [Escherichia coli O157:H7
  misc_feature (1)..(207): Homolog of NCBI NO: 34908470 NR Description: P0489B03.9 [Oryza sativa (japonica
MLPFLATGIVASIVTVASHDAINLPWILGKNSVGRFPLWSIILFGPFLTLARTYAMVKRYMRKEAVYDKIVEGLYLGGWPFLLKHLPPGNPSVIDCTCELPRSSFVPADEYLCLATWDTRAPTPHQIEKAARWACEKKSEGKPVYVHCAFGHGRSACVVCAILVALGTAENWKDAENIIRERRKIKMNALHRKTLEEWSKQRVRQKKDK

SEQ ID NO: 2708 - DNA, 1641 bp, Zea mays subsp. mays
  misc_feature (1)..(1641): Ceres Seq. ID no. 12352107
  misc_feature: MA Experiment ID: 108689 Result: Up-regulated in Transcription
  misc_feature: MA Experiment 108689 PARAMETER Experiment Name: Zm_Drought_Roots_P Parameter: Age (day) Value: 9
  misc_feature: MA Experiment 108689 PARAMETER Experiment Name: Zm_Drought_Roots_P Parameter: Organism Value: Zea mays
  misc_feature: MA Experiment 108689 PARAMETER Experiment Name: Zm_Drought_Roots_P Parameter: Plant Line Value: 35A19
  misc_feature: MA Experiment 108689 PARAMETER Experiment Name: Zm_Drought_Roots_P Parameter: Timepoint (hr) Value: 24
  misc_feature: MA Experiment 108689 PARAMETER Experiment Name: Zm_Drought_Roots_P Parameter: Tissue Value: Roots
  misc_feature: MA Experiment 108689 PARAMETER Experiment Name: Zm_Drought_Roots_P Parameter: Treatment Value: Drought vs. No Drought
ttctctagactccccttcgtccctttctctctcttcacactcgcctcgccattaaagctccaaaaaagaaaaaaaggctgcgaaaaaaatcatcttctcttctcctaaaatcttccacctttaaccgtccctgtccgcgaatttctagatgccccgatcgcttccgattttttcctggatttctccgattttttgaagtatttttccttggggacggtttcattgccattcctcgacggggttagggtttgcggggatgagggtgcacggcgaggtgtcggacgatgaggcggccgtggctgtggttggggaaacggtgccctcctcgccgcctcccgcctccgtggtgcagccgctggtggtggggtacgccctcaccaagaagaaagtcaagagcttcctgcagcccaagctgctcgcgctggccaggaagaaaggcattcatttcgtatcaattgatgagacttgccccctctctgaacaaggtccatttgacatcattttgcacaagcttactagtaaggagtggcagcaagttttggaggactatcgtgaagagcatccagaagtgactgtcctcgacccaccaaatgctatccaacatttgcacaatcgccaatcaatgctacaagaagttgctgatttgaacctgtccaatggttatggagaggtttgcgctccacgacaactagtcatcatgaaagatccgtcttccatacctgatgcagttgccaaggctggactaaccttgcctttggttgccaaaccattggtcgctgatggtacatcaaaatctcatgagctatcccttgcatatgtggaagcatcattgcctttgcttgaccctcctttggttctccaggaatttgtcaatcatggtgggatcctatttaaggtatatattgttggtgaaacaatacaggtagtccgcaggttttcacttcctgatgttaatacgtatgacctgggaaacaatgacggtatctttcgattcccaagagtttcttgtgctacaaataatgcagaagatgcagatgttgacccttgtattgcagaacttcctccaaagccacttcttgagaaacttggccgggagcttcgacgccggctgggtcttagactgtttaacatagatatgattagagaacatggaagaaaggaccggtactatgtcattgacatcaactattttcctggatatggcaagatgccaggatatgagcacatattcactgacttcctgctaagcctcgtgcaaagcaagtacaagaggctaagtgggagctgaagcgtagagaagatttactttcgatggagactattaacagatgccagctagcctggccatataacagtggggcagctagaaaggtcttccaggttgtacatagcaagggggtgggtcttagcatgaatgcggtgtttgggccggggccttgactgaaggcgcatagcagaactaagacaaaaaatgcagtgtttgggccggggcagtatctgaagaaaggttttggctccgtgcccagcctactgtgtaattcgtttgaccgagtggccgacctgtgtaaatcgttttaccgagtgccgacctgggcttctttagtttcaaaaacaaacaaacaaaacctttgcttcgttttt

SEQ ID NO: 2709 - protein, 343 aa, Zea mays subsp. mays
  peptide (1)..(343): Ceres Seq. ID no. 12352108
  misc_feature (32)..(331): Pfam Name: Inositol 1, 3, 4-trisphosphate 5/6-kinase Pfam Description: Inositol 1, 3, 4-trisphosphate 5/6-kinase
  misc_feature (1)..(342): Homolog of NCBI NO: 27311236 NR Description: Putative inositol 1,3,4-trisphosphate 5/6-kinase
  misc_feature (23)..(333): Homolog of NCBI NO: 27549256 NR Description: inositol phosphate kinase [Zea mays]
  misc_feature (5)..(197): Homolog of NCBI NO: 7487088 NR Description: hypothetical protein T16L1.260 - Arabidopsis
  misc_feature (168)..(339): Homolog of NCBI NO: 30689810 NR Description: expressed protein [Arabidopsis thaliana]
  misc_feature (30)..(314): Homolog of NCBI NO: 7487925 NR Description: inositol 1,3,4-trisphosphate 5/6-kinase homolog
  misc_feature (30)..(339): Homolog of NCBI NO: 18413088 NR Description: inositol 1,3,4-trisphosphate 5/6-kinase-like
  misc_feature (5)..(197): Homolog of NCBI NO: 30689810 NR Description: expressed protein [Arabidopsis thaliana]
  misc_feature (89)..(339): Homolog of NCBI NO: 30680654 NR Description: inositol 1,3,4-trisphosphate 5/6-kinase-related
  misc_feature (168)..(314): Homolog of NCBI NO: 7487088 NR Description: hypothetical protein T16L1.260 - Arabidopsis
  misc_feature (21)..(343): Homolog of NCBI NO: 37530372 NR Description: putative inositol 1,3,4-trisphosphate 5/6-kinase
MRVHGEVSDDEAAVAVVGETVPSSPPPASVVQPLVVGYALTKKKVKSFLQPKLLALARKKGIHFVSIDETCPLSEQGPFDIILHKLTSKEWQQVLEDYREEHPEVTVLDPPNAIQHLHNRQSMLQEVADLNLSNGYGEVCAPRQLVIMKDPSSIPDAVAKAGLTLPLVAKPLVADGTSKSHELSLAYVEASLPLLDPPLVLQEFVNHGGILFKVYIVGETIQVVRRFSLPDVNTYDLGNNDGIFRFPRVSCATNNAEDADVDPCIAELPPKPLLEKLGRELRRRLGLRLFNIDMIREHGRKDRYYVIDINYFPGYGKMPGYEHIFTDFLLSLVQSKYKRLSGS

SEQ ID NO: 2710 - protein, 221 aa, Zea mays subsp. mays
  peptide (1)..(221): Ceres Seq. ID no. 12352109
  misc_feature (1)..(209): Pfam Name: Inositol 1, 3, 4-trisphosphate 5/6-kinase Pfam Description: Inositol 1, 3, 4-trisphosphate 5/6-kinase
  misc_feature (1)..(211): Homolog of NCBI NO: 27549256 NR Description: inositol phosphate kinase [Zea mays]
  misc_feature (46)..(192): Homolog of NCBI NO: 7487088 NR Description: hypothetical protein T16L1.260 - Arabidopsis
  misc_feature (1)..(75): Homolog of NCBI NO: 7487088 NR Description: hypothetical protein T16L1.260 - Arabidopsis
  misc_feature (1)..(217): Homolog of NCBI NO: 30680654 NR Description: inositol 1,3,4-trisphosphate 5/6-kinase-related
  misc_feature (46)..(217): Homolog of NCBI NO: 30689810 NR Description: expressed protein [Arabidopsis thaliana]
  misc_feature (1)..(75): Homolog of NCBI NO: 30689810 NR Description: expressed protein [Arabidopsis thaliana]
  misc_feature (1)..(192): Homolog of NCBI NO: 7487925 NR Description: inositol 1,3,4-trisphosphate 5/6-kinase homolog
  misc_feature (1)..(217): Homolog of NCBI NO: 18413088 NR Description: inositol 1,3,4-trisphosphate 5/6-kinase-like
  misc_feature (1)..(220): Homolog of NCBI NO: 27311236 NR Description: Putative inositol 1,3,4-trisphosphate 5/6-kinase
  misc_feature (1)..(221): Homolog of NCBI NO: 37530372 NR Description: putative inositol 1,3,4-trisphosphate 5/6-kinase
MLQEVADLNLSNGYGEVCAPRQLVIMKDPSSIPDAVAKAGLTLPLVAKPLVADGTSKSHELSLAYVEASLPLLDPPLVLQEFVNHGGILFKVYIVGETIQVVRRFSLPDVNTYDLGNNDGIFRFPRVSCATNNAEDADVDPCIAELPPKPLLEKLGRELRRRLGLRLFNIDMIREHGRKDRYYVIDINYFPGYGKMPGYEHIFTDFLLSLVQSKYKRLSGS

SEQ ID NO: 2711 - protein, 196 aa, Zea mays subsp. mays
  peptide (1)..(196): Ceres Seq. ID no. 12352110
  misc_feature (1)..(184): Pfam Name: Inositol 1, 3, 4-trisphosphate 5/6-kinase Pfam Description: Inositol 1, 3, 4-trisphosphate 5/6-kinase
  misc_feature (1)..(186): Homolog of NCBI NO: 27549256 NR Description: inositol phosphate kinase [Zea mays]
  misc_feature (21)..(167): Homolog of NCBI NO: 7487088 NR Description: hypothetical protein T16L1.260 - Arabidopsis
  misc_feature (1)..(50): Homolog of NCBI NO: 7487088 NR Description: hypothetical protein T16L1.260 - Arabidopsis
  misc_feature (1)..(192): Homolog of NCBI NO: 30680654 NR Description: inositol 1,3,4-trisphosphate 5/6-kinase-related
  misc_feature (21)..(192): Homolog of NCBI NO: 30689810 NR Description: expressed protein [Arabidopsis thaliana]
  misc_feature (1)..(50): Homolog of NCBI NO: 30689810 NR Description: expressed protein [Arabidopsis thaliana]
  misc_feature (1)..(167): Homolog of NCBI NO: 7487925 NR Description: inositol 1,3,4-trisphosphate 5/6-kinase homolog
  misc_feature (1)..(192): Homolog of NCBI NO: 18413088 NR Description: inositol 1,3,4-trisphosphate 5/6-kinase-like
  misc_feature (1)..(195): Homolog of NCBI NO: 27311236 NR Description: Putative inositol 1,3,4-trisphosphate 5/6-kinase
  misc_feature (1)..(196): Homolog of NCBI NO: 37530372 NR Description: putative inositol 1,3,4-trisphosphate 5/6-kinase
MKDPSSIPDAVAKAGLTLPLVAKPLVADGTSKSHELSLAYVEASLPLLDPPLVLQEFVNHGGILFKVYIVGETIQVVRRFSLPDVNTYDLGNNDGIFRFPRVSCATNNAEDADVDPCIAELPPKPLLEKLGRELRRRLGLRLFNIDMIREHGRKDRYYVIDINYFPGYGKMPGYEHIFTDFLLSLVQSKYKRLSGS

SEQ ID NO: 2712 - DNA, 1769 bp, Zea mays subsp. mays
  misc_feature (1)..(1769): Ceres Seq. ID no. 12405773
  misc_feature: MA Experiment ID: 108535 Result: Down-regulated in Transcription
  misc_feature: MA Experiment 108535 PARAMETER Experiment Name: Zm_Meristem_P Parameter: Age (day) Value: 8
  misc_feature: MA Experiment 108535 PARAMETER Experiment Name: Zm_Meristem_P Parameter: Organism Value: Zea mays
  misc_feature: MA Experiment 108535 PARAMETER Experiment Name: Zm_Meristem_P Parameter: Plant Line Value: 35A19
  misc_feature: MA Experiment 108535 PARAMETER Experiment Name: Zm_Meristem_P Parameter: Tissue Value: Root Meristem vs. Above Root Meristem
  misc_feature: MA Experiment ID: 108556 Result: Up-regulated in Transcription
  misc_feature: MA Experiment 108556 PARAMETER Experiment Name: Zm_Drought_P Parameter: Age (day) Value: 9
  misc_feature: MA Experiment 108556 PARAMETER Experiment Name: Zm_Drought_P Parameter: Organism Value: Zea mays
  misc_feature: MA Experiment 108556 PARAMETER Experiment Name: Zm_Drought_P Parameter: Plant Line Value: 35A19
  misc_feature: MA Experiment 108556 PARAMETER Experiment Name: Zm_Drought_P Parameter: Timepoint (hr) Value: 24
  misc_feature: MA Experiment 108556 PARAMETER Experiment Name: Zm_Drought_P Parameter: Tissue Value: Aerial
  misc_feature: MA Experiment 108556 PARAMETER Experiment Name: Zm_Drought_P Parameter: Treatment Value: Drought vs. No Drought
  misc_feature: MA Experiment ID: 20000479 Result: Up-regulated in Transcription
  misc_feature: MA Experiment 20000479 PARAMETER Experiment Name: Zm_Drought_P Parameter: Age (day) Value: 10
  misc_feature: MA Experiment 20000479 PARAMETER Experiment Name: Zm_Drought_P Parameter: Organism Value: Zea mays
  misc_feature: MA Experiment 20000479 PARAMETER Experiment Name: Zm_Drought_P Parameter: Plant Line Value: 35A19
  misc_feature: MA Experiment 20000479 PARAMETER Experiment Name: Zm_Drought_P Parameter: Timepoint (hr) Value: 48
  misc_feature: MA Experiment 20000479 PARAMETER Experiment Name: Zm_Drought_P Parameter: Tissue Value: Aerial
  misc_feature: MA Experiment 20000479 PARAMETER Experiment Name: Zm_Drought_P Parameter: Treatment Value: Drought vs. No Drought
  misc_feature: MA Experiment ID: 20000480 Result: Up-regulated in Transcription
  misc_feature: MA Experiment 20000480 PARAMETER Experiment Name: Zm_Drought_P Parameter: Age (day) Value: 11
  misc_feature: MA Experiment 20000480 PARAMETER Experiment Name: Zm_Drought_P Parameter: Organism Value: Zea mays
  misc_feature: MA Experiment 20000480 PARAMETER Experiment Name: Zm_Drought_P Parameter: Plant Line Value: 35A19
  misc_feature: MA Experiment 20000480 PARAMETER Experiment Name: Zm_Drought_P Parameter: Timepoint (hr) Value: 72
  misc_feature: MA Experiment 20000480 PARAMETER Experiment Name: Zm_Drought_P Parameter: Tissue Value: Aerial
  misc_feature: MA Experiment 20000480 PARAMETER Experiment Name: Zm_Drought_P Parameter: Treatment Value: Drought vs. No Drought
aaaagcgaaacgactccttcagttccgtcccgttcgtgacgacctccggtcccgggagggggagggggagggggagggagaggcgaggtcatggcctccggcaccggctccggccagccgcaacccgcagcagctgatgctgacccgggagccggcgacaacaagctcgtcttcgagacgccgctgcagccgcagcccgtgagggaggactacgtcgagaacgccgtcaagttcctctcccacccaaaggtcaggggctcccccgtcgtctacagacgatccttcctcgagaagaagggcctcaccacacaggagatcgacgaggccctacgaagagtccctgatcctgaacccatcactacggctaccgcttctccacagcagcaggttggcagccagaatcaatcagctggggcgcaaacttatgcgccagcgcgatctatgcacccagcaaccgctggccctgtcgtccgaccccggttcagctggtaccaagcattcctcgctgcagggctcttgcttggttttggtgctagcacggctgtctttatcaagaaactgttccttcctaggctcaagtcttggatccgcaacgtcgtagcacaaggtgatggcgctgaaggcaaccaacttaagcacaggattgatgaggaaacggctgaggctgtaaaggcttctgcttcagctgtttctgctattgccaaaacaaaccagcagctgcttgcttcaaaggatgaagaaaagaagatactcgtgacattaacacaagctctagattcccaagccaaggagttaaaatccttgaccgagtcaatcaatcgtaccagggaacccataaacattaccagagacgataggttttctcagcaccgcccactggaagaccatgtccctcctgttacgaggaatggggcaattaacagttcatggagatcttctcagcaaactaacatgtatggtgtgtcacatggtgactttggttccgcaaggtctgcttcattcgtgccagcacctgctgaacctacagctggatcattttcaagatcttgtgccgagcagacgtccaccgctgcacaacgagcggataggtcctctggcggtaagccatgggagatgcagcagtattcgcagcagaggcctggttatggatccaactcccagttgaatgatgatggatcatactctgatgcccaggacagctatgctccttcctattaccagaatggaaaggcccctgattttcaatcagatgaacctaggtctttgacctacaacactgggattgaggagagaccgccgccgcctcagcgccgctgggtgccccctcagcctccaggtgttgcgatgccagaagcagctgctgctatacgtcaaccaaaggtccctccaaagcagccctccagcgatgcctctcgggcagctggagagatgcaggtgaatggtgcttcaagtgcatcaccggatgctgtgactgaggttcctgttaatagtgctaccacaagtgatgctggacacagcgagatcgaagaacaaccagtggccgtctaagtgaaaaaccgagaccagccaagaactgggaagcaatctaagagagatttggggtttctggtacatactggggtttgtcatacatttctgaataacatgtgtcagaacagcatgacgacaacatgtcaataagtagcagatagtttctgtatttagagtaatgctacttgtacacaggagaatgtcaagcattatctatggctgttcgatcgagggtgcct

SEQ ID NO: 2713 - protein, 485 aa, Zea mays subsp. mays
  peptide (1)..(485): Ceres Seq. ID no. 12405774
  misc_feature (37)..(161): Pfam Name: Peroxisomal membrane anchor protein (Pex14p) Pfam Description: Peroxisomal membrane anchor protein (Pex14p)
  misc_feature (37)..(84): Homolog of NCBI NO: 9945056 NR Description: rice EST D22333 corresponds to a region of the
  misc_feature (118)..(450): Homolog of NCBI NO: 20466350 NR Description: putative protein [Arabidopsis thaliana]
  misc_feature (35)..(450): Homolog of NCBI NO: 11121113 NR Description: peroxin Pex14 [Arabidopsis thaliana]
  misc_feature (35)..(450): Homolog of NCBI NO: 30697742 NR Description: (PEX14) protein [Arabidopsis thaliana]
  misc_feature (35)..(450): Homolog of NCBI NO: 11094252 NR Description: PEX14 [Arabidopsis thaliana]
MASGTGSGQPQPAAADADPGAGDNKLVFETPLQPQPVREDYVENAVKFLSHPKVRGSPVVYRRSFLEKKGLTTQEIDEALRRVPDPEPITTATASPQQQVGSQNQSAGAQTYAPARSMHPATAGPVVRPRFSWYQAFLAAGLLLGFGASTAVFIKKLFLPRLKSWIRNVVAQGDGAEGNQLKHRIDEETAEAVKASASAVSAIAKTNQQLLASKDEEKKILVTLTQALDSQAKELKSLTESINRTREPINITRDDRFSQHRPLEDHVPPVTRNGAINSSWRSSQQTNMYGVSHGDFGSARSASFVPAPAEPTAGSFSRSCAEQTSTAAQRADRSSGGKPWEMQQYSQQRPGYGSNSQLNDDGSYSDAQDSYAPSYYQNGKAPDFQSDEPRSLTYNTGIEERPPPPQRRWVPPQPPGVAMPEAAAAIRQPKVPPKQPSSDASRAAGEMQVNGASSASPDAVTEVPVNSATTSDAGHSEIEEQPVAV

SEQ ID NO: 2714 - protein, 368 aa, Zea mays subsp. mays
  peptide (1)..(368): Ceres Seq. ID no. 12405775
  misc_feature (1)..(333): Homolog of NCBI NO: 20466350 NR Description: putative protein [Arabidopsis thaliana]
  misc_feature (1)..(333): Homolog of NCBI NO: 11121113 NR Description: peroxin Pex14 [Arabidopsis thaliana]
  misc_feature (1)..(333): Homolog of NCBI NO: 30697742 NR Description: (PEX14) protein [Arabidopsis thaliana]
  misc_feature (1)..(333): Homolog of NCBI NO: 11094252 NR Description: PEX14 [Arabidopsis thaliana]
MHPATAGPVVRPRFSWYQAFLAAGLLLGFGASTAVFIKKLFLPRLKSWIRNVVAQGDGAEGNQLKHRIDEETAEAVKASASAVSAIAKTNQQLLASKDEEKKILVTLTQALDSQAKELKSLTESINRTREPINITRDDRFSQHRPLEDHVPPVTRNGAINSSWRSSQQTNMYGVSHGDFGSARSASFVPAPAEPTAGSFSRSCAEQTSTAAQRADRSSGGKPWEMQQYSQQRPGYGSNSQLNDDGSYSDAQDSYAPSYYQNGKAPDFQSDEPRSLTYNTGIEERPPPPQRRWVPPQPPGVAMPEAAAAIRQPKVPPKQPSSDASRAAGEMQVNGASSASPDAVTEVPVNSATTSDAGHSEIEEQPVAV

SEQ ID NO: 2715 - DNA, 1509 bp, Zea mays subsp. mays
  misc_feature (1)..(1509): Ceres Seq. ID no. 13498540
  misc_feature: MA Experiment ID: 108522 Result: Up-regulated in Transcription
  misc_feature: MA Experiment 108522 PARAMETER Experiment Name: Zm_42deg_Heat_P Parameter: Age (day) Value: 8
  misc_feature: MA Experiment 108522 PARAMETER Experiment Name: Zm_42deg_Heat_P Parameter: Organism Value: Zea mays
  misc_feature: MA Experiment 108522 PARAMETER Experiment Name: Zm_42deg_Heat_P Parameter: Plant Line Value: 35A19
  misc_feature: MA Experiment 108522 PARAMETER Experiment Name: Zm_42deg_Heat_P Parameter: Temperature (deg C) Value: 42 vs. 22
  misc_feature: MA Experiment 108522 PARAMETER Experiment Name: Zm_42deg_Heat_P Parameter: Timepoint (hr) Value: 1
  misc_feature: MA Experiment 108522 PARAMETER Experiment Name: Zm_42deg_Heat_P Parameter: Tissue Value: Aerial
  misc_feature: MA Experiment ID: 108689 Result: Up-regulated in Transcription
  misc_feature: MA Experiment 108689 PARAMETER Experiment Name: Zm_Drought_Roots_P Parameter: Age (day) Value: 9
  misc_feature: MA Experiment 108689 PARAMETER Experiment Name: Zm_Drought_Roots_P Parameter: Organism Value: Zea mays
  misc_feature: MA Experiment 108689 PARAMETER Experiment Name: Zm_Drought_Roots_P Parameter: Plant Line Value: 35A19
  misc_feature: MA Experiment 108689 PARAMETER Experiment Name: Zm_Drought_Roots_P Parameter: Timepoint (hr) Value: 24
  misc_feature: MA Experiment 108689 PARAMETER Experiment Name: Zm_Drought_Roots_P Parameter: Tissue Value: Roots
  misc_feature: MA Experiment 108689 PARAMETER Experiment Name: Zm_Drought_Roots_P Parameter: Treatment Value: Drought vs. No Drought
  misc_feature: MA Experiment ID: 20000534 Result: Down-regulated in Transcription
  misc_feature: MA Experiment 20000534 PARAMETER Experiment Name: Zm_Hybrid_Pollen_P Parameter: Age (day) Value: 8
  misc_feature: MA Experiment 20000534 PARAMETER Experiment Name: Zm_Hybrid_Pollen_P Parameter: Organism Value: Zea mays
  misc_feature: MA Experiment 20000534 PARAMETER Experiment Name: Zm_Hybrid_Pollen_P Parameter: Plant Line Value: 35A19
  misc_feature: MA Experiment 20000534 PARAMETER Experiment Name: Zm_Hybrid_Pollen_P Parameter: Tissue Value: Pollen vs. Aerial
gagccctcgacgagcacccgagagacacgagagtgaaggaaagaggaaaaagaagaagactacagccaaaaccctatctcactccggcgcgccaccggccgatggtttcgatgaacaccacgccgaatccgcttgactccgccgccggcagcgccgccgtcgccggcggaagcgtggacgagggaggaggaggaggcggcaggaagaagcggatgcgcggggcggtagcggcggcgatggtgccgccgccgatggcggtcccgctgccggccgcggcgcccgcggcgggggaggaggttcggaaggtcaggaagccgtacaccatcaccaaatcccgggagagctggacggagccggagcacgataagttcctcgaggccctgcagctttttgatcgtgattggaagaagattgaagcatatgtcggctcgaagactgttatacagataaggagccatgcacagaagtacttcttgaaggttcagaagaatggcacaggcgagcatctgcccccacccaggccaaaacggaaggcagctcatccatatccccagaaatcatctaaaaatgtttctcaaactattttattacaagaacaacctactcagcgggagcaaggttctgtcatgcctatggatactgctactgtgataaacacaaatgcgaatgtggcagtggcagtggcagtgccttcctgggacaatactcttgctcaatctctcagtgctggtcttgttccaggtgcaacaaataactgttcaagtagcatagagagtccatctggtacttggccaacttctgaagcagttgagcaagaaattgtggttccatcactccatgctatgccagattttgcccgagtatacagcttcctaggaagcatatttgatcctgatacaagtgggcatttgcagaggttaaaagtgatggatccaattgatattcaaacggtactactacttatgagaaatctttccacgaaccttaggagtcctgactttgagcaacatctatggtggtggggaccatgttaaacctgaaggcatggaaaatcatggatctcctcagagtggccatcttccattcctggtaacaagtgaatgagagcacactggcaatttgtggtcgaagctttggttgtttccacgagacacattcttgtgtgttctcagcaatcgagttgtggacggctggtctggcaatttatgaatgccatgtctgccaatctgtatagcttccaataatgggtctgaccctagactagttttgttttccacgttcatgtagatagctagttttgtgtgctcatgcaattttttactgggtggagcctagatcgatatgtttttgttgtatcacttgtgcacgcgtgtatgtaagtatgtggaaccttgtaatgcttgaggtacttgagagtcttcggttaagacaaagcatatatgcgcaataatcaggagatcaccatcgtcgactatataatgagaagtttttttagttgtggacctacct

SEQ ID NO: 2716 - protein, 343 aa, Zea mays subsp. mays
  peptide (1)..(343): Ceres Seq. ID no. 13498541
  misc_feature (112)..(157): Pfam Name: Myb-like DNA-binding domain Pfam Description: Myb-like DNA-binding domain
  misc_feature (101)..(335): Homolog of NCBI NO: 15234118 NR Description: myb family transcription factor [Arabidopsis
  misc_feature (97)..(335): Homolog of NCBI NO: 15223419 NR Description: myb family transcription factor [Arabidopsis
  misc_feature (75)..(334): Homolog of NCBI NO: 14596213 NR Description: putative protein [Arabidopsis thaliana]
  misc_feature (75)..(334): Homolog of NCBI NO: 18414039 NR Description: myb family transcription factor [Arabidopsis
  misc_feature (249)..(334): Homolog of NCBI NO: 11357907 NR Description: hypothetical protein F9G14.150 - Arabidopsis
  misc_feature (75)..(233): Homolog of NCBI NO: 11357907 NR Description: hypothetical protein F9G14.150 - Arabidopsis
  misc_feature (78)..(334): Homolog of NCBI NO: 30680926 NR Description: myb family transcription factor [Arabidopsis
  misc_feature (84)..(336): Homolog of NCBI NO: 30696225 NR Description: myb family transcription factor [Arabidopsis
  misc_feature (84)..(337): Homolog of NCBI NO: 8953721 NR Description: contains similarity to MYB-related DNA-binding
  misc_feature (84)..(336): Homolog of NCBI NO: 30696221 NR Description: myb family transcription factor [Arabidopsis
ALDEHPRDTRVKERGKRRRLQPKPYLTPARHRPMVSMNTTPNPLDSAAGSAAVAGGSVDEGGGGGGRKKRMRGAVAAAMVPPPMAVPLPAAAPAAGEEVRKVRKPYTITKSRESWTEPEHDKFLEALQLFDRDWKKIEAYVGSKTVIQIRSHAQKYFLKVQKNGTGEHLPPPRPKRKAAHPYPQKSSKNVSQTILLQEQPTQREQGSVMPMDTATVINTNANVAVAVAVPSWDNTLAQSLSAGLVPGATNNCSSSIESPSGTWPTSEAVEQEIVVPSLHAMPDFARVYSFLGSIFDPDTSGHLQRLKVMDPIDIQTVLLLMRNLSTNLRSPDFEQHLWWWGPC

SEQ ID NO: 2717 - protein, 310 aa, Zea mays subsp. mays
  peptide (1)..(310): Ceres Seq. ID no. 13498542
  misc_feature (79)..(124): Pfam Name: Myb-like DNA-binding domain Pfam Description: Myb-like DNA-binding domain
  misc_feature (68)..(302): Homolog of NCBI NO: 15234118 NR Description: myb family transcription factor [Arabidopsis
  misc_feature (64)..(302): Homolog of NCBI NO: 15223419 NR Description: myb family transcription factor [Arabidopsis
  misc_feature (42)..(301): Homolog of NCBI NO: 14596213 NR Description: putative protein [Arabidopsis thaliana]
  misc_feature (42)..(301): Homolog of NCBI NO: 18414039 NR Description: myb family transcription factor [Arabidopsis
  misc_feature (216)..(301): Homolog of NCBI NO: 11357907 NR Description: hypothetical protein F9G14.150 - Arabidopsis
  misc_feature (42)..(200): Homolog of NCBI NO: 11357907 NR Description: hypothetical protein F9G14.150 - Arabidopsis
  misc_feature (45)..(301): Homolog of NCBI NO: 30680926 NR Description: myb family transcription factor [Arabidopsis
  misc_feature (51)..(303): Homolog of NCBI NO: 30696225 NR Description: myb family transcription factor [Arabidopsis
  misc_feature (51)..(304): Homolog of NCBI NO: 8953721 NR Description: contains similarity to MYB-related DNA-binding
  misc_feature (51)..(303): Homolog of NCBI NO: 30696221 NR Description: myb family transcription factor [Arabidopsis
MVSMNTTPNPLDSAAGSAAVAGGSVDEGGGGGGRKKRMRGAVAAAMVPPPMAVPLPAAAPAAGEEVRKVRKPYTITKSRESWTEPEHDKFLEALQLFDRDWKKIEAYVGSKTVIQIRSHAQKYFLKVQKNGTGEHLPPPRPKRKAAHPYPQKSSKNVSQTILLQEQPTQREQGSVMPMDTATVINTNANVAVAVAVPSWDNTLAQSLSAGLVPGATNNCSSSIESPSGTWPTSEAVEQEIVVPSLHAMPDFARVYSFLGSIFDPDTSGHLQRLKVMDPIDIQTVLLLMRNLSTNLRSPDFEQHLWWWGPC

SEQ ID NO: 2718 - protein, 307 aa, Zea mays subsp. mays
  peptide (1)..(307): Ceres Seq. ID no. 13498543
  misc_feature (76)..(121): Pfam Name: Myb-like DNA-binding domain Pfam Description: Myb-like DNA-binding domain
  misc_feature (65)..(299): Homolog of NCBI NO: 15234118 NR Description: myb family transcription factor [Arabidopsis
  misc_feature (61)..(299): Homolog of NCBI NO: 15223419 NR Description: myb family transcription factor [Arabidopsis
  misc_feature (39)..(298): Homolog of NCBI NO: 14596213 NR Description: putative protein [Arabidopsis thaliana]
  misc_feature (39)..(298): Homolog of NCBI NO: 18414039 NR Description: myb family transcription factor [Arabidopsis
  misc_feature (213)..(298): Homolog of NCBI NO: 11357907 NR Description: hypothetical protein F9G14.150 - Arabidopsis
  misc_feature (39)..(197): Homolog of NCBI NO: 11357907 NR Description: hypothetical protein F9G14.150 - Arabidopsis
  misc_feature (42)..(298): Homolog of NCBI NO: 30680926 NR Description: myb family transcription factor [Arabidopsis
  misc_feature (48)..(300): Homolog of NCBI NO: 30696225 NR Description: myb family transcription factor [Arabidopsis
  misc_feature (48)..(301): Homolog of NCBI NO: 8953721 NR Description: contains similarity to MYB-related DNA-binding
  misc_feature (48)..(300): Homolog of NCBI NO: 30696221 NR Description: myb family transcription factor [Arabidopsis
MNTTPNPLDSAAGSAAVAGGSVDEGGGGGGRKKRMRGAVAAAMVPPPMAVPLPAAAPAAGEEVRKVRKPYTITKSRESWTEPEHDKFLEALQLFDRDWKKIEAYVGSKTVIQIRSHAQKYFLKVQKNGTGEHLPPPRPKRKAAHPYPQKSSKNVSQTILLQEQPTQREQGSVMPMDTATVINTNANVAVAVAVPSWDNTLAQSLSAGLVPGATNNCSSSIESPSGTWPTSEAVEQEIVVPSLHAMPDFARVYSFLGSIFDPDTSGHLQRLKVMDPIDIQTVLLLMRNLSTNLRSPDFEQHLWWWGPC

SEQ ID NO: 2719 - DNA, 1544 bp, Zea mays subsp. mays
  misc_feature (1)..(1544): Ceres Seq. ID no. 12410573
  misc_feature: MA Experiment ID: 108536 Result: Down-regulated in Transcription
  misc_feature: MA Experiment 108536 PARAMETER Experiment Name: Zm_Meristem_P Parameter: Age (day) Value: 8
  misc_feature: MA Experiment 108536 PARAMETER Experiment Name: Zm_Meristem_P Parameter: Organism Value: Zea mays
  misc_feature: MA Experiment 108536 PARAMETER Experiment Name: Zm_Meristem_P Parameter: Plant Line Value: 35A19
  misc_feature: MA Experiment 108536 PARAMETER Experiment Name: Zm_Meristem_P Parameter: Tissue Value: Shoot Meristem vs. Above Shoot Meristem
  misc_feature: MA Experiment ID: 108544 Result: Down-regulated in Transcription
ctacgcgacacacacacaccatcactgcgctgcgctactctactccccaccaccgccgccacccaagagctttcctcgctgcacaagaaatggccacgaaccatctctcccaagggcagcacccgcaggcctggccctggggcgtggccatgtacaccaacctacactaccaccaccagcagcaccaccactacgagaaggagcacctgttcgagaagccgctgacgccgagcgacgtgggcaagctcaacaggctggtgatccccaagcagcacgccgagaggtacttccctctcagcagcagcggcgccggcgacaaaggcctcatcctgtgcttcgaggacgacgacgacgaggaggctgctgccgccaacaagccgtggcggttccgctactcgtactggaccagcagccagagctacgtgctcaccaagggctggagccgctacgtcaaggagaagcagcttgacgccggcgacgtcgtgcgcttccagaggatgcgtggtttcggcatgcccgaccgcctgttcatcagccacagccgccgcggcgagactactgctactgctgcaacaacagtgccaccgccacctgctgctgctgccgtgcgcgtagtagtggcacctgcacagagcgctggcttagagcaccagcagcagcagccgtcgccttggagcccaatgtgctacagcacatcgggctcgtactcgtacccccccaccagcagcccagccaattcccagcatgcctaccaccgccactcagctgaccatgaccacagcaacaacatgcaacatgcaggagaatctcagtccgacagagacaacaggagctgcagtgcagcttcggcaccgccgccgccgccgtcgcggcggctccggctgttcggcgtcaacctcgactgcgggccggggccggagccggagacaccaacggcgatgtacggctacatgcaccaaagcccctacgcttacaacaactggggcagtccataccagcatgacgaggagatttaagattatgcctgcagaatccaaacagccaaagtagtagcagactagtagttgctagcagcagcagcctagtactacttgcacacgaagtgacaggattgaattgacctgtacacggggagaaaaaaaaaggaaggaaggaagtggagagagatcccttgtttcccgggcaatcttccttccaagttccatccccgcccccagaagaatgctgctgcctttttgctgttccgttttttttaaaattttattttcttctccatggcttccagaaaaccctacttactgtaggggatctggtagcagggggccgggcatgcgtgggaggtttgcaggaagcatcaagctgcgaaggagctggaacgagagacaacagacagagagaaagatgtgtgtgtgtatgtatgtgtgtgtcatctgtacctatatgtcttaatttgtgggtccgatagagaacaaactgcgaagttgatgtgtgtgcctgcctgcctcctgaagaaacaatgcaatatccccatggggattttgttc

SEQ ID NO: 2720 - protein, 337 aa, Zea mays subsp. mays
  peptide (1)..(337): Ceres Seq. ID no. 12410574
  misc_feature (69)..(185): Pfam Name: B3 DNA binding domain Pfam Description: B3 DNA binding domain
  misc_feature (62)..(191): Homolog of NCBI NO: 15239984 NR Description: putative protein; protein id: At5g06250.1
  misc_feature (65)..(184): Homolog of NCBI NO: 32492293 NR Description: OSJNBa0088A01.1 [Oryza sativa (japonica
  misc_feature (65)..(302): Homolog of NCBI NO: 18407193 NR Description: putative RAV-like B3 domain DNA binding protein
  misc_feature (53)..(193): Homolog of NCBI NO: 30681791 NR Description: DNA-binding protein, putative [Arabidopsis
  misc_feature (53)..(193): Homolog of NCBI NO: 30681787 NR Description: DNA-binding protein, putative [Arabidopsis
  misc_feature (65)..(301): Homolog of NCBI NO: 37536454 NR Description: putative DNA-binding protein
  misc_feature (59)..(189): Homolog of NCBI NO: 25408446 NR Description: probable RAV2-like DNA binding protein
  misc_feature (30)..(189): Homolog of NCBI NO: 30686674 NR Description: DNA-binding protein, putative [Arabidopsis
  misc_feature (30)..(189): Homolog of NCBI NO: 30686669 NR Description: DNA-binding protein, putative [Arabidopsis
  misc_feature (65)..(301): Homolog of NCBI NO: 34902226 NR Description: Putative RAV-like B3 domain DNA binding protein
TRHTHTITALRYSTPHHRRHPRAFLAAQEMATNHLSQGQHPQAWPWGVAMYTNLHYHHQQHHHYEKEHLFEKPLTPSDVGKLNRLVIPKQHAERYFPLSSSGAGDKGLILCFEDDDDEEAAAANKPWRFRYSYWTSSQSYVLTKGWSRYVKEKQLDAGDVVRFQRMRGFGMPDRLFISHSRRGETTATAATTVPPPPAAAAVRVVVAPAQSAGLEHQQQQPSPWSPMCYSTSGSYSYPPTSSPANSQHAYHRHSADHDHSNNMQHAGESQSDRDNRSCSAASAPPPPPSRRLRLFGVNLDCGPGPEPETPTAMYGYMHQSPYAYNNWGSPYQHDEEI

SEQ ID NO: 2721 - protein, 308 aa, Zea mays subsp. mays
  peptide (1)..(308): Ceres Seq. ID no. 12410575
  misc_feature (40)..(156): Pfam Name: B3 DNA binding domain Pfam Description: B3 DNA binding domain
  misc_feature (1)..(160): Homolog of NCBI NO: 30686674 NR Description: DNA-binding protein, putative [Arabidopsis
  misc_feature (1)..(160): Homolog of NCBI NO: 30686669 NR Description: DNA-binding protein, putative [Arabidopsis
  misc_feature (36)..(155): Homolog of NCBI NO: 32492293 NR Description: OSJNBa0088A01.1 [Oryza sativa (japonica
  misc_feature (24)..(164): Homolog of NCBI NO: 30681791 NR Description: DNA-binding protein, putative [Arabidopsis
  misc_feature (36)..(272): Homolog of NCBI NO: 37536454 NR Description: putative DNA-binding protein
  misc_feature (30)..(160): Homolog of NCBI NO: 25408446 NR Description: probable RAV2-like DNA binding protein
  misc_feature (24)..(164): Homolog of NCBI NO: 30681787 NR Description: DNA-binding protein, putative [Arabidopsis
  misc_feature (36)..(273): Homolog of NCBI NO: 18407193 NR Description: putative RAV-like B3 domain DNA binding protein
  misc_feature (33)..(162): Homolog of NCBI NO: 15239984 NR Description: putative protein; protein id: At5g06250.1
  misc_feature (36)..(272): Homolog of NCBI NO: 34902226 NR Description: Putative RAV-like B3 domain DNA binding protein
MATNHLSQGQHPQAWPWGVAMYTNLHYHHQQHHHYEKEHLFEKPLTPSDVGKLNRLVIPKQHAERYFPLSSSGAGDKGLILCFEDDDDEEAAAANKPWRFRYSYWTSSQSYVLTKGWSRYVKEKQLDAGDVVRFQRMRGFGMPDRLFISHSRRGETTATAATTVPPPPAAAAVRVVVAPAQSAGLEHQQQQPSPWSPMCYSTSGSYSYPPTSSPANSQHAYHRHSADHDHSNNMQHAGESQSDRDNRSCSAASAPPPPPSRRLRLFGVNLDCGPGPEPETPTAMYGYMHQSPYAYNNWGSPYQHDEEI

SEQ ID NO: 2722 - protein, 288 aa, Zea mays subsp. mays
  peptide (1)..(288): Ceres Seq. ID no. 12410576
  misc_feature (20)..(136): Pfam Name: B3 DNA binding domain Pfam Description: B3 DNA binding domain
  misc_feature (13)..(142): Homolog of NCBI NO: 15239984 NR Description: putative protein; protein id: At5g06250.1
  misc_feature (16)..(135): Homolog of NCBI NO: 32492293 NR Description: OSJNBa0088A01.1 [Oryza sativa (japonica
  misc_feature (16)..(253): Homolog of NCBI NO: 18407193 NR Description: putative RAV-like B3 domain DNA binding protein
  misc_feature (4)..(144): Homolog of NCBI NO: 30681791 NR Description: DNA-binding protein, putative [Arabidopsis
  misc_feature (4)..(144): Homolog of NCBI NO: 30681787 NR Description: DNA-binding protein, putative [Arabidopsis
  misc_feature (16)..(252): Homolog of NCBI NO: 37536454 NR Description: putative DNA-binding protein
  misc_feature (10)..(140): Homolog of NCBI NO: 25408446 NR Description: probable RAV2-like DNA binding protein
  misc_feature (1)..(140): Homolog of NCBI NO: 30686674 NR Description: DNA-binding protein, putative [Arabidopsis
  misc_feature (1)..(140): Homolog of NCBI NO: 30686669 NR Description: DNA-binding protein, putative [Arabidopsis
  misc_feature (16)..(252): Homolog of NCBI NO: 34902226 NR Description: Putative RAV-like B3 domain DNA binding protein
MYTNLHYHHQQHHHYEKEHLFEKPLTPSDVGKLNRLVIPKQHAERYFPLSSSGAGDKGLILCFEDDDDEEAAAANKPWRFRYSYWTSSQSYVLTKGWSRYVKEKQLDAGDVVRFQRMRGFGMPDRLFISHSRRGETTATAATTVPPPPAAAAVRVVVAPAQSAGLEHQQQQPSPWSPMCYSTSGSYSYPPTSSPANSQHAYHRHSADHDHSNNMQHAGESQSDRDNRSCSAASAPPPPPSRRLRLFGVNLDCGPGPEPETPTAMYGYMHQSPYAYNNWGSPYQHDEEI

SEQ ID NO: 2723 - DNA, 1532 bp, Zea mays subsp. mays
  misc_feature (1)..(1532): Ceres Seq. ID no. 12362073
  misc_feature: MA Experiment ID: 108535 Result: Up-regulated in Transcription
  misc_feature: MA Experiment 108535 PARAMETER Experiment Name: Zm_Meristem_P Parameter: Age (day) Value: 8
  misc_feature: MA Experiment 108535 PARAMETER Experiment Name: Zm_Meristem_P Parameter: Organism Value: Zea mays
  misc_feature: MA Experiment 108535 PARAMETER Experiment Name: Zm_Meristem_P Parameter: Plant Line Value: 35A19
  misc_feature: MA Experiment 108535 PARAMETER Experiment Name: Zm_Meristem_P Parameter: Tissue Value: Root Meristem vs. Above Root Meristem
  misc_feature: MA Experiment ID: 108544 Result: Down-regulated in Transcription
  misc_feature: MA Experiment ID: 108689 Result: Down-regulated in Transcription
  misc_feature: MA Experiment 108689 PARAMETER Experiment Name: Zm_Drought_Roots_P Parameter: Age (day) Value: 9
  misc_feature: MA Experiment 108689 PARAMETER Experiment Name: Zm_Drought_Roots_P Parameter: Organism Value: Zea mays
  misc_feature: MA Experiment 108689 PARAMETER Experiment Name: Zm_Drought_Roots_P Parameter: Plant Line Value: 35A19
  misc_feature: MA Experiment 108689 PARAMETER Experiment Name: Zm_Drought_Roots_P Parameter: Timepoint (hr) Value: 24
  misc_feature: MA Experiment 108689 PARAMETER Experiment Name: Zm_Drought_Roots_P Parameter: Tissue Value: Roots
  misc_feature: MA Experiment 108689 PARAMETER Experiment Name: Zm_Drought_Roots_P Parameter: Treatment Value: Drought vs. No Drought
  misc_feature: MA Experiment ID: 20000480 Result: Down-regulated in Transcription
  misc_feature: MA Experiment 20000480 PARAMETER Experiment Name: Zm_Drought_P Parameter: Age (day) Value: 11
  misc_feature: MA Experiment 20000480 PARAMETER Experiment Name: Zm_Drought_P Parameter: Organism Value: Zea mays
  misc_feature: MA Experiment 20000480 PARAMETER Experiment Name: Zm_Drought_P Parameter: Plant Line Value: 35A19
  misc_feature: MA Experiment 20000480 PARAMETER Experiment Name: Zm_Drought_P Parameter: Timepoint (hr) Value: 72
  misc_feature: MA Experiment 20000480 PARAMETER Experiment Name: Zm_Drought_P Parameter: Tissue Value: Aerial
  misc_feature: MA Experiment 20000480 PARAMETER Experiment Name: Zm_Drought_P Parameter: Treatment Value: Drought vs. No Drought
gcgttattttgtttgccaacccacagaaaaaggcggcagttcatccgctgctgttcctagttctctccacccagaagtcgacctcgttttttcctccctcctgtcccaaatctcacctccttccagttccagctaccgctgctcgcgttgactcgcctcttcctccattcagtgactccttggatcggctcagggacacgcaccagcgtattgtgtcggcgccgaatcttgcgcgcatttcgcgctattgttgccccggaggagtggtttggatccaagaaagtgatcggccttcttggttggatctcctcccgcaatggcggcgctcctggagctgttcctgggctcctctcccacgccggtggactgggaggcagaggtctacccggcgtacggggacttcgccgtactccccttactcgtcgccttcttccccgccgtccggttcctcctcgaccgactcgtcttcgaggttttagcacgaaaatttatatttggaaagggacatgataagctttctgaaacagatgacagtagaaagaaaatcaataaatttaaggaatcagcatggaagtttgttttttttctttctggcgaactgctttcactatctgtaacatacaatgagccatggtttaagaacacaagatacttttggataggccctggtgaccagatctggcctgatcaaaagataaaactgaagctcaaagctgtctacatgtatgctgctggattttacacatattcaattttcgctctcctgttctgggaaacaagacgttcggactttggagtatcaatgtcccaccatatagcaactgttgttctgattattctttcctacattttccgattcgctcgtgttggcactgttgttttagcccttcatgatgcaagtgatatattcctagagattgggaagatggccaagtacagtagctgcgagtggctagcagttatggcatttcttctttttgtggcatcgtggatacttcttcggctcgttatgttccctttctggatcctaagaagcacaagctatgaagtgctgctgaccttggatagggagaagcatcgattttatggccccatatactactatgttttcaactgtcttctgttctcactcctagttcttcacatatatttgtgggtactgatatggcggatgctagttaaacagattcaatcgaaagggcgtgttggtgatgatgttcgatccgattctgaaggcgaagatgagcatgaagattaactttttaggttgaatgattaactgaagaactacattgtgtgatacctgcagcaaggcacaccttctgaaccttttttttttcttttacagaagatatccagatattgtaattcattaggtcatatcattcgttcagcatagaagatgacaaccatcatttgggagttgtcaatgaagccgcctatcggatgctttttatcaaaacagaagtgcattgtatttatttcactaaaccatcatttataagagatacagaatgatcccttgttcatcc

SEQ ID NO: 2724 - protein, 313 aa, Zea mays subsp. mays
  peptide (1)..(313): Ceres Seq. ID no. 12362074
  misc_feature (98)..(310): Pfam Name: Longevity-assurance protein (LAG1) Pfam Description: Longevity-assurance protein (LAG1)
  misc_feature (77)..(313): Homolog of NCBI NO: 27769146 NR Description: Similar to RIKEN cDNA 0610013I17 gene [Xenopus
  misc_feature (16)..(128): Homolog of NCBI NO: 8920562 NR Description: Contains similarity to LAG1 homolog 1 from
  misc_feature (38)..(310): Homolog of NCBI NO: 7658241 NR Description: LAG1 homolog 2 [Arabidopsis thaliana]
  misc_feature (24)..(309): Homolog of NCBI NO: 34901974 NR Description: unknown protein [Oryza sativa (japonica
  misc_feature (38)..(310): Homolog of NCBI NO: 15230323 NR Description: longevity factor-like protein
  misc_feature (16)..(243): Homolog of NCBI NO: 30683361 NR Description: longevity assurance protein -related [Arabidopsis
  misc_feature (16)..(313): Homolog of NCBI NO: 7688742 NR Description: ASC1 [Lycopersicon esculentum]
  misc_feature (9)..(313): Homolog of NCBI NO: 18404559 NR Description: expressed protein
  misc_feature (16)..(313): Homolog of NCBI NO: 25518747 NR Description: hypothetical protein F13B4.7 - Arabidopsis
  misc_feature (14)..(313): Homolog of NCBI NO: 16974114 NR Description: putative resistance protein [Lycopersicon
MAALLELFLGSSPTPVDWEAEVYPAYGDFAVLPLLVAFFPAVRFLLDRLVFEVLARKFIFGKGHDKLSETDDSRKKINKFKESAWKFVFFLSGELLSLSVTYNEPWFKNTRYFWIGPGDQIWPDQKIKLKLKAVYMYAAGFYTYSIFALLFWETRRSDFGVSMSHHIATVVLIILSYIFRFARVGTVVLALHDASDIFLEIGKMAKYSSCEWLAVMAFLLFVASWILLRLVMFPFWILRSTSYEVLLTLDREKHRFYGPIYYYVFNCLLFSLLVLHIYLWVLIWRMLVKQIQSKGRVGDDVRSDSEGEDEHED

SEQ ID NO: 2725 - protein, 178 aa, Zea mays subsp. mays
  peptide (1)..(178): Ceres Seq. ID no. 12362075
  misc_feature (1)..(175): Pfam Name: Longevity-assurance protein (LAG1) Pfam Description: Longevity-assurance protein (LAG1)
  misc_feature (1)..(178): Homolog of NCBI NO: 24119257 NR Description: trh3 protein [Danio rerio]
  misc_feature (1)..(178): Homolog of NCBI NO: 27769146 NR Description: Similar to RIKEN cDNA 0610013I17 gene [Xenopus
  misc_feature (1)..(175): Homolog of NCBI NO: 7658241 NR Description: LAG1 homolog 2 [Arabidopsis thaliana]
  misc_feature (1)..(174): Homolog of NCBI NO: 34901974 NR Description: unknown protein [Oryza sativa (japonica
  misc_feature (1)..(175): Homolog of NCBI NO: 15230323 NR Description: longevity factor-like protein
  misc_feature (1)..(108): Homolog of NCBI NO: 30683361 NR Description: longevity assurance protein -related [Arabidopsis
  misc_feature (1)..(178): Homolog of NCBI NO: 7688742 NR Description: ASC1 [Lycopersicon esculentum]
  misc_feature (1)..(178): Homolog of NCBI NO: 18404559 NR Description: expressed protein
  misc_feature (1)..(178): Homolog of NCBI NO: 25518747 NR Description: hypothetical protein F13B4.7 - Arabidopsis
  misc_feature (1)..(178): Homolog of NCBI NO: 16974114 NR Description: putative resistance protein [Lycopersicon
MYAAGFYTYSIFALLFWETRRSDFGVSMSHHIATVVLIILSYIFRFARVGTVVLALHDASDIFLEIGKMAKYSSCEWLAVMAFLLFVASWILLRLVMFPFWILRSTSYEVLLTLDREKHRFYGPIYYYVFNCLLFSLLVLHIYLWVLIWRMLVKQIQSKGRVGDDVRSDSEGEDEHED

SEQ ID NO: 2726 - protein, 158 aa, Zea mays subsp. mays
  peptide (1)..(158): Ceres Seq. ID no. 12362076
VILFANPQKKAAVHPLLFLVLSTQKSTSFFPPSCPKSHLLPVPATAARVDSPLPPFSDSLDRLRDTHQRIVSAPNLARISRYCCPGGVVWIQESDRPSWLDLLPQWRRSWSCSWAPLPRRWTGRQRSTRRTGTSPYSPYSSPSSPPSGSSSTDSSSRF

SEQ ID NO: 2727 - DNA, 1442 bp, Zea mays subsp. mays
  misc_feature (1)..(1442): Ceres Seq. ID no. 12566169
  misc_feature: MA Experiment ID: 108523 Result: Up-regulated in Transcription
  misc_feature: MA Experiment 108523 PARAMETER Experiment Name: Zm_42deg_Heat_P Parameter: Age (day) Value: 8
  misc_feature: MA Experiment 108523 PARAMETER Experiment Name: Zm_42deg_Heat_P Parameter: Organism Value: Zea mays
  misc_feature: MA Experiment 108523 PARAMETER Experiment Name: Zm_42deg_Heat_P Parameter: Plant Line Value: 35A19
  misc_feature: MA Experiment 108523 PARAMETER Experiment Name: Zm_42deg_Heat_P Parameter: Temperature (deg C) Value: 42 vs. 22
  misc_feature: MA Experiment 108523 PARAMETER Experiment Name: Zm_42deg_Heat_P Parameter: Timepoint (hr) Value: 6
  misc_feature: MA Experiment 108523 PARAMETER Experiment Name: Zm_42deg_Heat_P Parameter: Tissue Value: Aerial
  misc_feature: MA Experiment ID: 108529 Result: Up-regulated in Transcription
  misc_feature: MA Experiment 108529 PARAMETER Experiment Name: Zm_Imbibed_Seeds_P Parameter: Age (day) Value: 5 vs. 2
  misc_feature: MA Experiment 108529 PARAMETER Experiment Name: Zm_Imbibed_Seeds_P Parameter: Organism Value: Zea mays
  misc_feature: MA Experiment 108529 PARAMETER Experiment Name: Zm_Imbibed_Seeds_P Parameter: Plant Line Value: 35A19
  misc_feature: MA Experiment 108529 PARAMETER Experiment Name: Zm_Imbibed_Seeds_P Parameter: Tissue Value: Roots vs. Embryo
  misc_feature: MA Experiment ID: 108533 Result: Down-regulated in Transcription
  misc_feature: MA Experiment 108533 PARAMETER Experiment Name: Zm_4deg_Cold_P Parameter: Age (hr) Value: 8
  misc_feature: MA Experiment 108533 PARAMETER Experiment Name: Zm_4deg_Cold_P Parameter: Organism Value: Zea mays
  misc_feature: MA Experiment 108533 PARAMETER Experiment Name: Zm_4deg_Cold_P Parameter: Plant Line Value: 35A19
  misc_feature: MA Experiment 108533 PARAMETER Experiment Name: Zm_4deg_Cold_P Parameter: Temperature (deg C) Value: 4 vs. 22
  misc_feature: MA Experiment 108533 PARAMETER Experiment Name: Zm_4deg_Cold_P Parameter: Timepoint (hr) Value: 1
  misc_feature: MA Experiment 108533 PARAMETER Experiment Name: Zm_4deg_Cold_P Parameter: Tissue Value: Aerial
  misc_feature: MA Experiment ID: 108535 Result: Down-regulated in Transcription
  misc_feature: MA Experiment 108535 PARAMETER Experiment Name: Zm_Meristem_P Parameter: Age (day) Value: 8
  misc_feature: MA Experiment 108535 PARAMETER Experiment Name: Zm_Meristem_P Parameter: Organism Value: Zea mays
  misc_feature: MA Experiment 108535 PARAMETER Experiment Name: Zm_Meristem_P Parameter: Plant Line Value: 35A19
  misc_feature: MA Experiment 108535 PARAMETER Experiment Name: Zm_Meristem_P Parameter: Tissue Value: Root Meristem vs. Above Root Meristem
  misc_feature: MA Experiment ID: 108543 Result: Down-regulated in Transcription
  misc_feature: MA Experiment ID: 108544 Result: Down-regulated in Transcription
  misc_feature: MA Experiment ID: 108545 Result: Down-regulated in Transcription
  misc_feature: MA Experiment 108545 PARAMETER Experiment Name: Zm_Imbibed_Seeds_P Parameter: Age (day) Value: 3 vs. 2
  misc_feature: MA Experiment 108545 PARAMETER Experiment Name: Zm_Imbibed_Seeds_P Parameter: Organism Value: Zea mays
  misc_feature: MA Experiment 108545 PARAMETER Experiment Name: Zm_Imbibed_Seeds_P Parameter: Plant Line Value: 35A19
  misc_feature: MA Experiment 108545 PARAMETER Experiment Name: Zm_Imbibed_Seeds_P Parameter: Tissue Value: Aerial vs. Embryo
  misc_feature: MA Experiment ID: 108546 Result: Up-regulated in Transcription
  misc_feature: MA Experiment 108546 PARAMETER Experiment Name: Zm_Imbibed_Seeds_P Parameter: Age (day) Value: 3 vs. 2
  misc_feature: MA Experiment 108546 PARAMETER Experiment Name: Zm_Imbibed_Seeds_P Parameter: Organism Value: Zea mays
  misc_feature: MA Experiment 108546 PARAMETER Experiment Name: Zm_Imbibed_Seeds_P Parameter: Plant Line Value: 35A19
  misc_feature: MA Experiment 108546 PARAMETER Experiment Name: Zm_Imbibed_Seeds_P Parameter: Tissue Value: Roots vs. Embryo
  misc_feature: MA Experiment ID: 20000108 Result: Down-regulated in Transcription
  misc_feature: MA Experiment 20000108 PARAMETER Experiment Name: Zm_Root-Tips_P Parameter: Age (day) Value: 12
  misc_feature: MA Experiment 20000108 PARAMETER Experiment Name: Zm_Root-Tips_P Parameter: Organism Value: Zea mays
  misc_feature: MA Experiment 20000108 PARAMETER Experiment Name: Zm_Root-Tips_P Parameter: Tissue Value: Root tips vs. Root mid region    35
  misc_feature: MA Experiment 20000108 PARAMETER Experiment Name: Zm_Root-Tips_P Parameter: Tissue Value: Root tips vs. Root mid region   Sequence Listing-Misc Features (4)
  misc_feature: MA Experiment ID: 20001612 Result: Up-regulated in Transcription
  misc_feature: MA Experiment 20001612 PARAMETER Experiment Name: Zm_50ppm_KNO3_L-to-H_P Parameter: Age (day) Value: 19
  misc_feature: MA Experiment 20001612 PARAMETER Experiment Name: Zm_50ppm_KNO3_L-to-H_P Parameter: Organism Value: Zea mays
  misc_feature: MA Experiment 20001612 PARAMETER Experiment Name: Zm_50ppm_KNO3_L-to-H_P Parameter: Plant Line Value: 35A19
  misc_feature: MA Experiment 20001612 PARAMETER Experiment Name: Zm_50ppm_KNO3_L-to-H_P Parameter: Timepoint (hr) Value: 8
  misc_feature: MA Experiment 20001612 PARAMETER Experiment Name: Zm_50ppm_KNO3_L-to-H_P Parameter: Tissue Value: Roots
  misc_feature: MA Experiment 20001612 PARAMETER Experiment Name: Zm_50ppm_KNO3_L-to-H_P Parameter: Treatment Value: 50ppm KNO3 vs. 50ppm KCl
ctcgcccgttgcctgctctgtgccttatataaacgcagcagagcacggcagccggaagggagttcagacatcaatcaggcggaggagagaaactcccggccatttccaagcacaagaagtgggaagagagaacaggagggcgctgagctctctgatcgctgttctgagtggtggcggctgcagctgcccgcgcggcgaagatggctgcgccatggcttcttgcttgcagcttgctgctgctctccctggcgacctttcacggagctgagggcgcgatcggcgtgaactacggcatgatcgccaacaacctgccggcgccggagcaggtcgtctccatgtacaaggccaagaatatcagctacgtgcgtctgttccacccggacacgaccgtgctgaacgcgctccgcggctccggcatcggtgtcatcctgggcacgctgaacgaggacctcccgcgcctggcgtccgacccgtccttcgccgcgtcgtgggtggccaccaacgtgcagcccttcgccggcgctgtccagttccggtacatcaacgcgggcaacgaggtcatcccgggggacccggcggcgcaggtgctcccggccatgaagaacctggagtcggcgctccggtccgcgggggtcgcgggcgtccccgtcacgacggccgtggccaccagcgtgctcggcgcgtcgtacccgccgtcccagggcgccttctccgaggcggccacgacggtgatggcgccgctcgtctcgtacctgtcgtccaggggcgcgccgctgctggtgaacgtgtacccgtacttcgcctactcgggcagcggcgggcaggtggcgctcgggtacgcgctgctgtcgggcgccggcgccggcgccgcgtcgacggtgacggacggcggggcggtgtacactaacatgttcgacgcgatcgtggacgcgacgcacgcggcggtggagaaggccggggtgcaggggctggagctggtggtgtcggagaccggctggccgtcggccggcggcgagggcgccagcgtggagaacgcggcggcgtacaacaacaacgtggtgcggcacgtcgacggcggcacccctcggcggcccgggaatgccctggagacctacctgttcgccatgttcaacgagaacggcaaggccgagggcgtggagcagcacttcggcctcttccagccggacatgagcgaggtctaccacgtcgacttcacggcgggatccccctagggaggctcacccgcttctgtgtttactttatttatgtagtaggaatgatcattcttcattcagagactgatcgacttcatcggagctgctcgatactcgagcggcgcggataggcttactgcgtactggtagtattgttggagacttggagtagcattactatcgacgtgattcattacagtgcatgtcgttacacggcgccatggattt

SEQ ID NO: 2728 - protein, 343 aa, Zea mays subsp. mays
  peptide (1)..(343): Ceres Seq. ID no. 12566170
  misc_feature (28)..(338): Pfam Name: Glycosyl hydrolases family 17 Pfam Description: Glycosyl hydrolases family 17
  misc_feature (3)..(338): Homolog of NCBI NO: 34906502 NR Description: putative beta 1,3-glucanase
  misc_feature (25)..(338): Homolog of NCBI NO: 6448757 NR Description: beta-1,3-glucanase [Musa acuminata]
  misc_feature (25)..(338): Homolog of NCBI NO: 6073860 NR Description: beta-1, 3-glucananse [Musa acuminata]
  misc_feature (26)..(342): Homolog of NCBI NO: 322839 NR Description: glucan endo-1,3-beta-D-glucosidase (EC 3.2.1.39)
  misc_feature (21)..(342): Homolog of NCBI NO: 585078 NR Description: PUTATIVE GLUCAN ENDO-1,3-BETA-GLUCOSIDASE GVI
  misc_feature (12)..(340): Homolog of NCBI NO: 4097944 NR Description: beta-1,3-glucanase precursor [Oryza sativa]
  misc_feature (12)..(340): Homolog of NCBI NO: 34908958 NR Description: beta-1,3-glucanase precursor
  misc_feature (25)..(342): Homolog of NCBI NO: 7447972 NR Description: glucan endo-1,3-beta-D-glucosidase (EC 3.2.1.39)
  misc_feature (22)..(337): Homolog of NCBI NO: 4097946 NR Description: beta-1,3-glucanase precursor [Oryza sativa]
  misc_feature (28)..(342): Homolog of NCBI NO: 4884532 NR Description: beta-1,3-glucanase [Oryza sativa]
MAAPWLLACSLLLLSLATFHGAEGAIGVNYGMIANNLPAPEQVVSMYKAKNISYVRLFHPDTTVLNALRGSGIGVILGTLNEDLPRLASDPSFAASWVATNVQPFAGAVQFRYINAGNEVIPGDPAAQVLPAMKNLESALRSAGVAGVPVTTAVATSVLGASYPPSQGAFSEAATTVMAPLVSYLSSRGAPLLVNVYPYFAYSGSGGQVALGYALLSGAGAGAASTVTDGGAVYTNMFDAIVDATHAAVEKAGVQGLELVVSETGWPSAGGEGASVENAAAYNNNVVRHVDGGTPRRPGNALETYLFAMFNENGKAEGVEQHFGLFQPDMSEVYHVDFTAGSP

SEQ ID NO: 2729 - protein, 312 aa, Zea mays subsp. mays
  peptide (1)..(312): Ceres Seq. ID no. 12566171
  misc_feature (1)..(307): Pfam Name: Glycosyl hydrolases family 17 Pfam Description: Glycosyl hydrolases family 17
  misc_feature (1)..(307): Homolog of NCBI NO: 34906502 NR Description: putative beta 1,3-glucanase
  misc_feature (1)..(307): Homolog of NCBI NO: 6448757 NR Description: beta-1,3-glucanase [Musa acuminata]
  misc_feature (1)..(307): Homolog of NCBI NO: 6073860 NR Description: beta-1, 3-glucananse [Musa acuminata]
  misc_feature (1)..(311): Homolog of NCBI NO: 322839 NR Description: glucan endo-1,3-beta-D-glucosidase (EC 3.2.1.39)
  misc_feature (1)..(311): Homolog of NCBI NO: 585078 NR Description: PUTATIVE GLUCAN ENDO-1,3-BETA-GLUCOSIDASE GVI
  misc_feature (1)..(309): Homolog of NCBI NO: 4097944 NR Description: beta-1,3-glucanase precursor [Oryza sativa]
  misc_feature (1)..(309): Homolog of NCBI NO: 34908958 NR Description: beta-1,3-glucanase precursor
  misc_feature (1)..(311): Homolog of NCBI NO: 7447972 NR Description: glucan endo-1,3-beta-D-glucosidase (EC 3.2.1.39)
  misc_feature (1)..(306): Homolog of NCBI NO: 4097946 NR Description: beta-1,3-glucanase precursor [Oryza sativa]
  misc_feature (1)..(311): Homolog of NCBI NO: 4884532 NR Description: beta-1,3-glucanase [Oryza sativa]
MIANNLPAPEQVVSMYKAKNISYVRLFHPDTTVLNALRGSGIGVILGTLNEDLPRLASDPSFAASWVATNVQPFAGAVQFRYINAGNEVIPGDPAAQVLPAMKNLESALRSAGVAGVPVTTAVATSVLGASYPPSQGAFSEAATTVMAPLVSYLSSRGAPLLVNVYPYFAYSGSGGQVALGYALLSGAGAGAASTVTDGGAVYTNMFDAIVDATHAAVEKAGVQGLELVVSETGWPSAGGEGASVENAAAYNNNVVRHVDGGTPRRPGNALETYLFAMFNENGKAEGVEQHFGLFQPDMSEVYHVDFTAGSP

SEQ ID NO: 2730 - protein, 298 aa, Zea mays subsp. mays
  peptide (1)..(298): Ceres Seq. ID no. 12566172
  misc_feature (1)..(293): Pfam Name: Glycosyl hydrolases family 17 Pfam Description: Glycosyl hydrolases family 17
  misc_feature (1)..(293): Homolog of NCBI NO: 34906502 NR Description: putative beta 1,3-glucanase
  misc_feature (1)..(293): Homolog of NCBI NO: 6448757 NR Description: beta-1,3-glucanase [Musa acuminata]
  misc_feature (1)..(293): Homolog of NCBI NO: 6073860 NR Description: beta-1, 3-glucananse [Musa acuminata]
  misc_feature (1)..(297): Homolog of NCBI NO: 322839 NR Description: glucan endo-1,3-beta-D-glucosidase (EC 3.2.1.39)
  misc_feature (1)..(297): Homolog of NCBI NO: 585078 NR Description: PUTATIVE GLUCAN ENDO-1,3-BETA-GLUCOSIDASE GVI
  misc_feature (1)..(295): Homolog of NCBI NO: 4097944 NR Description: beta-1,3-glucanase precursor [Oryza sativa]
  misc_feature (1)..(295): Homolog of NCBI NO: 34908958 NR Description: beta-1,3-glucanase precursor
  misc_feature (1)..(297): Homolog of NCBI NO: 7447972 NR Description: glucan endo-1,3-beta-D-glucosidase (EC 3.2.1.39)
  misc_feature (1)..(292): Homolog of NCBI NO: 4097946 NR Description: beta-1,3-glucanase precursor [Oryza sativa]
  misc_feature (1)..(297): Homolog of NCBI NO: 4884532 NR Description: beta-1,3-glucanase [Oryza sativa]
MYKAKNISYVRLFHPDTTVLNALRGSGIGVILGTLNEDLPRLASDPSFAASWVATNVQPFAGAVQFRYINAGNEVIPGDPAAQVLPAMKNLESALRSAGVAGVPVTTAVATSVLGASYPPSQGAFSEAATTVMAPLVSYLSSRGAPLLVNVYPYFAYSGSGGQVALGYALLSGAGAGAASTVTDGGAVYTNMFDAIVDATHAAVEKAGVQGLELVVSETGWPSAGGEGASVENAAAYNNNVVRHVDGGTPRRPGNALETYLFAMFNENGKAEGVEQHFGLFQPDMSEVYHVDFTAGSP

SEQ ID NO: 2731 - DNA, 1486 bp, Zea mays subsp. mays
  misc_feature (1)..(1486): Ceres Seq. ID no. 12352115
  misc_feature: MA Experiment ID: 108527 Result: Up-regulated in Transcription
  misc_feature: MA Experiment 108527 PARAMETER Experiment Name: Zm_5mM_NO_P Parameter: Age (day) Value: 8
  misc_feature: MA Experiment 108527 PARAMETER Experiment Name: Zm_5mM_NO_P Parameter: Organism Value: Zea mays
  misc_feature: MA Experiment 108527 PARAMETER Experiment Name: Zm_5mM_NO_P Parameter: Plant Line Value: 35A19
  misc_feature: MA Experiment 108527 PARAMETER Experiment Name: Zm_5mM_NO_P Parameter: Timepoint (hr) Value: 6
  misc_feature: MA Experiment 108527 PARAMETER Experiment Name: Zm_5mM_NO_P Parameter: Tissue Value: Aerial
  misc_feature: MA Experiment 108527 PARAMETER Experiment Name: Zm_5mM_NO_P Parameter: Treatment Value: 5mM NO vs. No Treatment
  misc_feature: MA Experiment ID: 108535 Result: Down-regulated in Transcription
  misc_feature: MA Experiment 108535 PARAMETER Experiment Name: Zm_Meristem_P Parameter: Age (day) Value: 8
  misc_feature: MA Experiment 108535 PARAMETER Experiment Name: Zm_Meristem_P Parameter: Organism Value: Zea mays
  misc_feature: MA Experiment 108535 PARAMETER Experiment Name: Zm_Meristem_P Parameter: Plant Line Value: 35A19
  misc_feature: MA Experiment 108535 PARAMETER Experiment Name: Zm_Meristem_P Parameter: Tissue Value: Root Meristem vs. Above Root Meristem
  misc_feature: MA Experiment ID: 108542 Result: Up-regulated in Transcription
  misc_feature: MA Experiment 108542 PARAMETER Experiment Name: Zm_150mM_NaCl_P Parameter: Age (day) Value: 8
  misc_feature: MA Experiment 108542 PARAMETER Experiment Name: Zm_150mM_NaCl_P Parameter: Organism Value: Zea mays
  misc_feature: MA Experiment 108542 PARAMETER Experiment Name: Zm_150mM_NaCl_P Parameter: Plant Line Value: 35A19
  misc_feature: MA Experiment 108542 PARAMETER Experiment Name: Zm_150mM_NaCl_P Parameter: Timepoint (hr) Value: 6
  misc_feature: MA Experiment 108542 PARAMETER Experiment Name: Zm_150mM_NaCl_P Parameter: Tissue Value: Aerial
  misc_feature: MA Experiment 108542 PARAMETER Experiment Name: Zm_150mM_NaCl_P Parameter: Treatment Value: 150mM NaCl vs. No Treatment
  misc_feature: MA Experiment ID: 108543 Result: Down-regulated in Transcription
  misc_feature: MA Experiment ID: 108544 Result: Down-regulated in Transcription
  misc_feature: MA Experiment ID: 108556 Result: Up-regulated in Transcription
  misc_feature: MA Experiment 108556 PARAMETER Experiment Name: Zm_Drought_P Parameter: Age (day) Value: 9
  misc_feature: MA Experiment 108556 PARAMETER Experiment Name: Zm_Drought_P Parameter: Organism Value: Zea mays
  misc_feature: MA Experiment 108556 PARAMETER Experiment Name: Zm_Drought_P Parameter: Plant Line Value: 35A19
  misc_feature: MA Experiment 108556 PARAMETER Experiment Name: Zm_Drought_P Parameter: Timepoint (hr) Value: 24
  misc_feature: MA Experiment 108556 PARAMETER Experiment Name: Zm_Drought_P Parameter: Tissue Value: Aerial
  misc_feature: MA Experiment 108556 PARAMETER Experiment Name: Zm_Drought_P Parameter: Treatment Value: Drought vs. No Drought
  misc_feature: MA Experiment ID: 108559 Result: Up-regulated in Transcription
  misc_feature: MA Experiment 108559 PARAMETER Experiment Name: Zm_5mM_NO_P Parameter: Age (day) Value: 8
  misc_feature: MA Experiment 108559 PARAMETER Experiment Name: Zm_5mM_NO_P Parameter: Organism Value: Zea mays
  misc_feature: MA Experiment 108559 PARAMETER Experiment Name: Zm_5mM_NO_P Parameter: Plant Line Value: 35A19
  misc_feature: MA Experiment 108559 PARAMETER Experiment Name: Zm_5mM_NO_P Parameter: Timepoint (hr) Value: 12
  misc_feature: MA Experiment 108559 PARAMETER Experiment Name: Zm_5mM_NO_P Parameter: Tissue Value: Aerial
  misc_feature: MA Experiment 108559 PARAMETER Experiment Name: Zm_5mM_NO_P Parameter: Treatment Value: 5mM NO vs. No Treatment
  misc_feature: MA Experiment ID: 20000108 Result: Down-regulated in Transcription
  misc_feature: MA Experiment 20000108 PARAMETER Experiment Name: Zm_Root-Tips_P Parameter: Age (day) Value: 12
  misc_feature: MA Experiment 20000108 PARAMETER Experiment Name: Zm_Root-Tips_P Parameter: Organism Value: Zea mays
  misc_feature: MA Experiment 20000108 PARAMETER Experiment Name: Zm_Root-Tips_P Parameter: Tissue Value: Root tips vs. Root mid region    35
  misc_feature: MA Experiment 20000108 PARAMETER Experiment Name: Zm_Root-Tips_P Parameter: Tissue Value: Root tips vs. Root mid region   Sequence Listing-Misc Features (4)
  misc_feature: MA Experiment ID: 20000479 Result: Up-regulated in Transcription
  misc_feature: MA Experiment 20000479 PARAMETER Experiment Name: Zm_Drought_P Parameter: Age (day) Value: 10
  misc_feature: MA Experiment 20000479 PARAMETER Experiment Name: Zm_Drought_P Parameter: Organism Value: Zea mays
  misc_feature: MA Experiment 20000479 PARAMETER Experiment Name: Zm_Drought_P Parameter: Plant Line Value: 35A19
  misc_feature: MA Experiment 20000479 PARAMETER Experiment Name: Zm_Drought_P Parameter: Timepoint (hr) Value: 48
  misc_feature: MA Experiment 20000479 PARAMETER Experiment Name: Zm_Drought_P Parameter: Tissue Value: Aerial
  misc_feature: MA Experiment 20000479 PARAMETER Experiment Name: Zm_Drought_P Parameter: Treatment Value: Drought vs. No Drought
  misc_feature: MA Experiment ID: 20000480 Result: Up-regulated in Transcription
  misc_feature: MA Experiment 20000480 PARAMETER Experiment Name: Zm_Drought_P Parameter: Age (day) Value: 11
  misc_feature: MA Experiment 20000480 PARAMETER Experiment Name: Zm_Drought_P Parameter: Organism Value: Zea mays
  misc_feature: MA Experiment 20000480 PARAMETER Experiment Name: Zm_Drought_P Parameter: Plant Line Value: 35A19
  misc_feature: MA Experiment 20000480 PARAMETER Experiment Name: Zm_Drought_P Parameter: Timepoint (hr) Value: 72
  misc_feature: MA Experiment 20000480 PARAMETER Experiment Name: Zm_Drought_P Parameter: Tissue Value: Aerial
  misc_feature: MA Experiment 20000480 PARAMETER Experiment Name: Zm_Drought_P Parameter: Treatment Value: Drought vs. No Drought
  misc_feature: MA Experiment ID: 20000534 Result: Down-regulated in Transcription
  misc_feature: MA Experiment 20000534 PARAMETER Experiment Name: Zm_Hybrid_Pollen_P Parameter: Age (day) Value: 8
  misc_feature: MA Experiment 20000534 PARAMETER Experiment Name: Zm_Hybrid_Pollen_P Parameter: Organism Value: Zea mays
  misc_feature: MA Experiment 20000534 PARAMETER Experiment Name: Zm_Hybrid_Pollen_P Parameter: Plant Line Value: 35A19
  misc_feature: MA Experiment 20000534 PARAMETER Experiment Name: Zm_Hybrid_Pollen_P Parameter: Tissue Value: Pollen vs. Aerial
atctcctatctctctctctctctccactcgccgccgcctcgacctgcccggtgcccgcccgcacacaccacctgtccccgctccgctccgcgttcccttcccctcccggcattcccgatcgccgccgcccgcccgcctgacctcgacctcccctctcccctctcgcgccatccctcaggcccgggtttgtctcgccgccgctactggccttcgctcggtccgccgcgatggtgtctggcgggtgcgtgggggcggagggggaggcggaccgcgcggcggcgcctccggaggccgcggaggagccggtggtgccggcgcctcccgcgcgggaggtcgtggtggggtacgcgctcacgacgaagaaggccaagagcttcctccagcccaagctccgggggctcgccaggaaaaagggaatcttgtttgttgctattgatcagaaacgtccattgtctgatcaaggtccatttgacattgttcttcataagttgactggaaaggggtggcagcaattgctggaggaatatagggaggctcacccagaagttactgttcttgatccacctggcgcaatagcaaacttgctagatcgccaatctatgcttcaagaagtatctgaattggacctcaccgattgtcatggtaaagtacgcgtgcctaaacagctattcattaatactgatccctcatcaataccagctgcagttaggagggcgggtctctctctcccattggtggcaaaacccttggtggcgaagtcccatgagctatctctggcttatgatccaacttcactgaccaaacttgagccccctttagttcttcaggaatttgttaaccatggtggcgtcatgtttaaggtgtacattgttggggatgcaataagggttgtacgtcggttttcacttccaaatgttgatgaaggtgatctgtcgaataatgctggggtatttcggtttccaagggtctcttgtgctgcagccagtgcagatgatgcagatcttgaccctggtgttgctgaacttcctccgagaccattgcttgagatcttggcacgagagctgcggcgacgactgggtcttagactattcaacattgatatgattagggagcacggaacaagagaccggttttatgtcatagacatgaactactttcctgggtacggcaaaatgcccgggtacgagcacgtgttcaccgacttcctgctgagccttgcccagaaagagtacaagaggcgaccaagctatagctccctaggctcaggcgaagggtgacaagtgaggaggaggctacttggcgggggcgccctgtatatgtatagcatccgcaatgcgtgcgtacagatgtgctgcgtgacgggagatgatgggtcgtagagctggggcatcactgcatcacatcagtagccgcgataaaagaagcgaggacttttggcaggctgtaattaaattgttactttgcatgtgctaactgttcatgcttc

SEQ ID NO: 2732 - protein, 349 aa, Zea mays subsp. mays
  peptide (1)..(349): Ceres Seq. ID no. 12352116
  misc_feature (31)..(329): Pfam Name: Inositol 1, 3, 4-trisphosphate 5/6-kinase Pfam Description: Inositol 1, 3, 4-trisphosphate 5/6-kinase
  misc_feature (22)..(334): Homolog of NCBI NO: 37537118 NR Description: putative inositol 1,3,4-trisphosphate 5/6-kinase
  misc_feature (34)..(169): Homolog of NCBI NO: 7487088 NR Description: hypothetical protein T16L1.260 - Arabidopsis
  misc_feature (170)..(312): Homolog of NCBI NO: 7487088 NR Description: hypothetical protein T16L1.260 - Arabidopsis
  misc_feature (34)..(169): Homolog of NCBI NO: 30689810 NR Description: expressed protein [Arabidopsis thaliana]
  misc_feature (170)..(338): Homolog of NCBI NO: 30689810 NR Description: expressed protein [Arabidopsis thaliana]
  misc_feature (90)..(338): Homolog of NCBI NO: 30680654 NR Description: inositol 1,3,4-trisphosphate 5/6-kinase-related
  misc_feature (27)..(312): Homolog of NCBI NO: 7487925 NR Description: inositol 1,3,4-trisphosphate 5/6-kinase homolog
  misc_feature (10)..(337): Homolog of NCBI NO: 27311236 NR Description: Putative inositol 1,3,4-trisphosphate 5/6-kinase
  misc_feature (18)..(342): Homolog of NCBI NO: 37530372 NR Description: putative inositol 1,3,4-trisphosphate 5/6-kinase
  misc_feature (27)..(338): Homolog of NCBI NO: 18413088 NR Description: inositol 1,3,4-trisphosphate 5/6-kinase-like
MVSGGCVGAEGEADRAAAPPEAAEEPVVPAPPAREVVVGYALTTKKAKSFLQPKLRGLARKKGILFVAIDQKRPLSDQGPFDIVLHKLTGKGWQQLLEEYREAHPEVTVLDPPGAIANLLDRQSMLQEVSELDLTDCHGKVRVPKQLFINTDPSSIPAAVRRAGLSLPLVAKPLVAKSHELSLAYDPTSLTKLEPPLVLQEFVNHGGVMFKVYIVGDAIRVVRRFSLPNVDEGDLSNNAGVFRFPRVSCAAASADDADLDPGVAELPPRPLLEILARELRRRLGLRLFNIDMIREHGTRDRFYVIDMNYFPGYGKMPGYEHVFTDFLLSLAQKEYKRRPSYSSLGSGEG

SEQ ID NO: 2733 - protein, 225 aa, Zea mays subsp. mays
  peptide (1)..(225): Ceres Seq. ID no. 12352117
  misc_feature (1)..(205): Pfam Name: Inositol 1, 3, 4-trisphosphate 5/6-kinase Pfam Description: Inositol 1, 3, 4-trisphosphate 5/6-kinase
  misc_feature (1)..(188): Homolog of NCBI NO: 7487925 NR Description: inositol 1,3,4-trisphosphate 5/6-kinase homolog
  misc_feature (1)..(213): Homolog of NCBI NO: 27311236 NR Description: Putative inositol 1,3,4-trisphosphate 5/6-kinase
  misc_feature (1)..(210): Homolog of NCBI NO: 37537118 NR Description: putative inositol 1,3,4-trisphosphate 5/6-kinase
  misc_feature (46)..(188): Homolog of NCBI NO: 7487088 NR Description: hypothetical protein T16L1.260 - Arabidopsis
  misc_feature (46)..(214): Homolog of NCBI NO: 30689810 NR Description: expressed protein [Arabidopsis thaliana]
  misc_feature (1)..(214): Homolog of NCBI NO: 30680654 NR Description: inositol 1,3,4-trisphosphate 5/6-kinase-related
  misc_feature (1)..(45): Homolog of NCBI NO: 30689810 NR Description: expressed protein [Arabidopsis thaliana]
  misc_feature (1)..(45): Homolog of NCBI NO: 7487088 NR Description: hypothetical protein T16L1.260 - Arabidopsis
  misc_feature (1)..(218): Homolog of NCBI NO: 37530372 NR Description: putative inositol 1,3,4-trisphosphate 5/6-kinase
  misc_feature (1)..(214): Homolog of NCBI NO: 18413088 NR Description: inositol 1,3,4-trisphosphate 5/6-kinase-like
MLQEVSELDLTDCHGKVRVPKQLFINTDPSSIPAAVRRAGLSLPLVAKPLVAKSHELSLAYDPTSLTKLEPPLVLQEFVNHGGVMFKVYIVGDAIRVVRRFSLPNVDEGDLSNNAGVFRFPRVSCAAASADDADLDPGVAELPPRPLLEILARELRRRLGLRLFNIDMIREHGTRDRFYVIDMNYFPGYGKMPGYEHVFTDFLLSLAQKEYKRRPSYSSLGSGEG

SEQ ID NO: 2734 - DNA, 1923 bp, Zea mays subsp. mays
  misc_feature (1)..(1923): Ceres Seq. ID no. 12408064
  misc_feature: MA Experiment ID: 108515 Result: Down-regulated in Transcription
  misc_feature: MA Experiment 108515 PARAMETER Experiment Name: Zm_2mM_SA_P Parameter: Age (day) Value: 8
  misc_feature: MA Experiment 108515 PARAMETER Experiment Name: Zm_2mM_SA_P Parameter: Organism Value: Zea mays
  misc_feature: MA Experiment 108515 PARAMETER Experiment Name: Zm_2mM_SA_P Parameter: Plant Line Value: 35A19
  misc_feature: MA Experiment 108515 PARAMETER Experiment Name: Zm_2mM_SA_P Parameter: Timepoint (hr) Value: 12
  misc_feature: MA Experiment 108515 PARAMETER Experiment Name: Zm_2mM_SA_P Parameter: Tissue Value: Aerial
  misc_feature: MA Experiment 108515 PARAMETER Experiment Name: Zm_2mM_SA_P Parameter: Treatment Value: 2mM SA vs. No Treatment
  misc_feature: MA Experiment ID: 108527 Result: Down-regulated in Transcription
  misc_feature: MA Experiment 108527 PARAMETER Experiment Name: Zm_5mM_NO_P Parameter: Age (day) Value: 8
  misc_feature: MA Experiment 108527 PARAMETER Experiment Name: Zm_5mM_NO_P Parameter: Organism Value: Zea mays
  misc_feature: MA Experiment 108527 PARAMETER Experiment Name: Zm_5mM_NO_P Parameter: Plant Line Value: 35A19
  misc_feature: MA Experiment 108527 PARAMETER Experiment Name: Zm_5mM_NO_P Parameter: Timepoint (hr) Value: 6
  misc_feature: MA Experiment 108527 PARAMETER Experiment Name: Zm_5mM_NO_P Parameter: Tissue Value: Aerial
  misc_feature: MA Experiment 108527 PARAMETER Experiment Name: Zm_5mM_NO_P Parameter: Treatment Value: 5mM NO vs. No Treatment
  misc_feature: MA Experiment ID: 108529 Result: Up-regulated in Transcription
  misc_feature: MA Experiment 108529 PARAMETER Experiment Name: Zm_Imbibed_Seeds_P Parameter: Age (day) Value: 5 vs. 2
  misc_feature: MA Experiment 108529 PARAMETER Experiment Name: Zm_Imbibed_Seeds_P Parameter: Organism Value: Zea mays
  misc_feature: MA Experiment 108529 PARAMETER Experiment Name: Zm_Imbibed_Seeds_P Parameter: Plant Line Value: 35A19
  misc_feature: MA Experiment 108529 PARAMETER Experiment Name: Zm_Imbibed_Seeds_P Parameter: Tissue Value: Roots vs. Embryo
  misc_feature: MA Experiment ID: 108543 Result: Up-regulated in Transcription
  misc_feature: MA Experiment ID: 108546 Result: Up-regulated in Transcription
  misc_feature: MA Experiment 108546 PARAMETER Experiment Name: Zm_Imbibed_Seeds_P Parameter: Age (day) Value: 3 vs. 2
  misc_feature: MA Experiment 108546 PARAMETER Experiment Name: Zm_Imbibed_Seeds_P Parameter: Organism Value: Zea mays
  misc_feature: MA Experiment 108546 PARAMETER Experiment Name: Zm_Imbibed_Seeds_P Parameter: Plant Line Value: 35A19
  misc_feature: MA Experiment 108546 PARAMETER Experiment Name: Zm_Imbibed_Seeds_P Parameter: Tissue Value: Roots vs. Embryo
  misc_feature: MA Experiment ID: 108559 Result: Down-regulated in Transcription
  misc_feature: MA Experiment 108559 PARAMETER Experiment Name: Zm_5mM_NO_P Parameter: Age (day) Value: 8
  misc_feature: MA Experiment 108559 PARAMETER Experiment Name: Zm_5mM_NO_P Parameter: Organism Value: Zea mays
  misc_feature: MA Experiment 108559 PARAMETER Experiment Name: Zm_5mM_NO_P Parameter: Plant Line Value: 35A19
  misc_feature: MA Experiment 108559 PARAMETER Experiment Name: Zm_5mM_NO_P Parameter: Timepoint (hr) Value: 12
  misc_feature: MA Experiment 108559 PARAMETER Experiment Name: Zm_5mM_NO_P Parameter: Tissue Value: Aerial
  misc_feature: MA Experiment 108559 PARAMETER Experiment Name: Zm_5mM_NO_P Parameter: Treatment Value: 5mM NO vs. No Treatment
  misc_feature: MA Experiment ID: 20000477 Result: Down-regulated in Transcription
  misc_feature: MA Experiment 20000477 PARAMETER Experiment Name: Zm_5mM_SA_P Parameter: Age (day) Value: 10
  misc_feature: MA Experiment 20000477 PARAMETER Experiment Name: Zm_5mM_SA_P Parameter: Organism Value: Zea mays
  misc_feature: MA Experiment 20000477 PARAMETER Experiment Name: Zm_5mM_SA_P Parameter: Plant Line Value: 35A19
  misc_feature: MA Experiment 20000477 PARAMETER Experiment Name: Zm_5mM_SA_P Parameter: Timepoint (hr) Value: 48
  misc_feature: MA Experiment 20000477 PARAMETER Experiment Name: Zm_5mM_SA_P Parameter: Tissue Value: Aerial
  misc_feature: MA Experiment 20000477 PARAMETER Experiment Name: Zm_5mM_SA_P Parameter: Treatment Value: 5mM SA vs. No Treatment
  misc_feature: MA Experiment ID: 20000478 Result: Down-regulated in Transcription
  misc_feature: MA Experiment 20000478 PARAMETER Experiment Name: Zm_5mM_SA_P Parameter: Age (day) Value: 11
  misc_feature: MA Experiment 20000478 PARAMETER Experiment Name: Zm_5mM_SA_P Parameter: Organism Value: Zea mays
  misc_feature: MA Experiment 20000478 PARAMETER Experiment Name: Zm_5mM_SA_P Parameter: Plant Line Value: 35A19
  misc_feature: MA Experiment 20000478 PARAMETER Experiment Name: Zm_5mM_SA_P Parameter: Timepoint (hr) Value: 72
  misc_feature: MA Experiment 20000478 PARAMETER Experiment Name: Zm_5mM_SA_P Parameter: Tissue Value: Aerial
  misc_feature: MA Experiment 20000478 PARAMETER Experiment Name: Zm_5mM_SA_P Parameter: Treatment Value: 5mM SA vs. No Treatment
  misc_feature: MA Experiment ID: 20000479 Result: Down-regulated in Transcription
  misc_feature: MA Experiment 20000479 PARAMETER Experiment Name: Zm_Drought_P Parameter: Age (day) Value: 10
  misc_feature: MA Experiment 20000479 PARAMETER Experiment Name: Zm_Drought_P Parameter: Organism Value: Zea mays
  misc_feature: MA Experiment 20000479 PARAMETER Experiment Name: Zm_Drought_P Parameter: Plant Line Value: 35A19
  misc_feature: MA Experiment 20000479 PARAMETER Experiment Name: Zm_Drought_P Parameter: Timepoint (hr) Value: 48
  misc_feature: MA Experiment 20000479 PARAMETER Experiment Name: Zm_Drought_P Parameter: Tissue Value: Aerial
  misc_feature: MA Experiment 20000479 PARAMETER Experiment Name: Zm_Drought_P Parameter: Treatment Value: Drought vs. No Drought
  misc_feature: MA Experiment ID: 20000480 Result: Down-regulated in Transcription
  misc_feature: MA Experiment 20000480 PARAMETER Experiment Name: Zm_Drought_P Parameter: Age (day) Value: 11
  misc_feature: MA Experiment 20000480 PARAMETER Experiment Name: Zm_Drought_P Parameter: Organism Value: Zea mays
  misc_feature: MA Experiment 20000480 PARAMETER Experiment Name: Zm_Drought_P Parameter: Plant Line Value: 35A19
  misc_feature: MA Experiment 20000480 PARAMETER Experiment Name: Zm_Drought_P Parameter: Timepoint (hr) Value: 72
  misc_feature: MA Experiment 20000480 PARAMETER Experiment Name: Zm_Drought_P Parameter: Tissue Value: Aerial
  misc_feature: MA Experiment 20000480 PARAMETER Experiment Name: Zm_Drought_P Parameter: Treatment Value: Drought vs. No Drought
  misc_feature: MA Experiment ID: 20000492 Result: Down-regulated in Transcription
  misc_feature: MA Experiment 20000492 PARAMETER Experiment Name: Zm_Hybrid_Seed_Dev_P Parameter: DAP Value: 12
  misc_feature: MA Experiment 20000492 PARAMETER Experiment Name: Zm_Hybrid_Seed_Dev_P Parameter: Organism Value: Zea mays
  misc_feature: MA Experiment 20000492 PARAMETER Experiment Name: Zm_Hybrid_Seed_Dev_P Parameter: Plant Line Value: 35A19
  misc_feature: MA Experiment 20000492 PARAMETER Experiment Name: Zm_Hybrid_Seed_Dev_P Parameter: Tissue Value: Fert Kernel vs. Unfert Floret
  misc_feature: MA Experiment ID: 20000535 Result: Down-regulated in Transcription
  misc_feature: MA Experiment 20000535 PARAMETER Experiment Name: Zm_Hybrid_Seed_Dev_P Parameter: DAP Value: 30 vs. 12
  misc_feature: MA Experiment 20000535 PARAMETER Experiment Name: Zm_Hybrid_Seed_Dev_P Parameter: Organism Value: Zea mays
  misc_feature: MA Experiment 20000535 PARAMETER Experiment Name: Zm_Hybrid_Seed_Dev_P Parameter: Plant Line Value: 35A19
  misc_feature: MA Experiment 20000535 PARAMETER Experiment Name: Zm_Hybrid_Seed_Dev_P Parameter: Tissue Value: Embryo vs. Unfert Floret
aaataagatcagttagcttgtctttatttcttcctccgatcactgattatacacacgcacttgatgaggttagatcgctagttaagcaagaaattagaggaggagagaggggtagccatggaagagcagcagccccgcccccgcccaagcatcatgttcgtcctgtcgtcgctcgccaagaataacccagagtccgtgctggcgctcatcgcggtgctcaccgtcgtcgccctgcgccacttgatctcctcatggcggcagcaggcccggctgcccccgtcaccgacgagcctcccggtgatcggccacctgcacctgctccgcccgccagtgcaccgcaccttccaggagctggcgtcccggatcggtccgctgatgcacatccgcctcggctccacgcactgcgtggttgccagcaccccggaggtggccagcgagctcatccgcggccacgagggcagcatctcggagcggccgctcacggcggtggcccgccagttcgcgtacgactcggccggcttcgccttcgcgccctataacacgcactggcgcttcatgaagcgcctctgcatgtcggagctgctcggcccgcgcactgtcgagcagctgcgccccgtccgccgcgccggcaccgtgtccctgctcgccgacctgctggcgtcgtcggcgcggggggagacggtggacctcacccgccatctcatccgcctctccaacacctccatcatccggatggtggccagcaccgtgcccggaagcgtcaccgacgaggcgcaggaggtggtcaaggacgtggccgagctcgtgggcgccttcaacgtcgacgactacatctccctagtccgtggctgggatctccagggcctccgcaggagagccgctggcgtccaccgccgcttcgacgcgctgctggaggacatcctcaggcacaaggaggaggcgagggcggcgcgaaggctcgaccaagacgacgacggacgtggcagcagcaagcaggacaagaagcaggccacgcacagcaaggacctgctcgacatcctcatggacaaggcagacgacccggcggcggagatcaagctcacccgggaaaacatcaaggctttcatcatcgacgtggtgactgctggttcagacacgtcggccgccatggtagagtggatgctggcggagctgatgaaccacccggagacgctgcgtaaggtggcggaggagatcgacgcggtggtcggcggcgacaggatcgccagcgaagcggacctgccacagctgccgtacctgatggcggcgtacaaggagacgttgcgtctgcacccggcagcgcccatcgcgcaccgacagtcgagcgaggagatggtggtgcgcggcttcacggtgccgccgcagacggcggtgttcatcaacgtgtgggccatcgggcgcgacccggcgtactgggaggagcccctagcgttccggccggagcggttcatgcccggcggcgccgccgagagcctggagccccgtgggcagcactttcagtacatgcccttcggcagcggccgccggggatgccccggcatgggcctggcgctacagtccgtgccggccgtgctggcggcgctcgtgcagtgcttccactgggccacccgtcgacggcgacggcggggtgaacaagatcgacatgtcggagtcggacgggctggtgtgcgctcgcaagaagccgcttctgctccgccccacgcctcgcctcacccccttcccggccgtcgtctagcgtgtcttccatggcaataccgtctatgtctgtaccaacctctaccagtaccaccacgtacgtacggattcgaagaatgtggataccatgcattaattatatgtatcacattattatatatatgatatgcaagagtaatatgcatggcattgtcttgcatgctctttgtt

SEQ ID NO: 2735 - protein, 586 aa, Zea mays subsp. mays
  peptide (1)..(586): Ceres Seq. ID no. 12408065
  misc_feature (53)..(501): Pfam Name: Cytochrome P450 Pfam Description: Cytochrome P450
  misc_feature (29)..(501): Homolog of NCBI NO: 38344759 NR Description: OSJNBa0068L06.2 [Oryza sativa (japonica
MEEQQPRPRPSIMFVLSSLAKNNPESVLALIAVLTVVALRHLISSWRQQARLPPSPTSLPVIGHLHLLRPPVHRTFQELASRIGPLMHIRLGSTHCVVASTPEVASELIRGHEGSISERPLTAVARQFAYDSAGFAFAPYNTHWRFMKRLCMSELLGPRTVEQLRPVRRAGTVSLLADLLASSARGETVDLTRHLIRLSNTSIIRMVASTVPGSVTDEAQEVVKDVAELVGAFNVDDYISLVRGWDLQGLRRRAAGVHRRFDALLEDILRHKEEARAARRLDQDDDGRGSSKQDKKQATHSKDLLDILMDKADDPAAEIKLTRENIKAFIIDVVTAGSDTSAAMVEWMLAELMNHPETLRKVAEEIDAVVGGDRIASEADLPQLPYLMAAYKETLRLHPAAPIAHRQSSEEMVVRGFTVPPQTAVFINVWAIGRDPAYWEEPLAFRPERFMPGGAAESLEPRGQHFQYMPFGSGRRGCPGMGLALQSVPAVLAALVQCFHWATRRRRRRGEQDRHVGVGRAGVRSQEAASAPPHASPHPLPGRRLACLPWQYRLCLYQPLPVPPRTYGFEECGYHALIICITLLYI

SEQ ID NO: 2736 - protein, 574 aa, Zea mays subsp. mays
  peptide (1)..(574): Ceres Seq. ID no. 12408066
  misc_feature (41)..(489): Pfam Name: Cytochrome P450 Pfam Description: Cytochrome P450
  misc_feature (17)..(489): Homolog of NCBI NO: 38344759 NR Description: OSJNBa0068L06.2 [Oryza sativa (japonica
MFVLSSLAKNNPESVLALIAVLTVVALRHLISSWRQQARLPPSPTSLPVIGHLHLLRPPVHRTFQELASRIGPLMHIRLGSTHCVVASTPEVASELIRGHEGSISERPLTAVARQFAYDSAGFAFAPYNTHWRFMKRLCMSELLGPRTVEQLRPVRRAGTVSLLADLLASSARGETVDLTRHLIRLSNTSIIRMVASTVPGSVTDEAQEVVKDVAELVGAFNVDDYISLVRGWDLQGLRRRAAGVHRRFDALLEDILRHKEEARAARRLDQDDDGRGSSKQDKKQATHSKDLLDILMDKADDPAAEIKLTRENIKAFIIDVVTAGSDTSAAMVEWMLAELMNHPETLRKVAEEIDAVVGGDRIASEADLPQLPYLMAAYKETLRLHPAAPIAHRQSSEEMVVRGFTVPPQTAVFINVWAIGRDPAYWEEPLAFRPERFMPGGAAESLEPRGQHFQYMPFGSGRRGCPGMGLALQSVPAVLAALVQCFHWATRRRRRRGEQDRHVGVGRAGVRSQEAASAPPHASPHPLPGRRLACLPWQYRLCLYQPLPVPPRTYGFEECGYHALIICITLLYI

SEQ ID NO: 2737 - protein, 500 aa, Zea mays subsp. mays
  peptide (1)..(500): Ceres Seq. ID no. 12408067
  misc_feature (1)..(415): Pfam Name: Cytochrome P450 Pfam Description: Cytochrome P450
  misc_feature (1)..(415): Homolog of NCBI NO: 38344759 NR Description: OSJNBa0068L06.2 [Oryza sativa (japonica
MHIRLGSTHCVVASTPEVASELIRGHEGSISERPLTAVARQFAYDSAGFAFAPYNTHWRFMKRLCMSELLGPRTVEQLRPVRRAGTVSLLADLLASSARGETVDLTRHLIRLSNTSIIRMVASTVPGSVTDEAQEVVKDVAELVGAFNVDDYISLVRGWDLQGLRRRAAGVHRRFDALLEDILRHKEEARAARRLDQDDDGRGSSKQDKKQATHSKDLLDILMDKADDPAAEIKLTRENIKAFIIDVVTAGSDTSAAMVEWMLAELMNHPETLRKVAEEIDAVVGGDRIASEADLPQLPYLMAAYKETLRLHPAAPIAHRQSSEEMVVRGFTVPPQTAVFINVWAIGRDPAYWEEPLAFRPERFMPGGAAESLEPRGQHFQYMPFGSGRRGCPGMGLALQSVPAVLAALVQCFHWATRRRRRRGEQDRHVGVGRAGVRSQEAASAPPHASPHPLPGRRLACLPWQYRLCLYQPLPVPPRTYGFEECGYHALIICITLLYI

SEQ ID NO: 2738 - DNA, 1052 bp, Zea mays subsp. mays
  misc_feature (1)..(1052): Ceres Seq. ID no. 12340741
  misc_feature: MA Experiment ID: 108530 Result: Down-regulated in Transcription
  misc_feature: MA Experiment 108530 PARAMETER Experiment Name: Zm_Imbibed_Seeds_P Parameter: Age (day) Value: 6 vs. 2
  misc_feature: MA Experiment 108530 PARAMETER Experiment Name: Zm_Imbibed_Seeds_P Parameter: Organism Value: Zea mays
  misc_feature: MA Experiment 108530 PARAMETER Experiment Name: Zm_Imbibed_Seeds_P Parameter: Plant Line Value: 35A19
  misc_feature: MA Experiment 108530 PARAMETER Experiment Name: Zm_Imbibed_Seeds_P Parameter: Tissue Value: Aerial vs. Embryo
  misc_feature: MA Experiment ID: 20000492 Result: Up-regulated in Transcription
  misc_feature: MA Experiment 20000492 PARAMETER Experiment Name: Zm_Hybrid_Seed_Dev_P Parameter: DAP Value: 12
  misc_feature: MA Experiment 20000492 PARAMETER Experiment Name: Zm_Hybrid_Seed_Dev_P Parameter: Organism Value: Zea mays
  misc_feature: MA Experiment 20000492 PARAMETER Experiment Name: Zm_Hybrid_Seed_Dev_P Parameter: Plant Line Value: 35A19
  misc_feature: MA Experiment 20000492 PARAMETER Experiment Name: Zm_Hybrid_Seed_Dev_P Parameter: Tissue Value: Fert Kernel vs. Unfert Floret
atatatgtgaatcctaactgtacactgtctgaagtggacgaacggctctggcttcggcgtgttacgtgtatagtaggccccttttgaacgaacggcgcgggccggggccaccaccagcatctgcggcagggagaatcgcgttggttcgacgcaaacgctacccggcgcccccttgcccttggggccggctattttaccgcacccgttctcccctctctaccgcagatcagatcacactcgtagagagaaggaaaaatatccccaaaccctagctcccgatctcgatggcgaaccctcgcgtcttcttcgacatgaccgtcggcggcgccccggcgggccggatcgtgatggagctgtacgccaacgaggtgcccaagaccgcggagaacttccgcgcgctgtgcacgggcgagaagggcgtgggcaagtccgggaagccgctccactacaagggctccaccttccaccgcgtcatccccgagttcatgtgccagggcggcgacttcacccgcggcaacggcaccggcggcgagtccatctacggcgagaagttccccgacgagaagttcgtgcgcaagcaacccgcccccggtgtgctctccatggccaacgccgggcccaacaccaacggctcccagttcttcatctgcaccgtcgcgaccccttggctcgacggcaagcacgtcgtcttcggccaggtcgtcgagggcatggacgtcgtcaaggccatcgagaaggtgggcacccgcaacggctccacctccaaggtggtcaaggtcgctgactgcggacagctctcctagatctctctgatctggtctgttcggccgccctccctccgtcatcgtcgactccccctgcgtccgttcctttggatctgaataagatggtggtgatctgagtggtggtcttagtttatcatgtatcgctcgcagtttaatttagcggtttaggtgtggatctgtgaaccccatggcgcctctgcttgattcgtgtttcacctgttatgttctgagattcatgataatgctatgagaactgaaattcccgtt

SEQ ID NO: 2739 - protein, 172 aa, Zea mays subsp. mays
  peptide (1)..(172): Ceres Seq. ID no. 12340742
  misc_feature (1)..(172): Homolog of NCBI NO: 118104 NR Description: Peptidyl-prolyl cis-trans isomerase (PPIase)
  misc_feature (1)..(172): Homolog of NCBI NO: 1084455 NR Description: peptidylprolyl isomerase (EC 5.2.1.8) Cyp2 - rice
  misc_feature (1)..(172): Homolog of NCBI NO: 600769 NR Description: cyclophilin 2
  misc_feature (1)..(171): Homolog of NCBI NO: 13925731 NR Description: cyclophilin A-1 [Triticum aestivum]
  misc_feature (1)..(171): Homolog of NCBI NO: 13925734 NR Description: cyclophilin A-2 [Triticum aestivum]
  misc_feature (1)..(172): Homolog of NCBI NO: 18376589 NR Description: putative cyclosporin A-binding protein [Picea
  misc_feature (2)..(172): Homolog of NCBI NO: 18076088 NR Description: cyclophilin [Ricinus communis]
  misc_feature (1)..(171): Homolog of NCBI NO: 11270316 NR Description: peptidylprolyl isomerase (EC 5.2.1.8) - Digitalis lanata >gi|1563719|emb|CAA69622.1| cyclophylin
  misc_feature (1)..(171): Homolog of NCBI NO: 23394388 NR Description: peptidylprolyl isomerase [Phytophthora infestans]
  misc_feature (1)..(172): Homolog of NCBI NO: 3334157 NR Description: Peptidyl-prolyl cis-trans isomerase (PPIase)
MANPRVFFDMTVGGAPAGRIVMELYANEVPKTAENFRALCTGEKGVGKSGKPLHYKGSTFHRVIPEFMCQGGDFTRGNGTGGESIYGEKFPDEKFVRKQPAPGVLSMANAGPNTNGSQFFICTVATPWLDGKHVVFGQVVEGMDVVKAIEKVGTRNGSTSKVVKVADCGQLS

SEQ ID NO: 2740 - protein, 163 aa, Zea mays subsp. mays
  peptide (1)..(163): Ceres Seq. ID no. 12340743
  misc_feature (1)..(163): Homolog of NCBI NO: 118104 NR Description: Peptidyl-prolyl cis-trans isomerase (PPIase)
  misc_feature (1)..(163): Homolog of NCBI NO: 1084455 NR Description: peptidylprolyl isomerase (EC 5.2.1.8) Cyp2 - rice
  misc_feature (1)..(163): Homolog of NCBI NO: 600769 NR Description: cyclophilin 2
  misc_feature (1)..(162): Homolog of NCBI NO: 13925731 NR Description: cyclophilin A-1 [Triticum aestivum]
  misc_feature (1)..(162): Homolog of NCBI NO: 13925734 NR Description: cyclophilin A-2 [Triticum aestivum]
  misc_feature (1)..(163): Homolog of NCBI NO: 18376589 NR Description: putative cyclosporin A-binding protein [Picea
  misc_feature (1)..(163): Homolog of NCBI NO: 18076088 NR Description: cyclophilin [Ricinus communis]
  misc_feature (1)..(162): Homolog of NCBI NO: 11270316 NR Description: peptidylprolyl isomerase (EC 5.2.1.8) - Digitalis lanata >gi|1563719|emb|CAA69622.1| cyclophylin
  misc_feature (1)..(162): Homolog of NCBI NO: 23394388 NR Description: peptidylprolyl isomerase [Phytophthora infestans]
  misc_feature (1)..(163): Homolog of NCBI NO: 3334157 NR Description: Peptidyl-prolyl cis-trans isomerase (PPIase)
MTVGGAPAGRIVMELYANEVPKTAENFRALCTGEKGVGKSGKPLHYKGSTFHRVIPEFMCQGGDFTRGNGTGGESIYGEKFPDEKFVRKQPAPGVLSMANAGPNTNGSQFFICTVATPWLDGKHVVFGQVVEGMDVVKAIEKVGTRNGSTSKVVKVADCGQLS

SEQ ID NO: 2741 - protein, 151 aa, Zea mays subsp. mays
  peptide (1)..(151): Ceres Seq. ID no. 12340744
  misc_feature (1)..(150): Homolog of NCBI NO: 11270316 NR Description: peptidylprolyl isomerase (EC 5.2.1.8) - Digitalis lanata >gi|1563719|emb|CAA69622.1| cyclophylin
  misc_feature (1)..(150): Homolog of NCBI NO: 23394388 NR Description: peptidylprolyl isomerase [Phytophthora infestans]
  misc_feature (1)..(151): Homolog of NCBI NO: 3334157 NR Description: Peptidyl-prolyl cis-trans isomerase (PPIase)
  misc_feature (1)..(151): Homolog of NCBI NO: 118104 NR Description: Peptidyl-prolyl cis-trans isomerase (PPIase)
  misc_feature (1)..(151): Homolog of NCBI NO: 1084455 NR Description: peptidylprolyl isomerase (EC 5.2.1.8) Cyp2 - rice
  misc_feature (1)..(151): Homolog of NCBI NO: 600769 NR Description: cyclophilin 2
  misc_feature (1)..(150): Homolog of NCBI NO: 13925731 NR Description: cyclophilin A-1 [Triticum aestivum]
  misc_feature (1)..(150): Homolog of NCBI NO: 13925734 NR Description: cyclophilin A-2 [Triticum aestivum]
  misc_feature (1)..(151): Homolog of NCBI NO: 18376589 NR Description: putative cyclosporin A-binding protein [Picea
  misc_feature (1)..(151): Homolog of NCBI NO: 18076088 NR Description: cyclophilin [Ricinus communis]
MELYANEVPKTAENFRALCTGEKGVGKSGKPLHYKGSTFHRVIPEFMCQGGDFTRGNGTGGESIYGEKFPDEKFVRKQPAPGVLSMANAGPNTNGSQFFICTVATPWLDGKHVVFGQVVEGMDVVKAIEKVGTRNGSTSKVVKVADCGQLS

SEQ ID NO: 2742 - DNA, 1416 bp, Zea mays subsp. mays
  misc_feature (1)..(1416): Ceres Seq. ID no. 12454754
  misc_feature: MA Experiment ID: 108522 Result: Up-regulated in Transcription
  misc_feature: MA Experiment 108522 PARAMETER Experiment Name: Zm_42deg_Heat_P Parameter: Age (day) Value: 8
  misc_feature: MA Experiment 108522 PARAMETER Experiment Name: Zm_42deg_Heat_P Parameter: Organism Value: Zea mays
  misc_feature: MA Experiment 108522 PARAMETER Experiment Name: Zm_42deg_Heat_P Parameter: Plant Line Value: 35A19
  misc_feature: MA Experiment 108522 PARAMETER Experiment Name: Zm_42deg_Heat_P Parameter: Temperature (deg C) Value: 42 vs. 22
  misc_feature: MA Experiment 108522 PARAMETER Experiment Name: Zm_42deg_Heat_P Parameter: Timepoint (hr) Value: 1
  misc_feature: MA Experiment 108522 PARAMETER Experiment Name: Zm_42deg_Heat_P Parameter: Tissue Value: Aerial
aaaagccaggattcctctgctcttcctgtttagggtttccccctctctctgctcctgccggatgcgatggcgattccgccgcggactccttccccgccgccatcgtggtcgcgctctgtaaccgagaccgttcgggggtcccaccagttcaccgtacggggctactccctcgccaagggcatgggccccggccgctacctcgccagcgacgtcttcgccgtcggaggataccactgggccgtctacctctaccccgacggcaagaacgccgaggacaactccaactacgtctccgttttcgtcgccctcgcttccgacggcatcgacgtccgagccctcttcgagctcaccctcctcgaccagtccggccgcggctgccacaaggttcactcgcactttgaccgctcgctcaagttcggcccatacaccctcaagtacaggggatccatgtggggttacaagcgcttctacaaaagaacactcttggaagaatctgatttcttaaagaatgattgcctagtgatgaactgcacagtaggtgttgtcaagaaccgtatagaaacaccaaaggacatccagattcatgttccacgatcagacatgggccgctgcttcaaggagctcctcagccgctgcattggatgtgacataacattcgaagtgcgagatgagaaagtcagggcacacaagtggattcttgctgctcgctccccagtatttaaagcccagttctttggtcctattggaaagcctgacctgcacacggttgttgtggaggatgtggaacctgttgtcttcaaggcaatggtgaacttcatttacgctgatgaactccccagcattcctgagctagctgggtctgcctcaacgtggacatcaacagtagtagtacagcatttgttggcagcagctgatagatatggactggtccgtctgcgtatcctgtgtgaatcaaagctctgtgatgaactgactcctgaaactgtcgcaacaactttagcccttgctgaacagcaccattgtgctgagctgaagtctgcatgtctaaagttcattgctttgcgaggaaatttgggagctgttatggagacggaaggctttgattacctggaggatacatgcccgtccctactatctgacttgttagctactgtggcagtcgtggacgacgatcttgcatcccttaaccgaaaaaggggagtcagcgggaaccaagtcatggctctagtgggaagcgttgaaaggcgcacccggaggaagctttagtagctggcttccctagagggagactgtagttgacaacgatttgatttggacgctggtagctgtgaataatatcgtatccagatgattttttttttttttttgcagaagcagaagttgtaaattttttgaattgaatgcctttttttttcc

SEQ ID NO: 2743 - protein, 399 aa, Zea mays subsp. mays
  peptide (1)..(399): Ceres Seq. ID no. 12454755
  misc_feature (30)..(159): Pfam Name: MATH domain Pfam Description: MATH domain
  misc_feature (10)..(381): Homolog of NCBI NO: 28269444 NR Description: unknown protein [Oryza sativa (japonica
  misc_feature (8)..(381): Homolog of NCBI NO: 30678912 NR Description: expressed protein [Arabidopsis thaliana]
  misc_feature (8)..(381): Homolog of NCBI NO: 21536509 NR Description: unknown [Arabidopsis thaliana]
  misc_feature (1)..(381): Homolog of NCBI NO: 34900034 NR Description: OJ1641_C04.24 [Oryza sativa (japonica
  misc_feature (15)..(376): Homolog of NCBI NO: 22531225 NR Description: putative protein [Arabidopsis thaliana]
  misc_feature (1)..(372): Homolog of NCBI NO: 23617108 NR Description: contains ESTs
  misc_feature (15)..(377): Homolog of NCBI NO: 18397497 NR Description: expressed protein
  misc_feature (11)..(399): Homolog of NCBI NO: 18405153 NR Description: expressed protein
  misc_feature (11)..(399): Homolog of NCBI NO: 21595740 NR Description: unknown [Arabidopsis thaliana]
  misc_feature (13)..(399): Homolog of NCBI NO: 34394164 NR Description: putative speckle-type POZ protein
MAIPPRTPSPPPSWSRSVTETVRGSHQFTVRGYSLAKGMGPGRYLASDVFAVGGYHWAVYLYPDGKNAEDNSNYVSVFVALASDGIDVRALFELTLLDQSGRGCHKVHSHFDRSLKFGPYTLKYRGSMWGYKRFYKRTLLEESDFLKNDCLVMNCTVGVVKNRIETPKDIQIHVPRSDMGRCFKELLSRCIGCDITFEVRDEKVRAHKWILAARSPVFKAQFFGPIGKPDLHTVVVEDVEPVVFKAMVNFIYADELPSIPELAGSASTWTSTVVVQHLLAAADRYGLVRLRILCESKLCDELTPETVATTLALAEQHHCAELKSACLKFIALRGNLGAVMETEGFDYLEDTCPSLLSDLLATVAVVDDDLASLNRKRGVSGNQVMALVGSVERRTRRKL

SEQ ID NO: 2744 - protein, 361 aa, Zea mays subsp. mays
  peptide (1)..(361): Ceres Seq. ID no. 12454756
  misc_feature (1)..(121): Pfam Name: MATH domain Pfam Description: MATH domain
  misc_feature (1)..(343): Homolog of NCBI NO: 28269444 NR Description: unknown protein [Oryza sativa (japonica
  misc_feature (1)..(343): Homolog of NCBI NO: 30678912 NR Description: expressed protein [Arabidopsis thaliana]
  misc_feature (1)..(343): Homolog of NCBI NO: 21536509 NR Description: unknown [Arabidopsis thaliana]
  misc_feature (1)..(343): Homolog of NCBI NO: 34900034 NR Description: OJ1641_C04.24 [Oryza sativa (japonica
  misc_feature (1)..(338): Homolog of NCBI NO: 22531225 NR Description: putative protein [Arabidopsis thaliana]
  misc_feature (1)..(334): Homolog of NCBI NO: 23617108 NR Description: contains ESTs
  misc_feature (1)..(339): Homolog of NCBI NO: 18397497 NR Description: expressed protein
  misc_feature (1)..(361): Homolog of NCBI NO: 18405153 NR Description: expressed protein
  misc_feature (1)..(361): Homolog of NCBI NO: 21595740 NR Description: unknown [Arabidopsis thaliana]
  misc_feature (1)..(361): Homolog of NCBI NO: 34394164 NR Description: putative speckle-type POZ protein
MGPGRYLASDVFAVGGYHWAVYLYPDGKNAEDNSNYVSVFVALASDGIDVRALFELTLLDQSGRGCHKVHSHFDRSLKFGPYTLKYRGSMWGYKRFYKRTLLEESDFLKNDCLVMNCTVGVVKNRIETPKDIQIHVPRSDMGRCFKELLSRCIGCDITFEVRDEKVRAHKWILAARSPVFKAQFFGPIGKPDLHTVVVEDVEPVVFKAMVNFIYADELPSIPELAGSASTWTSTVVVQHLLAAADRYGLVRLRILCESKLCDELTPETVATTLALAEQHHCAELKSACLKFIALRGNLGAVMETEGFDYLEDTCPSLLSDLLATVAVVDDDLASLNRKRGVSGNQVMALVGSVERRTRRKL

SEQ ID NO: 2745 - protein, 272 aa, Zea mays subsp. mays
  peptide (1)..(272): Ceres Seq. ID no. 12454757
  misc_feature (57)..(175): Pfam Name: BTB/POZ domain Pfam Description: BTB/POZ domain
  misc_feature (1)..(254): Homolog of NCBI NO: 28269444 NR Description: unknown protein [Oryza sativa (japonica
  misc_feature (1)..(254): Homolog of NCBI NO: 30678912 NR Description: expressed protein [Arabidopsis thaliana]
  misc_feature (1)..(254): Homolog of NCBI NO: 21536509 NR Description: unknown [Arabidopsis thaliana]
  misc_feature (1)..(254): Homolog of NCBI NO: 34900034 NR Description: OJ1641_C04.24 [Oryza sativa (japonica
  misc_feature (1)..(249): Homolog of NCBI NO: 22531225 NR Description: putative protein [Arabidopsis thaliana]
  misc_feature (1)..(245): Homolog of NCBI NO: 23617108 NR Description: contains ESTs
  misc_feature (1)..(250): Homolog of NCBI NO: 18397497 NR Description: expressed protein
  misc_feature (1)..(272): Homolog of NCBI NO: 18405153 NR Description: expressed protein
  misc_feature (1)..(272): Homolog of NCBI NO: 21595740 NR Description: unknown [Arabidopsis thaliana]
  misc_feature (1)..(272): Homolog of NCBI NO: 34394164 NR Description: putative speckle-type POZ protein
MWGYKRFYKRTLLEESDFLKNDCLVMNCTVGVVKNRIETPKDIQIHVPRSDMGRCFKELLSRCIGCDITFEVRDEKVRAHKWILAARSPVFKAQFFGPIGKPDLHTVVVEDVEPVVFKAMVNFIYADELPSIPELAGSASTWTSTVVVQHLLAAADRYGLVRLRILCESKLCDELTPETVATTLALAEQHHCAELKSACLKFIALRGNLGAVMETEGFDYLEDTCPSLLSDLLATVAVVDDDLASLNRKRGVSGNQVMALVGSVERRTRRKL

SEQ ID NO: 2746 - DNA, 1392 bp, Zea mays subsp. mays
  misc_feature (1)..(1392): Ceres Seq. ID no. 12381199
  misc_feature: MA Experiment ID: 108522 Result: Up-regulated in Transcription
  misc_feature: MA Experiment 108522 PARAMETER Experiment Name: Zm_42deg_Heat_P Parameter: Age (day) Value: 8
  misc_feature: MA Experiment 108522 PARAMETER Experiment Name: Zm_42deg_Heat_P Parameter: Organism Value: Zea mays
  misc_feature: MA Experiment 108522 PARAMETER Experiment Name: Zm_42deg_Heat_P Parameter: Plant Line Value: 35A19
  misc_feature: MA Experiment 108522 PARAMETER Experiment Name: Zm_42deg_Heat_P Parameter: Temperature (deg C) Value: 42 vs. 22
  misc_feature: MA Experiment 108522 PARAMETER Experiment Name: Zm_42deg_Heat_P Parameter: Timepoint (hr) Value: 1
  misc_feature: MA Experiment 108522 PARAMETER Experiment Name: Zm_42deg_Heat_P Parameter: Tissue Value: Aerial
  misc_feature: MA Experiment ID: 108523 Result: Up-regulated in Transcription
  misc_feature: MA Experiment 108523 PARAMETER Experiment Name: Zm_42deg_Heat_P Parameter: Age (day) Value: 8
  misc_feature: MA Experiment 108523 PARAMETER Experiment Name: Zm_42deg_Heat_P Parameter: Organism Value: Zea mays
  misc_feature: MA Experiment 108523 PARAMETER Experiment Name: Zm_42deg_Heat_P Parameter: Plant Line Value: 35A19
  misc_feature: MA Experiment 108523 PARAMETER Experiment Name: Zm_42deg_Heat_P Parameter: Temperature (deg C) Value: 42 vs. 22
  misc_feature: MA Experiment 108523 PARAMETER Experiment Name: Zm_42deg_Heat_P Parameter: Timepoint (hr) Value: 6
  misc_feature: MA Experiment 108523 PARAMETER Experiment Name: Zm_42deg_Heat_P Parameter: Tissue Value: Aerial
aaaacacccccaatcccacccagaatccggcggaagtcaagccaacctccgtcctccatccatgggcgagcaatccctctcccagcccaaggcccagcctctctccccgttcccgtcgcctcccgcctccgccgcgttgccgccccccgcctctgcctcatgcctcatgcctctgctgcctccacctcccgcaccaccagcgccgcggcctcgcgccccaagaagaaggtgacgaacccatcgcccgaccgtaacccggcaaagaagccccgcctgacgttctcgatcccgggccggcccctgtccgcagtcggcgaggtgggcgtggccatccgctacctgcgcgccgcggaccccgtcctcgccgccgtcatcgacgcgcacgagccccccgtgttccagtgcccgcaccgcccgttccactccctcgtccgatccatcctgtaccagcagctcgccttcaaggccgccgcctccgtctactcccgcttcctcgcgcttctcggcggcgagtcctgcgtggcccccgatgccgtcctcgcgctcaccccgcaccagctccgccagatcggggtctccccgcgcaaggcttcctacctccacgacctcgcccgcaagtatgcctccgggatcctctccgacgccgccatcgtcaacatggacgaccgctccctcgccgccatgcttaccatggtcaagggcatcggctcctggagcgtccacatgttcatgatcttctctctcgcgcgccccgacgtgctcccctccgccgacctcggcgtgcgcaagggcgtgcagatgctctacgccctcgaggacgtgcctcgtccgtcgcagatggacaagctgtgcgagcggtggcgcccctatcgctcagttggggcttggtacatgtggcggctcattgaatccaaggtgccccagccagcgccggccatccctgttggatcacttgctttcccttcgccggacggcgcagagtatgctacagcagcaagaacaacagcaacagcagactgtcatccaaatgatcgacccccttcagatgctcccagggatggggtgaattcggtatcacgtctactaattagttactctactccgtcttagatcaatcaatggttactctgtgcatctgatagtcagctccacacgttgttgttctggaatggaaccgcaggagggtagaattggatatgaaatgaggtttgggcccaacttattaagttgtcaatttggtttgtgttgtttatctgtgtcaagaatctgtgaagatgatggttggctgttgtttacattgtaaaatccacctagcagtattttagaaccttctggaattgttccatgcttgtagttcacctgtgataaaatgattaagaccatgcttaacgc

SEQ ID NO: 2747 - protein, 369 aa, Zea mays subsp. mays
  peptide (1)..(369): Ceres Seq. ID no. 12381200
  misc_feature (144)..(289): Pfam Name: HhH-GPD superfamily base excision DNA repair protein Pfam Description: HhH-GPD superfamily base excision DNA repair
  misc_feature (110)..(300): Homolog of NCBI NO: 26987441 NR Description: DNA-3-methyladenine glycosylase [Pseudomonas
  misc_feature (110)..(300): Homolog of NCBI NO: 22971879 NR Description: hypothetical protein [Chloroflexus aurantiacus]
  misc_feature (110)..(303): Homolog of NCBI NO: 37521587 NR Description: probable DNA-3-methyladenine glycosylase
  misc_feature (58)..(305): Homolog of NCBI NO: 15230333 NR Description: putative DNA-3-methyladenine glycosidase; protein
  misc_feature (96)..(324): Homolog of NCBI NO: 25402893 NR Description: protein F18O14.25 [imported] - Arabidopsis
  misc_feature (96)..(324): Homolog of NCBI NO: 21593178 NR Description: unknown [Arabidopsis thaliana]
  misc_feature (96)..(324): Homolog of NCBI NO: 18394744 NR Description: Expressed protein
  misc_feature (1)..(321): Homolog of NCBI NO: 25406423 NR Description: hypothetical protein F22H5.5 [imported] -
  misc_feature (1)..(321): Homolog of NCBI NO: 18410802 NR Description: 3-methyladenine DNA glycosylase, putative
  misc_feature (57)..(316): Homolog of NCBI NO: 5091600 NR Description: This gene is a member of PF|01332 Alkylbase DNA
KTPPIPPRIRRKSSQPPSSIHGRAIPLPAQGPASLPVPVASRLRRVAAPRLCLMPHASAASTSRTTSAAASRPKKKVTNPSPDRNPAKKPRLTFSIPGRPLSAVGEVGVAIRYLRAADPVLAAVIDAHEPPVFQCPHRPFHSLVRSILYQQLAFKAAASVYSRFLALLGGESCVAPDAVLALTPHQLRQIGVSPRKASYLHDLARKYASGILSDAAIVNMDDRSLAAMLTMVKGIGSWSVHMFMIFSLARPDVLPSADLGVRKGVQMLYALEDVPRPSQMDKLCERWRPYRSVGAWYMWRLIESKVPQPAPAIPVGSLAFPSPDGAEYATAARTTATADCHPNDRPPSDAPRDGVNSVSRLLISYSTPS

SEQ ID NO: 2748 - protein, 316 aa, Zea mays subsp. mays
  peptide (1)..(316): Ceres Seq. ID no. 12381201
  misc_feature (91)..(236): Pfam Name: HhH-GPD superfamily base excision DNA repair protein Pfam Description: HhH-GPD superfamily base excision DNA repair
  misc_feature (57)..(247): Homolog of NCBI NO: 26987441 NR Description: DNA-3-methyladenine glycosylase [Pseudomonas
  misc_feature (57)..(247): Homolog of NCBI NO: 22971879 NR Description: hypothetical protein [Chloroflexus aurantiacus]
  misc_feature (57)..(250): Homolog of NCBI NO: 37521587 NR Description: probable DNA-3-methyladenine glycosylase
  misc_feature (5)..(252): Homolog of NCBI NO: 15230333 NR Description: putative DNA-3-methyladenine glycosidase; protein
  misc_feature (43)..(271): Homolog of NCBI NO: 25402893 NR Description: protein F18O14.25 [imported] - Arabidopsis
  misc_feature (43)..(271): Homolog of NCBI NO: 21593178 NR Description: unknown [Arabidopsis thaliana]
  misc_feature (43)..(271): Homolog of NCBI NO: 18394744 NR Description: Expressed protein
  misc_feature (1)..(268): Homolog of NCBI NO: 25406423 NR Description: hypothetical protein F22H5.5 [imported] -
  misc_feature (1)..(268): Homolog of NCBI NO: 18410802 NR Description: 3-methyladenine DNA glycosylase, putative
  misc_feature (4)..(263): Homolog of NCBI NO: 5091600 NR Description: This gene is a member of PF|01332 Alkylbase DNA
MPHASAASTSRTTSAAASRPKKKVTNPSPDRNPAKKPRLTFSIPGRPLSAVGEVGVAIRYLRAADPVLAAVIDAHEPPVFQCPHRPFHSLVRSILYQQLAFKAAASVYSRFLALLGGESCVAPDAVLALTPHQLRQIGVSPRKASYLHDLARKYASGILSDAAIVNMDDRSLAAMLTMVKGIGSWSVHMFMIFSLARPDVLPSADLGVRKGVQMLYALEDVPRPSQMDKLCERWRPYRSVGAWYMWRLIESKVPQPAPAIPVGSLAFPSPDGAEYATAARTTATADCHPNDRPPSDAPRDGVNSVSRLLISYSTPS

SEQ ID NO: 2749 - DNA, 1159 bp, Zea mays subsp. mays
  misc_feature (1)..(1159): Ceres Seq. ID no. 13492677
  misc_feature: MA Experiment ID: 108543 Result: Up-regulated in Transcription
  misc_feature: MA Experiment ID: 20000479 Result: Down-regulated in Transcription
  misc_feature: MA Experiment 20000479 PARAMETER Experiment Name: Zm_Drought_P Parameter: Age (day) Value: 10
  misc_feature: MA Experiment 20000479 PARAMETER Experiment Name: Zm_Drought_P Parameter: Organism Value: Zea mays
  misc_feature: MA Experiment 20000479 PARAMETER Experiment Name: Zm_Drought_P Parameter: Plant Line Value: 35A19
  misc_feature: MA Experiment 20000479 PARAMETER Experiment Name: Zm_Drought_P Parameter: Timepoint (hr) Value: 48
  misc_feature: MA Experiment 20000479 PARAMETER Experiment Name: Zm_Drought_P Parameter: Tissue Value: Aerial
  misc_feature: MA Experiment 20000479 PARAMETER Experiment Name: Zm_Drought_P Parameter: Treatment Value: Drought vs. No Drought
  misc_feature: MA Experiment ID: 20000480 Result: Down-regulated in Transcription
  misc_feature: MA Experiment 20000480 PARAMETER Experiment Name: Zm_Drought_P Parameter: Age (day) Value: 11
  misc_feature: MA Experiment 20000480 PARAMETER Experiment Name: Zm_Drought_P Parameter: Organism Value: Zea mays
  misc_feature: MA Experiment 20000480 PARAMETER Experiment Name: Zm_Drought_P Parameter: Plant Line Value: 35A19
  misc_feature: MA Experiment 20000480 PARAMETER Experiment Name: Zm_Drought_P Parameter: Timepoint (hr) Value: 72
  misc_feature: MA Experiment 20000480 PARAMETER Experiment Name: Zm_Drought_P Parameter: Tissue Value: Aerial
  misc_feature: MA Experiment 20000480 PARAMETER Experiment Name: Zm_Drought_P Parameter: Treatment Value: Drought vs. No Drought
ggccacaccttccgtcccccggcctccgctcgcctcgccgcccgcctgtccctgtctgtctctctctctcctcgctgagtcgccgccagccatgaacaacctcctcacggattcctttgagctcccccggcgggactcctcaagagatgcagacattgaaatgggaatgcatcaagctgatgcttcagacaacttaaaagatttcttgaagaaggtcgatacaattgagagtttaattgcaaagctgacaaatctattgaataagctacagactgcaaatgaggaatccaaagcagttacaaaagcaagttccatgaaagcaattaagcagcggatggagaaagatattgatgaagtggggaaaattgctcgtcaggcgaagacaaaagttgatgaattggaaaaagacaacttatcaaataggcaaaaacctggatgtggaaaaggttctgccgtggaccgatcaagagagcaaactactggagcagtgaaaaagaaattgaaggagcggatggatgactttcagaccttgagagaagcaatcaggcaagagtatcgggaggttgttgaaagaagggtttttactgtaactggtaatcgtcctgatgaagagacaattgatgacttgatagagaccggaaaaagtgagcaaatattcaaagatgctatccaacatcagggaagaggccagatactagacactgttgctgaaatacaggagcgacatgatgctgtaagggatctagagaggaagcttctggagttgcaacagatattcatggacatggcagttcttgttgaggcgcaaggagacatgatcaacaacatcgagacccatgtctcgaacgccaccaaccacatacagcaaggtgtgagcgcgctccagaacgcgaagaaactgcagaggaattcgaggaagtggatgtgctacgccatcatcatactgctggtgatagtcgtggtcattgtcgtcgcagtcatccagccatggaagaagggcacctagcgtggtggtgccttttttcctgtttgtgtaatatgtgtgcagttttttttgtgggtgattcgtgatttgttgttgtacctatagtcgacgcaacaggagctctggcatttcgattcattctgtctagtgaaaggacactgccatcatatgccg

SEQ ID NO: 2750 - protein, 334 aa, Zea mays subsp. mays
  peptide (1)..(334): Ceres Seq. ID no. 13492678
  misc_feature (31)..(331): Homolog of NCBI NO: 18415701 NR Description: syntaxin of plants SYP132 [Arabidopsis thaliana]
  misc_feature (31)..(333): Homolog of NCBI NO: 34899960 NR Description: P0428D12.21 [Oryza sativa (japonica
  misc_feature (31)..(333): Homolog of NCBI NO: 33146794 NR Description: putative syntaxin-related protein
  misc_feature (31)..(327): Homolog of NCBI NO: 15236285 NR Description: syntaxin of plants SYP123 [Arabidopsis thaliana]
  misc_feature (31)..(327): Homolog of NCBI NO: 15220328 NR Description: syntaxin of plants SYP125 [Arabidopsis thaliana]
  misc_feature (31)..(332): Homolog of NCBI NO: 4206787 NR Description: syntaxin-related protein Nt-syr1 [Nicotiana
  misc_feature (31)..(334): Homolog of NCBI NO: 15229865 NR Description: syntaxin of plants SYP121 [Arabidopsis thaliana]
  misc_feature (31)..(333): Homolog of NCBI NO: 34899972 NR Description: P0039H02.3 [Oryza sativa (japonica
  misc_feature (31)..(330): Homolog of NCBI NO: 15228637 NR Description: syntaxin of plants SYP131 [Arabidopsis thaliana]
  misc_feature (31)..(331): Homolog of NCBI NO: 11358872 NR Description: syntaxin-like protein - Arabidopsis thaliana
ATPSVPRPPLASPPACPCLSLSLLAESPPAMNNLLTDSFELPRRDSSRDADIEMGMHQADASDNLKDFLKKVDTIESLIAKLTNLLNKLQTANEESKAVTKASSMKAIKQRMEKDIDEVGKIARQAKTKVDELEKDNLSNRQKPGCGKGSAVDRSREQTTGAVKKKLKERMDDFQTLREAIRQEYREVVERRVFTVTGNRPDEETIDDLIETGKSEQIFKDAIQHQGRGQILDTVAEIQERHDAVRDLERKLLELQQIFMDMAVLVEAQGDMINNIETHVSNATNHIQQGVSALQNAKKLQRNSRKWMCYAIIILLVIVVVIVVAVIQPWKKGT

SEQ ID NO: 2751 - protein, 304 aa, Zea mays subsp. mays
  peptide (1)..(304): Ceres Seq. ID no. 13492679
  misc_feature (1)..(297): Homolog of NCBI NO: 15236285 NR Description: syntaxin of plants SYP123 [Arabidopsis thaliana]
  misc_feature (1)..(297): Homolog of NCBI NO: 15220328 NR Description: syntaxin of plants SYP125 [Arabidopsis thaliana]
  misc_feature (1)..(302): Homolog of NCBI NO: 4206787 NR Description: syntaxin-related protein Nt-syr1 [Nicotiana
  misc_feature (1)..(304): Homolog of NCBI NO: 15229865 NR Description: syntaxin of plants SYP121 [Arabidopsis thaliana]
  misc_feature (1)..(303): Homolog of NCBI NO: 34899972 NR Description: P0039H02.3 [Oryza sativa (japonica
  misc_feature (1)..(300): Homolog of NCBI NO: 15228637 NR Description: syntaxin of plants SYP131 [Arabidopsis thaliana]
  misc_feature (1)..(301): Homolog of NCBI NO: 11358872 NR Description: syntaxin-like protein - Arabidopsis thaliana
  misc_feature (1)..(301): Homolog of NCBI NO: 18415701 NR Description: syntaxin of plants SYP132 [Arabidopsis thaliana]
  misc_feature (1)..(303): Homolog of NCBI NO: 34899960 NR Description: P0428D12.21 [Oryza sativa (japonica
  misc_feature (1)..(303): Homolog of NCBI NO: 33146794 NR Description: putative syntaxin-related protein
MNNLLTDSFELPRRDSSRDADIEMGMHQADASDNLKDFLKKVDTIESLIAKLTNLLNKLQTANEESKAVTKASSMKAIKQRMEKDIDEVGKIARQAKTKVDELEKDNLSNRQKPGCGKGSAVDRSREQTTGAVKKKLKERMDDFQTLREAIRQEYREVVERRVFTVTGNRPDEETIDDLIETGKSEQIFKDAIQHQGRGQILDTVAEIQERHDAVRDLERKLLELQQIFMDMAVLVEAQGDMINNIETHVSNATNHIQQGVSALQNAKKLQRNSRKWMCYAIIILLVIVVVIVVAVIQPWKKGT

SEQ ID NO: 2752 - protein, 281 aa, Zea mays subsp. mays
  peptide (1)..(281): Ceres Seq. ID no. 13492680
  misc_feature (1)..(274): Homolog of NCBI NO: 15236285 NR Description: syntaxin of plants SYP123 [Arabidopsis thaliana]
  misc_feature (1)..(274): Homolog of NCBI NO: 15220328 NR Description: syntaxin of plants SYP125 [Arabidopsis thaliana]
  misc_feature (1)..(279): Homolog of NCBI NO: 4206787 NR Description: syntaxin-related protein Nt-syr1 [Nicotiana
  misc_feature (1)..(281): Homolog of NCBI NO: 15229865 NR Description: syntaxin of plants SYP121 [Arabidopsis thaliana]
  misc_feature (1)..(280): Homolog of NCBI NO: 34899972 NR Description: P0039H02.3 [Oryza sativa (japonica
  misc_feature (1)..(277): Homolog of NCBI NO: 15228637 NR Description: syntaxin of plants SYP131 [Arabidopsis thaliana]
  misc_feature (1)..(278): Homolog of NCBI NO: 11358872 NR Description: syntaxin-like protein - Arabidopsis thaliana
  misc_feature (1)..(278): Homolog of NCBI NO: 18415701 NR Description: syntaxin of plants SYP132 [Arabidopsis thaliana]
  misc_feature (1)..(280): Homolog of NCBI NO: 34899960 NR Description: P0428D12.21 [Oryza sativa (japonica
  misc_feature (1)..(280): Homolog of NCBI NO: 33146794 NR Description: putative syntaxin-related protein
MGMHQADASDNLKDFLKKVDTIESLIAKLTNLLNKLQTANEESKAVTKASSMKAIKQRMEKDIDEVGKIARQAKTKVDELEKDNLSNRQKPGCGKGSAVDRSREQTTGAVKKKLKERMDDFQTLREAIRQEYREVVERRVFTVTGNRPDEETIDDLIETGKSEQIFKDAIQHQGRGQILDTVAEIQERHDAVRDLERKLLELQQIFMDMAVLVEAQGDMINNIETHVSNATNHIQQGVSALQNAKKLQRNSRKWMCYAIIILLVIVVVIVVAVIQPWKKGT

SEQ ID NO: 2753 - DNA, 1352 bp, Zea mays subsp. mays
  misc_feature (1)..(1352): Ceres Seq. ID no. 13493446
  misc_feature: MA Experiment ID: 108556 Result: Down-regulated in Transcription
  misc_feature: MA Experiment 108556 PARAMETER Experiment Name: Zm_Drought_P Parameter: Age (day) Value: 9
  misc_feature: MA Experiment 108556 PARAMETER Experiment Name: Zm_Drought_P Parameter: Organism Value: Zea mays
  misc_feature: MA Experiment 108556 PARAMETER Experiment Name: Zm_Drought_P Parameter: Plant Line Value: 35A19
  misc_feature: MA Experiment 108556 PARAMETER Experiment Name: Zm_Drought_P Parameter: Timepoint (hr) Value: 24
  misc_feature: MA Experiment 108556 PARAMETER Experiment Name: Zm_Drought_P Parameter: Tissue Value: Aerial
  misc_feature: MA Experiment 108556 PARAMETER Experiment Name: Zm_Drought_P Parameter: Treatment Value: Drought vs. No Drought
  misc_feature: MA Experiment ID: 108689 Result: Down-regulated in Transcription
  misc_feature: MA Experiment 108689 PARAMETER Experiment Name: Zm_Drought_Roots_P Parameter: Age (day) Value: 9
  misc_feature: MA Experiment 108689 PARAMETER Experiment Name: Zm_Drought_Roots_P Parameter: Organism Value: Zea mays
  misc_feature: MA Experiment 108689 PARAMETER Experiment Name: Zm_Drought_Roots_P Parameter: Plant Line Value: 35A19
  misc_feature: MA Experiment 108689 PARAMETER Experiment Name: Zm_Drought_Roots_P Parameter: Timepoint (hr) Value: 24
  misc_feature: MA Experiment 108689 PARAMETER Experiment Name: Zm_Drought_Roots_P Parameter: Tissue Value: Roots
  misc_feature: MA Experiment 108689 PARAMETER Experiment Name: Zm_Drought_Roots_P Parameter: Treatment Value: Drought vs. No Drought
  misc_feature: MA Experiment ID: 20000108 Result: Down-regulated in Transcription
  misc_feature: MA Experiment 20000108 PARAMETER Experiment Name: Zm_Root-Tips_P Parameter: Age (day) Value: 12
  misc_feature: MA Experiment 20000108 PARAMETER Experiment Name: Zm_Root-Tips_P Parameter: Organism Value: Zea mays
  misc_feature: MA Experiment 20000108 PARAMETER Experiment Name: Zm_Root-Tips_P Parameter: Tissue Value: Root tips vs. Root mid region    35
  misc_feature: MA Experiment 20000108 PARAMETER Experiment Name: Zm_Root-Tips_P Parameter: Tissue Value: Root tips vs. Root mid region   Sequence Listing-Misc Features (4)
  misc_feature: MA Experiment ID: 20000477 Result: Down-regulated in Transcription
  misc_feature: MA Experiment 20000477 PARAMETER Experiment Name: Zm_5mM_SA_P Parameter: Age (day) Value: 10
  misc_feature: MA Experiment 20000477 PARAMETER Experiment Name: Zm_5mM_SA_P Parameter: Organism Value: Zea mays
  misc_feature: MA Experiment 20000477 PARAMETER Experiment Name: Zm_5mM_SA_P Parameter: Plant Line Value: 35A19
  misc_feature: MA Experiment 20000477 PARAMETER Experiment Name: Zm_5mM_SA_P Parameter: Timepoint (hr) Value: 48
  misc_feature: MA Experiment 20000477 PARAMETER Experiment Name: Zm_5mM_SA_P Parameter: Tissue Value: Aerial
  misc_feature: MA Experiment 20000477 PARAMETER Experiment Name: Zm_5mM_SA_P Parameter: Treatment Value: 5mM SA vs. No Treatment
  misc_feature: MA Experiment ID: 20000535 Result: Down-regulated in Transcription
  misc_feature: MA Experiment 20000535 PARAMETER Experiment Name: Zm_Hybrid_Seed_Dev_P Parameter: DAP Value: 30 vs. 12
  misc_feature: MA Experiment 20000535 PARAMETER Experiment Name: Zm_Hybrid_Seed_Dev_P Parameter: Organism Value: Zea mays
  misc_feature: MA Experiment 20000535 PARAMETER Experiment Name: Zm_Hybrid_Seed_Dev_P Parameter: Plant Line Value: 35A19
  misc_feature: MA Experiment 20000535 PARAMETER Experiment Name: Zm_Hybrid_Seed_Dev_P Parameter: Tissue Value: Embryo vs. Unfert Floret
tcggcaaatatacactgcgcccgtccgcctccgcaatcgacaacgaaccactgggcaccggccgcggctcgcaagtngcctgcgttcctcttccacgctccgcccacccgtcccggggcccgccgcaacccgatccctccccgcgcccaacgatgccggccggccagccgcacgcgcacgaagccgctgccgccgcctgcgtcggcagcggcgcgaaccactccaaccaccgagtgccggcgcactcgccaccgccgctccccgcggaggtggtgccggcgtacccgcccccggagtcggaggacgacgagacctgggtgtggacgcagatcaaggcggaggcccgccgcgacgcggacgcggagccggcgctcgcctccttcctctacgccaccgtgttgtcccacccgtccctgccccgctccctctccttccacctcgccaacaagctctgctcctccacgctcctctccacgctcctctacgacctcttcctcgccacgctcaccgcgcacccctctctccgcgccgccgtcgtcgccgacctcctcgcggcccactcccgcgaccccgcctgcgtcggcttctcccactgcctcctcaactacaagggcttcctcgccatccaggcccaccgcgtcgcgcacgtgctctgggcgcagcagcgacggcccctcgcgctcgcgctccagtcccgcgtcgccgacgtcttcgccgttgacatccaccccgccgccgtcgtcgggaagggaatcctcctcgaccacgccaccggcgtcgtcatcggtgagacggccgtcgtcggcgacaacgtctccatcctccaccacgtcaccttgggcgggaccgggaaggcggtgggtgaccggcaccccaagattggggatggcgtgctgattggagcaggggccaccattcttggtaacgtgaaaattggtgccggggctaagattggagccggatccgtggtgctgatagatgtgccggcgaggagcacggcggttggaaccctgccaggctgatggtggaagaaggccgaggtgcgaatgaggaggacatgccaggggagtccatggatcacacgtccttcatacgtcaatggtcggactacaccatttgagagcggttatccaaggtctattgctcttcttttgtatcactagtaatggtgatgtaccaaataccgagtacttgctctttgttgtgtgtctatggtttgtgtattgtacttagaagcctagtggtgtttatgatcattgtcagctgagtgtgccatgcctgaatactggtaaatttcgattgatggatggacaaatctgtatgagagttggttggaatttgtcacattcctt

SEQ ID NO: 2754 - protein, 339 aa, Zea mays subsp. mays
  peptide (1)..(339): Ceres Seq. ID no. 13493447
  misc_feature (88)..(335): Homolog of NCBI NO: 21537083 NR Description: serine O-acetyltransferase (EC 2.3.1.30) Sat-52
  misc_feature (88)..(335): Homolog of NCBI NO: 15241928 NR Description: serine acetyltransferase (Sat-52) [Arabidopsis
  misc_feature (99)..(335): Homolog of NCBI NO: 1361979 NR Description: serine O-acetyltransferase (EC 2.3.1.30) -
  misc_feature (87)..(335): Homolog of NCBI NO: 28460066 NR Description: serine O-acetyltransferase [Beta vulgaris]
  misc_feature (94)..(335): Homolog of NCBI NO: 23343585 NR Description: serine acetyltransferase 7 [Nicotiana tabacum]
  misc_feature (91)..(335): Homolog of NCBI NO: 6601494 NR Description: serine acetyltransferase [Allium cepa]
  misc_feature (86)..(335): Homolog of NCBI NO: 7384806 NR Description: serine acetyltransferase [Allium tuberosum]
  misc_feature (81)..(335): Homolog of NCBI NO: 25991547 NR Description: satase isoform I [Zea mays]
  misc_feature (81)..(335): Homolog of NCBI NO: 34910686 NR Description: putative serine acetyltransferase
  misc_feature (51)..(339): Homolog of NCBI NO: 25991545 NR Description: satase isoform III [Zea mays]
  misc_feature (25)..(25): Xaa is any aa, unknown or other
GKYTLRPSASAIDNEPLGTGRGSQXACVPLPRSAHPSRGPPQPDPSPRPTMPAGQPHAHEAAAAACVGSGANHSNHRVPAHSPPPLPAEVVPAYPPPESEDDETWVWTQIKAEARRDADAEPALASFLYATVLSHPSLPRSLSFHLANKLCSSTLLSTLLYDLFLATLTAHPSLRAAVVADLLAAHSRDPACVGFSHCLLNYKGFLAIQAHRVAHVLWAQQRRPLALALQSRVADVFAVDIHPAAVVGKGILLDHATGVVIGETAVVGDNVSILHHVTLGGTGKAVGDRHPKIGDGVLIGAGATILGNVKIGAGAKIGAGSVVLIDVPARSTAVGTLPG

SEQ ID NO: 2755 - protein, 298 aa, Zea mays subsp. mays
  peptide (1)..(298): Ceres Seq. ID no. 13493448
  misc_feature (143)..(278): Pfam Name: Equine herpesvirus glycoprotein gp2 Pfam Description: Equine herpesvirus glycoprotein gp2
  misc_feature (9)..(279): Homolog of NCBI NO: 2135765 NR Description: mucin 2 precursor, intestinal - human (fragments)
  misc_feature (7)..(295): Homolog of NCBI NO: 23017082 NR Description: hypothetical protein [Thermobifida fusca]
  misc_feature (9)..(282): Homolog of NCBI NO: 188864 NR Description: mucin
  misc_feature (7)..(278): Homolog of NCBI NO: 23017082 NR Description: hypothetical protein [Thermobifida fusca]
  misc_feature (9)..(283): Homolog of NCBI NO: 188864 NR Description: mucin
  misc_feature (9)..(277): Homolog of NCBI NO: 2135765 NR Description: mucin 2 precursor, intestinal - human (fragments)
  misc_feature (9)..(279): Homolog of NCBI NO: 188864 NR Description: mucin
  misc_feature (9)..(277): Homolog of NCBI NO: 188864 NR Description: mucin
  misc_feature (9)..(279): Homolog of NCBI NO: 2135765 NR Description: mucin 2 precursor, intestinal - human (fragments)
  misc_feature (9)..(279): Homolog of NCBI NO: 188864 NR Description: mucin
  misc_feature (26)..(26): Xaa is any aa, unknown or other
SANIHCARPPPQSTTNHWAPAAARKXPAFLFHAPPTRPGARRNPIPPRAQRCRPASRTRTKPLPPPASAAARTTPTTECRRTRHRRSPRRWCRRTRPRSRRTTRPGCGRRSRRRPAATRTRSRRSPPSSTPPCCPTRPCPAPSPSTSPTSSAPPRSSPRSSTTSSSPRSPRTPLSAPPSSPTSSRPTPATPPASASPTASSTTRASSPSRPTASRTCSGRSSDGPSRSRSSPASPTSSPLTSTPPPSSGRESSSTTPPASSSVRRPSSATTSPSSTTSPWAGPGRRWVTGTPRLGMAC

SEQ ID NO: 2756 - protein, 289 aa, Zea mays subsp. mays
  peptide (1)..(289): Ceres Seq. ID no. 13493449
  misc_feature (38)..(285): Homolog of NCBI NO: 21537083 NR Description: serine O-acetyltransferase (EC 2.3.1.30) Sat-52
  misc_feature (38)..(285): Homolog of NCBI NO: 15241928 NR Description: serine acetyltransferase (Sat-52) [Arabidopsis
  misc_feature (49)..(285): Homolog of NCBI NO: 1361979 NR Description: serine O-acetyltransferase (EC 2.3.1.30) -
  misc_feature (37)..(285): Homolog of NCBI NO: 28460066 NR Description: serine O-acetyltransferase [Beta vulgaris]
  misc_feature (44)..(285): Homolog of NCBI NO: 23343585 NR Description: serine acetyltransferase 7 [Nicotiana tabacum]
  misc_feature (41)..(285): Homolog of NCBI NO: 6601494 NR Description: serine acetyltransferase [Allium cepa]
  misc_feature (36)..(285): Homolog of NCBI NO: 7384806 NR Description: serine acetyltransferase [Allium tuberosum]
  misc_feature (31)..(285): Homolog of NCBI NO: 25991547 NR Description: satase isoform I [Zea mays]
  misc_feature (31)..(285): Homolog of NCBI NO: 34910686 NR Description: putative serine acetyltransferase
  misc_feature (1)..(289): Homolog of NCBI NO: 25991545 NR Description: satase isoform III [Zea mays]
MPAGQPHAHEAAAAACVGSGANHSNHRVPAHSPPPLPAEVVPAYPPPESEDDETWVWTQIKAEARRDADAEPALASFLYATVLSHPSLPRSLSFHLANKLCSSTLLSTLLYDLFLATLTAHPSLRAAVVADLLAAHSRDPACVGFSHCLLNYKGFLAIQAHRVAHVLWAQQRRPLALALQSRVADVFAVDIHPAAVVGKGILLDHATGVVIGETAVVGDNVSILHHVTLGGTGKAVGDRHPKIGDGVLIGAGATILGNVKIGAGAKIGAGSVVLIDVPARSTAVGTLPG

SEQ ID NO: 2757 - DNA, 1589 bp, Zea mays subsp. mays
  misc_feature (1)..(1589): Ceres Seq. ID no. 12410562
  misc_feature: MA Experiment ID: 108522 Result: Up-regulated in Transcription
  misc_feature: MA Experiment 108522 PARAMETER Experiment Name: Zm_42deg_Heat_P Parameter: Age (day) Value: 8
  misc_feature: MA Experiment 108522 PARAMETER Experiment Name: Zm_42deg_Heat_P Parameter: Organism Value: Zea mays
  misc_feature: MA Experiment 108522 PARAMETER Experiment Name: Zm_42deg_Heat_P Parameter: Plant Line Value: 35A19
  misc_feature: MA Experiment 108522 PARAMETER Experiment Name: Zm_42deg_Heat_P Parameter: Temperature (deg C) Value: 42 vs. 22
  misc_feature: MA Experiment 108522 PARAMETER Experiment Name: Zm_42deg_Heat_P Parameter: Timepoint (hr) Value: 1
  misc_feature: MA Experiment 108522 PARAMETER Experiment Name: Zm_42deg_Heat_P Parameter: Tissue Value: Aerial
  misc_feature: MA Experiment ID: 108527 Result: Up-regulated in Transcription
  misc_feature: MA Experiment 108527 PARAMETER Experiment Name: Zm_5mM_NO_P Parameter: Age (day) Value: 8
  misc_feature: MA Experiment 108527 PARAMETER Experiment Name: Zm_5mM_NO_P Parameter: Organism Value: Zea mays
  misc_feature: MA Experiment 108527 PARAMETER Experiment Name: Zm_5mM_NO_P Parameter: Plant Line Value: 35A19
  misc_feature: MA Experiment 108527 PARAMETER Experiment Name: Zm_5mM_NO_P Parameter: Timepoint (hr) Value: 6
  misc_feature: MA Experiment 108527 PARAMETER Experiment Name: Zm_5mM_NO_P Parameter: Tissue Value: Aerial
  misc_feature: MA Experiment 108527 PARAMETER Experiment Name: Zm_5mM_NO_P Parameter: Treatment Value: 5mM NO vs. No Treatment
gtcgatttggattcgcagcggcggcggcggccaatcaaagcaatcatcacccagtcgcccagccccaacagacgctccagtccccagccctcccacccgcatcgatcgatgcgaggcacaatgccggccaccgactcctcctcctcgtcgtcgccggcggcggcgccgctgtcctctatcggccgctccatccgctcgctccgccgtgaccagaaccagatccactccttcccgccgccgccagacgccacagacgccttccagcgccgcgccgcccaactcctggccgacctcccggcagccgacgacgtcctctccctcgcctggacgcgccgcctcctcgaatccttcctcctctgcctcgaggagttccgcgccctgctcttcggctccggggactcgcccgccgctcgccccccgctcgaccgcctcgtcgccgacttctccgaccgcgccgtcaaggcgctcgacctctgcaacgccgtccgcgacggcctcgacctcgtccgccagtggcgcaagcacctcgccatcgccgcagccgtcctcgcctcgtcctctgattcctcctcgccgctcggggaggcccagatccgccgcgcccgcaaggcgctcaccgacctcaccatcctcatgctcgacgacagggacggcgggggcgtcgtcggccagcgcaaccgatccttcggccgcgccaacgagaagccccctcgccaccaccgccggagcagcagcggcgggagctccggctccggctccggctcccacctcaggtccctctcctggagcgtgtcccgggcctggtccgccgcgcgccagctgcaggccatcgggggaggactccccgtgccccgcccgcacgacaacgctgccacgggaggcctcgcctccgccgtctacaccatgggcgccgtcctcttcatcgtcgccttcgcgctcgtcgccgcaatcccgtgccaggaccgcggcctccacgcgcatttctccgtcatcaggaacctcccctgctcggcccccatcacaacgctctacgagcgcatcctcgacgagtccaagaagaaggaccgcaagaactcgtgcggcctgctcaaggagatccaccagattgagctctgctccaggcacctcatggagatcactgacgccgccgacttcccgttgcgcgaggacaaggacgccgtcttgcgggaggccgcgcaggacctagtgcacctgtgcgaatccatcaaggaagggctcgacccgctcgagcgccaggtcagagagatgttccacaggattgtgcgcacccgcacagaaatccttgactgcttgagtaagccacatggcaccgggtgatgggatacaggagattgccagcccgtttgcttgctgtgatgccccttaaccaaacattcttgtgaaatgcagcagcggtgttcagatgaggtagccttttctctgcataagttagcaactactgcatcatacaaatgcgtcttcatagaggcttgtccttctgtttgatataaattggtttgtttattatttttatttcatttcctcatctgtgtagattgtgaatccatacttggcagtgcttcgtagtc

SEQ ID NO: 2758 - protein, 445 aa, Zea mays subsp. mays
  peptide (1)..(445): Ceres Seq. ID no. 12410563
  misc_feature (85)..(438): Pfam Name: Protein of unknown function (DUF793) Pfam Description: Protein of unknown function (DUF793)
  misc_feature (59)..(255): Homolog of NCBI NO: 15218428 NR Description: hypothetical protein; protein id: At1g43630.1
  misc_feature (101)..(440): Homolog of NCBI NO: 15236522 NR Description: putative protein
  misc_feature (194)..(440): Homolog of NCBI NO: 15218428 NR Description: hypothetical protein; protein id: At1g43630.1
  misc_feature (78)..(440): Homolog of NCBI NO: 15222577 NR Description: hypothetical protein; protein id: At1g63930.1
  misc_feature (52)..(438): Homolog of NCBI NO: 21593634 NR Description: unknown [Arabidopsis thaliana]
  misc_feature (52)..(438): Homolog of NCBI NO: 18394649 NR Description: expressed protein
  misc_feature (52)..(444): Homolog of NCBI NO: 18410617 NR Description: expressed protein
  misc_feature (52)..(444): Homolog of NCBI NO: 21536674 NR Description: unknown [Arabidopsis thaliana]
  misc_feature (41)..(445): Homolog of NCBI NO: 38345505 NR Description: OSJNBa0039K24.3 [Oryza sativa (japonica
  misc_feature (85)..(445): Homolog of NCBI NO: 5777630 NR Description: CAA303718.1 protein [Oryza sativa]
VDLDSQRRRRPIKAIITQSPSPNRRSSPQPSHPHRSMRGTMPATDSSSSSSPAAAPLSSIGRSIRSLRRDQNQIHSFPPPPDATDAFQRRAAQLLADLPAADDVLSLAWTRRLLESFLLCLEEFRALLFGSGDSPAARPPLDRLVADFSDRAVKALDLCNAVRDGLDLVRQWRKHLAIAAAVLASSSDSSSPLGEAQIRRARKALTDLTILMLDDRDGGGVVGQRNRSFGRANEKPPRHHRRSSSGGSSGSGSGSHLRSLSWSVSRAWSAARQLQAIGGGLPVPRPHDNAATGGLASAVYTMGAVLFIVAFALVAAIPCQDRGLHAHFSVIRNLPCSAPITTLYERILDESKKKDRKNSCGLLKEIHQIELCSRHLMEITDAADFPLREDKDAVLREAAQDLVHLCESIKEGLDPLERQVREMFHRIVRTRTEILDCLSKPHGTG

SEQ ID NO: 2759 - protein, 409 aa, Zea mays subsp. mays
  peptide (1)..(409): Ceres Seq. ID no. 12410564
  misc_feature (49)..(402): Pfam Name: Protein of unknown function (DUF793) Pfam Description: Protein of unknown function (DUF793)
  misc_feature (23)..(219): Homolog of NCBI NO: 15218428 NR Description: hypothetical protein; protein id: At1g43630.1
  misc_feature (65)..(404): Homolog of NCBI NO: 15236522 NR Description: putative protein
  misc_feature (158)..(404): Homolog of NCBI NO: 15218428 NR Description: hypothetical protein; protein id: At1g43630.1
  misc_feature (42)..(404): Homolog of NCBI NO: 15222577 NR Description: hypothetical protein; protein id: At1g63930.1
  misc_feature (16)..(402): Homolog of NCBI NO: 21593634 NR Description: unknown [Arabidopsis thaliana]
  misc_feature (16)..(402): Homolog of NCBI NO: 18394649 NR Description: expressed protein
  misc_feature (16)..(408): Homolog of NCBI NO: 18410617 NR Description: expressed protein
  misc_feature (16)..(408): Homolog of NCBI NO: 21536674 NR Description: unknown [Arabidopsis thaliana]
  misc_feature (5)..(409): Homolog of NCBI NO: 38345505 NR Description: OSJNBa0039K24.3 [Oryza sativa (japonica
  misc_feature (49)..(409): Homolog of NCBI NO: 5777630 NR Description: CAA303718.1 protein [Oryza sativa]
MRGTMPATDSSSSSSPAAAPLSSIGRSIRSLRRDQNQIHSFPPPPDATDAFQRRAAQLLADLPAADDVLSLAWTRRLLESFLLCLEEFRALLFGSGDSPAARPPLDRLVADFSDRAVKALDLCNAVRDGLDLVRQWRKHLAIAAAVLASSSDSSSPLGEAQIRRARKALTDLTILMLDDRDGGGVVGQRNRSFGRANEKPPRHHRRSSSGGSSGSGSGSHLRSLSWSVSRAWSAARQLQAIGGGLPVPRPHDNAATGGLASAVYTMGAVLFIVAFALVAAIPCQDRGLHAHFSVIRNLPCSAPITTLYERILDESKKKDRKNSCGLLKEIHQIELCSRHLMEITDAADFPLREDKDAVLREAAQDLVHLCESIKEGLDPLERQVREMFHRIVRTRTEILDCLSKPHGTG

SEQ ID NO: 2760 - protein, 405 aa, Zea mays subsp. mays
  peptide (1)..(405): Ceres Seq. ID no. 12410565
  misc_feature (45)..(398): Pfam Name: Protein of unknown function (DUF793) Pfam Description: Protein of unknown function (DUF793)
  misc_feature (61)..(400): Homolog of NCBI NO: 15236522 NR Description: putative protein
  misc_feature (154)..(400): Homolog of NCBI NO: 15218428 NR Description: hypothetical protein; protein id: At1g43630.1
  misc_feature (38)..(400): Homolog of NCBI NO: 15222577 NR Description: hypothetical protein; protein id: At1g63930.1
  misc_feature (12)..(398): Homolog of NCBI NO: 21593634 NR Description: unknown [Arabidopsis thaliana]
  misc_feature (12)..(398): Homolog of NCBI NO: 18394649 NR Description: expressed protein
  misc_feature (19)..(215): Homolog of NCBI NO: 15218428 NR Description: hypothetical protein; protein id: At1g43630.1
  misc_feature (12)..(404): Homolog of NCBI NO: 18410617 NR Description: expressed protein
  misc_feature (12)..(404): Homolog of NCBI NO: 21536674 NR Description: unknown [Arabidopsis thaliana]
  misc_feature (1)..(405): Homolog of NCBI NO: 38345505 NR Description: OSJNBa0039K24.3 [Oryza sativa (japonica
  misc_feature (45)..(405): Homolog of NCBI NO: 5777630 NR Description: CAA303718.1 protein [Oryza sativa]
MPATDSSSSSSPAAAPLSSIGRSIRSLRRDQNQIHSFPPPPDATDAFQRRAAQLLADLPAADDVLSLAWTRRLLESFLLCLEEFRALLFGSGDSPAARPPLDRLVADFSDRAVKALDLCNAVRDGLDLVRQWRKHLAIAAAVLASSSDSSSPLGEAQIRRARKALTDLTILMLDDRDGGGVVGQRNRSFGRANEKPPRHHRRSSSGGSSGSGSGSHLRSLSWSVSRAWSAARQLQAIGGGLPVPRPHDNAATGGLASAVYTMGAVLFIVAFALVAAIPCQDRGLHAHFSVIRNLPCSAPITTLYERILDESKKKDRKNSCGLLKEIHQIELCSRHLMEITDAADFPLREDKDAVLREAAQDLVHLCESIKEGLDPLERQVREMFHRIVRTRTEILDCLSKPHGTG

SEQ ID NO: 2761 - DNA, 1299 bp, Zea mays subsp. mays
  misc_feature (1)..(1299): Ceres Seq. ID no. 13498950
  misc_feature: MA Experiment ID: 108504 Result: Down-regulated in Transcription
  misc_feature: MA Experiment 108504 PARAMETER Experiment Name: Zm_Drought_P Parameter: Age (day) Value: 8
  misc_feature: MA Experiment 108504 PARAMETER Experiment Name: Zm_Drought_P Parameter: Organism Value: Zea mays
  misc_feature: MA Experiment 108504 PARAMETER Experiment Name: Zm_Drought_P Parameter: Plant Line Value: 35A19
  misc_feature: MA Experiment 108504 PARAMETER Experiment Name: Zm_Drought_P Parameter: Timepoint (hr) Value: 12
  misc_feature: MA Experiment 108504 PARAMETER Experiment Name: Zm_Drought_P Parameter: Tissue Value: Aerial
  misc_feature: MA Experiment 108504 PARAMETER Experiment Name: Zm_Drought_P Parameter: Treatment Value: Drought vs. No Drought
  misc_feature: MA Experiment ID: 108529 Result: Up-regulated in Transcription
  misc_feature: MA Experiment 108529 PARAMETER Experiment Name: Zm_Imbibed_Seeds_P Parameter: Age (day) Value: 5 vs. 2
  misc_feature: MA Experiment 108529 PARAMETER Experiment Name: Zm_Imbibed_Seeds_P Parameter: Organism Value: Zea mays
  misc_feature: MA Experiment 108529 PARAMETER Experiment Name: Zm_Imbibed_Seeds_P Parameter: Plant Line Value: 35A19
  misc_feature: MA Experiment 108529 PARAMETER Experiment Name: Zm_Imbibed_Seeds_P Parameter: Tissue Value: Roots vs. Embryo
  misc_feature: MA Experiment ID: 108530 Result: Up-regulated in Transcription
  misc_feature: MA Experiment 108530 PARAMETER Experiment Name: Zm_Imbibed_Seeds_P Parameter: Age (day) Value: 6 vs. 2
  misc_feature: MA Experiment 108530 PARAMETER Experiment Name: Zm_Imbibed_Seeds_P Parameter: Organism Value: Zea mays
  misc_feature: MA Experiment 108530 PARAMETER Experiment Name: Zm_Imbibed_Seeds_P Parameter: Plant Line Value: 35A19
  misc_feature: MA Experiment 108530 PARAMETER Experiment Name: Zm_Imbibed_Seeds_P Parameter: Tissue Value: Aerial vs. Embryo
  misc_feature: MA Experiment ID: 108534 Result: Down-regulated in Transcription
  misc_feature: MA Experiment 108534 PARAMETER Experiment Name: Zm_4deg_Cold_P Parameter: Age (hr) Value: 8
  misc_feature: MA Experiment 108534 PARAMETER Experiment Name: Zm_4deg_Cold_P Parameter: Organism Value: Zea mays
  misc_feature: MA Experiment 108534 PARAMETER Experiment Name: Zm_4deg_Cold_P Parameter: Plant Line Value: 35A19
  misc_feature: MA Experiment 108534 PARAMETER Experiment Name: Zm_4deg_Cold_P Parameter: Temperature (deg C) Value: 4 vs. 22
  misc_feature: MA Experiment 108534 PARAMETER Experiment Name: Zm_4deg_Cold_P Parameter: Timepoint (hr) Value: 6
  misc_feature: MA Experiment 108534 PARAMETER Experiment Name: Zm_4deg_Cold_P Parameter: Tissue Value: Aerial
  misc_feature: MA Experiment ID: 108546 Result: Up-regulated in Transcription
  misc_feature: MA Experiment 108546 PARAMETER Experiment Name: Zm_Imbibed_Seeds_P Parameter: Age (day) Value: 3 vs. 2
  misc_feature: MA Experiment 108546 PARAMETER Experiment Name: Zm_Imbibed_Seeds_P Parameter: Organism Value: Zea mays
  misc_feature: MA Experiment 108546 PARAMETER Experiment Name: Zm_Imbibed_Seeds_P Parameter: Plant Line Value: 35A19
  misc_feature: MA Experiment 108546 PARAMETER Experiment Name: Zm_Imbibed_Seeds_P Parameter: Tissue Value: Roots vs. Embryo
  misc_feature: MA Experiment ID: 20000535 Result: Down-regulated in Transcription
  misc_feature: MA Experiment 20000535 PARAMETER Experiment Name: Zm_Hybrid_Seed_Dev_P Parameter: DAP Value: 30 vs. 12
  misc_feature: MA Experiment 20000535 PARAMETER Experiment Name: Zm_Hybrid_Seed_Dev_P Parameter: Organism Value: Zea mays
  misc_feature: MA Experiment 20000535 PARAMETER Experiment Name: Zm_Hybrid_Seed_Dev_P Parameter: Plant Line Value: 35A19
  misc_feature: MA Experiment 20000535 PARAMETER Experiment Name: Zm_Hybrid_Seed_Dev_P Parameter: Tissue Value: Embryo vs. Unfert Floret
  misc_feature: Pfam Name: 2-Hacid_dh Pfam Description: D-isomer specific 2-hydroxyacid dehydrogenase, catalytic domain
aaaggatgctgagggctcatctcgctgcttctgaactgcaagtggatggaaatcggcccctgcacaagaaaactaccttccaactgaaagaggttagaggtcctaatcactcgcaaactctcaacaactacgcacgccttcctctgcctccgccggccggcacgatggcgtcaggcggcgagcccggggctccgaaggtcgtcctcctcctcgtcccccacgtggacgagtccttccacgccgctctgcgggcgcgcttccgcgtcctcgacttcttcgcctccccctcctcaggtgagccgctgccagccttcctcgvhgcggcggcggccgctccggagccccctcgcgccgccgtcgtggtgggcgcgggcccggcccgcgtgracrccgcgttcctcgacgccgtgccgtcgctccgctgcgtcttgtccctggcggcgggcgtggacttcatcgacctcggcgagtgcgcgcgccgcggcgtggccgtcgccaactccggcagcgtgttctcggccagacgtcgccgaccacgccgtcggcctgctcatcgacgtgctccgccgcgtgtcggccgccgagcggttcagtccgccgcggcctctggccggtgcagggtgaccacccgctcggctccaaggtcggtggcaggcgtgtgggcgtcgttggcttggggaacatcggctcgcagatcgcaaagaggctccaggctctcggctgcaccgtctgctaccactctagaacgcccagggactcggtcccttacagatacttcgccaacgtccgcgacctcgcggcggattccgacgtgctcgtcgtggcgtgcgcgctgaacgaggcgacgcggcacatcgtckgcagggacgtcctggaggcgctagggacggacggggtcgtcgtgaacatcagcaggggcgccaacgtcgacgaggccgagctggtcagggcgctcaaggagggcaggatcgccggcgccggcctcgatgtcttcgagagcgagcccggagcgcgccgcgagttcttctccatggacaacgtggtcatgacgcctcatgtggcggttttcacggcggagtccatgtcggacctgcgagaccacgccatcgccaacctcgaagcattcttctccggtcagccgttsttacgccggtgcctccctactcaccggtcaagtaggctgccaacgtgattgaagccagcggattattggctctgtttgtaacttcgcatcgtttaaaatgtctcgtataatacttgatttgttttttactgtcaatagatcgaaggtgaaaatcc

SEQ ID NO: 2762 - protein, 277 aa, Zea mays subsp. mays
  peptide (1)..(277): Ceres Seq. ID no. 15223055
  misc_feature: Pfam Name: 2-Hacid_dh Pfam Description: D-isomer specific 2-hydroxyacid dehydrogenase, catalytic domain
  misc_feature (64)..(170): Homolog of NCBI NO: 23102747 NR Description: hypothetical protein [Azotobacter vinelandii]
  misc_feature (128)..(172): Homolog of NCBI NO: 22979887 NR Description: hypothetical protein [Ralstonia metallidurans]
  misc_feature (68)..(172): Homolog of NCBI NO: 23104708 NR Description: hypothetical protein [Azotobacter vinelandii]
  misc_feature (68)..(173): Homolog of NCBI NO: 23103901 NR Description: hypothetical protein [Azotobacter vinelandii]
  misc_feature (67)..(172): Homolog of NCBI NO: 15220005 NR Description: oxidoreductase family [Arabidopsis thaliana]
  misc_feature (64)..(172): Homolog of NCBI NO: 7485630 NR Description: probable glycerate dehydrogenase [imported] -
  misc_feature (60)..(172): Homolog of NCBI NO: 15222015 NR Description: oxidoreductase family [Arabidopsis thaliana]
  misc_feature (61)..(172): Homolog of NCBI NO: 38345308 NR Description: OSJNBb0085F13.13 [Oryza sativa (japonica
  misc_feature (58)..(173): Homolog of NCBI NO: 21636166 NR Description: unknown [Aegilops tauschii]
  misc_feature (55)..(172): Homolog of NCBI NO: 38345306 NR Description: OSJNBb0085F13.6 [Oryza sativa (japonica
  misc_feature (106)..(106): Xaa is any aa, unknown or other
  misc_feature (129)..(129): Xaa is any aa, unknown or other
  misc_feature (130)..(130): Xaa is any aa, unknown or other
RMLRAHLAASELQVDGNRPLHKKTTFQLKEVRGPNHSQTLNNYARLPLPPPAGTMASGGEPGAPKVVLLLVPHVDESFHAALRARFRVLDFFASPSSGEPLPAFLXAAAAAPEPPRAAVVVGAGPARVXXAFLDAVPSLRCVLSLAAGVDFIDLGECARRGVAVANSGSVFSARRRRPRRRPAHRRAPPRVGRRAVQSAAASGRCRVTTRSAPRSVAGVWASLAWGTSARRSQRGSRLSAAPSATTLERPGTRSLTDTSPTSATSRRIPTCSSWRAR

SEQ ID NO: 2763 - protein, 276 aa, Zea mays subsp. mays
  peptide (1)..(276): Ceres Seq. ID no. 15223056
  misc_feature: Pfam Name: 2-Hacid_dh Pfam Description: D-isomer specific 2-hydroxyacid dehydrogenase, catalytic domain
  misc_feature (63)..(169): Homolog of NCBI NO: 23102747 NR Description: hypothetical protein [Azotobacter vinelandii]
  misc_feature (127)..(171): Homolog of NCBI NO: 22979887 NR Description: hypothetical protein [Ralstonia metallidurans]
  misc_feature (67)..(171): Homolog of NCBI NO: 23104708 NR Description: hypothetical protein [Azotobacter vinelandii]
  misc_feature (67)..(172): Homolog of NCBI NO: 23103901 NR Description: hypothetical protein [Azotobacter vinelandii]
  misc_feature (66)..(171): Homolog of NCBI NO: 15220005 NR Description: oxidoreductase family [Arabidopsis thaliana]
  misc_feature (63)..(171): Homolog of NCBI NO: 7485630 NR Description: probable glycerate dehydrogenase [imported] -
  misc_feature (59)..(171): Homolog of NCBI NO: 15222015 NR Description: oxidoreductase family [Arabidopsis thaliana]
  misc_feature (60)..(171): Homolog of NCBI NO: 38345308 NR Description: OSJNBb0085F13.13 [Oryza sativa (japonica
  misc_feature (57)..(172): Homolog of NCBI NO: 21636166 NR Description: unknown [Aegilops tauschii]
  misc_feature (54)..(171): Homolog of NCBI NO: 38345306 NR Description: OSJNBb0085F13.6 [Oryza sativa (japonica
  misc_feature (105)..(105): Xaa is any aa, unknown or other
  misc_feature (128)..(128): Xaa is any aa, unknown or other
  misc_feature (129)..(129): Xaa is any aa, unknown or other
MLRAHLAASELQVDGNRPLHKKTTFQLKEVRGPNHSQTLNNYARLPLPPPAGTMASGGEPGAPKVVLLLVPHVDESFHAALRARFRVLDFFASPSSGEPLPAFLXAAAAAPEPPRAAVVVGAGPARVXXAFLDAVPSLRCVLSLAAGVDFIDLGECARRGVAVANSGSVFSARRRRPRRRPAHRRAPPRVGRRAVQSAAASGRCRVTTRSAPRSVAGVWASLAWGTSARRSQRGSRLSAAPSATTLERPGTRSLTDTSPTSATSRRIPTCSSWRAR

SEQ ID NO: 2764 - protein, 223 aa, Zea mays subsp. mays
  peptide (1)..(223): Ceres Seq. ID no. 15223057
  misc_feature: Pfam Name: 2-Hacid_dh Pfam Description: D-isomer specific 2-hydroxyacid dehydrogenase, catalytic domain
  misc_feature (10)..(116): Homolog of NCBI NO: 23102747 NR Description: hypothetical protein [Azotobacter vinelandii]
  misc_feature (74)..(118): Homolog of NCBI NO: 22979887 NR Description: hypothetical protein [Ralstonia metallidurans]
  misc_feature (14)..(118): Homolog of NCBI NO: 23104708 NR Description: hypothetical protein [Azotobacter vinelandii]
  misc_feature (14)..(119): Homolog of NCBI NO: 23103901 NR Description: hypothetical protein [Azotobacter vinelandii]
  misc_feature (13)..(118): Homolog of NCBI NO: 15220005 NR Description: oxidoreductase family [Arabidopsis thaliana]
  misc_feature (10)..(118): Homolog of NCBI NO: 7485630 NR Description: probable glycerate dehydrogenase [imported] -
  misc_feature (6)..(118): Homolog of NCBI NO: 15222015 NR Description: oxidoreductase family [Arabidopsis thaliana]
  misc_feature (7)..(118): Homolog of NCBI NO: 38345308 NR Description: OSJNBb0085F13.13 [Oryza sativa (japonica
  misc_feature (4)..(119): Homolog of NCBI NO: 21636166 NR Description: unknown [Aegilops tauschii]
  misc_feature (1)..(118): Homolog of NCBI NO: 38345306 NR Description: OSJNBb0085F13.6 [Oryza sativa (japonica
  misc_feature (52)..(52): Xaa is any aa, unknown or other
  misc_feature (75)..(75): Xaa is any aa, unknown or other
  misc_feature (76)..(76): Xaa is any aa, unknown or other
MASGGEPGAPKVVLLLVPHVDESFHAALRARFRVLDFFASPSSGEPLPAFLXAAAAAPEPPRAAVVVGAGPARVXXAFLDAVPSLRCVLSLAAGVDFIDLGECARRGVAVANSGSVFSARRRRPRRRPAHRRAPPRVGRRAVQSAAASGRCRVTTRSAPRSVAGVWASLAWGTSARRSQRGSRLSAAPSATTLERPGTRSLTDTSPTSATSRRIPTCSSWRAR

SEQ ID NO: 2765 - DNA, 1522 bp, Zea mays subsp. mays
  misc_feature (1)..(1522): Ceres Seq. ID no. 12363287
  misc_feature: MA Experiment ID: 108522 Result: Up-regulated in Transcription
  misc_feature: MA Experiment 108522 PARAMETER Experiment Name: Zm_42deg_Heat_P Parameter: Age (day) Value: 8
  misc_feature: MA Experiment 108522 PARAMETER Experiment Name: Zm_42deg_Heat_P Parameter: Organism Value: Zea mays
  misc_feature: MA Experiment 108522 PARAMETER Experiment Name: Zm_42deg_Heat_P Parameter: Plant Line Value: 35A19
  misc_feature: MA Experiment 108522 PARAMETER Experiment Name: Zm_42deg_Heat_P Parameter: Temperature (deg C) Value: 42 vs. 22
  misc_feature: MA Experiment 108522 PARAMETER Experiment Name: Zm_42deg_Heat_P Parameter: Timepoint (hr) Value: 1
  misc_feature: MA Experiment 108522 PARAMETER Experiment Name: Zm_42deg_Heat_P Parameter: Tissue Value: Aerial
  misc_feature: MA Experiment ID: 108527 Result: Up-regulated in Transcription
  misc_feature: MA Experiment 108527 PARAMETER Experiment Name: Zm_5mM_NO_P Parameter: Age (day) Value: 8
  misc_feature: MA Experiment 108527 PARAMETER Experiment Name: Zm_5mM_NO_P Parameter: Organism Value: Zea mays
  misc_feature: MA Experiment 108527 PARAMETER Experiment Name: Zm_5mM_NO_P Parameter: Plant Line Value: 35A19
  misc_feature: MA Experiment 108527 PARAMETER Experiment Name: Zm_5mM_NO_P Parameter: Timepoint (hr) Value: 6
  misc_feature: MA Experiment 108527 PARAMETER Experiment Name: Zm_5mM_NO_P Parameter: Tissue Value: Aerial
  misc_feature: MA Experiment 108527 PARAMETER Experiment Name: Zm_5mM_NO_P Parameter: Treatment Value: 5mM NO vs. No Treatment
  misc_feature: MA Experiment ID: 108542 Result: Up-regulated in Transcription
  misc_feature: MA Experiment 108542 PARAMETER Experiment Name: Zm_150mM_NaCl_P Parameter: Age (day) Value: 8
  misc_feature: MA Experiment 108542 PARAMETER Experiment Name: Zm_150mM_NaCl_P Parameter: Organism Value: Zea mays
  misc_feature: MA Experiment 108542 PARAMETER Experiment Name: Zm_150mM_NaCl_P Parameter: Plant Line Value: 35A19
  misc_feature: MA Experiment 108542 PARAMETER Experiment Name: Zm_150mM_NaCl_P Parameter: Timepoint (hr) Value: 6
  misc_feature: MA Experiment 108542 PARAMETER Experiment Name: Zm_150mM_NaCl_P Parameter: Tissue Value: Aerial
  misc_feature: MA Experiment 108542 PARAMETER Experiment Name: Zm_150mM_NaCl_P Parameter: Treatment Value: 150mM NaCl vs. No Treatment
  misc_feature: MA Experiment ID: 108556 Result: Up-regulated in Transcription
  misc_feature: MA Experiment 108556 PARAMETER Experiment Name: Zm_Drought_P Parameter: Age (day) Value: 9
  misc_feature: MA Experiment 108556 PARAMETER Experiment Name: Zm_Drought_P Parameter: Organism Value: Zea mays
  misc_feature: MA Experiment 108556 PARAMETER Experiment Name: Zm_Drought_P Parameter: Plant Line Value: 35A19
  misc_feature: MA Experiment 108556 PARAMETER Experiment Name: Zm_Drought_P Parameter: Timepoint (hr) Value: 24
  misc_feature: MA Experiment 108556 PARAMETER Experiment Name: Zm_Drought_P Parameter: Tissue Value: Aerial
  misc_feature: MA Experiment 108556 PARAMETER Experiment Name: Zm_Drought_P Parameter: Treatment Value: Drought vs. No Drought
gcacgagaccattacctagaacatcctaatcgaaaaaccactcgctgcctggttatggactccaccaggagcaaccaggtcgccggcagatgcaacagcaccatcgcgtcaagggctgccacggtcccgccgtcgctgaccatgccgcgcggcgaactcgctgacgccatcgtgggcggaggcggaggaggaggagcggacggggacccccgggccgccctcctccgtctgtctgctctcggggaccgcatggccgccgtccggggccgtatctgcgcctctatctcgggcgaagcccggcctctctcctacgccgacatccaatctgtctcctccgagatctccgccgctgcccagctcgtcgtcctcaacgccgccgagctcctcgcttcctccgtcccctttcccgccccacctccacctcctccttccgccgctccctctcccgctcccgtccgagagatcccagttgtggccgcttccgcccaagagcaacccctggaggccgccaaggacgacggtggctacgaggtcgtggagctcgacgccgccgagctgctagcggagcacgtccacttctgcgagatctgcggcaagggcttccgccgcgacgccaacctcaggatgcacatgcgcgcccacggcgaccgcttcaagaccctagacgcgctctcccgccctggtcacggccagccgaagccgcccgttggcagcaacgtgcgcttctcctgcccctttgcgggctgcaacaggaaccgcacacaccgccgcttccggccgctcaagtcggcggtgtgcgcgcggaaccacttccggcgcagccactgccccaagctctacgcctgcgagcgatgtggcggcaagaagcgcttcactgtcctggcggacctccgcagccacctccgccactgcggcgaggaggcacagtggcgctgctcctgcggcaccaccttctcccgcaaggacaagctcttcggtcatctagcgctctttgaaggccacacgccagcagttactaagccaaacaaggatgtggtgacagggcctacagagtccaccattgatgctatggaggaagggggatttgaagaaggcattcctgaccgggaggaggatgaagagggcggttatgatccagagttcttcaaggagtggatggatgagctcagaggtggtgctggtggctccaattggcctggaccagcagcagatggacattagcaatgttgcgagggttaataggatggtttgacaagggacatctgcttacatcaagtgaccaggaggatcaataaagactgaataaaggtgatagtaaagaaaagaggtgctttgggatagtttgtaggatttctctttaccattgtgtttgtgcgttcgttctaaccagtagcttgtatggtatggtgtgcgtgtgttgtttagttgctgttcactgggcctctcccttgccattctcggttgctttcatgttatcctgtgaatttgtgatctaccaggtaatacagtggagaaatgtgtc

SEQ ID NO: 2766 - protein, 406 aa, Zea mays subsp. mays
  peptide (1)..(406): Ceres Seq. ID no. 12363288
  misc_feature (192)..(214): Pfam Name: Zinc finger, C2H2 type Pfam Description: Zinc finger, C2H2 type
  misc_feature (147)..(387): Homolog of NCBI NO: 34907180 NR Description: putative zinc finger protein
  misc_feature (141)..(374): Homolog of NCBI NO: 33146841 NR Description: zinc finger protein-like protein
  misc_feature (174)..(337): Homolog of NCBI NO: 30688719 NR Description: expressed protein [Arabidopsis thaliana]
  misc_feature (174)..(337): Homolog of NCBI NO: 10177236 NR Description: contains similarity to C2H2-type zinc finger
  misc_feature (168)..(344): Homolog of NCBI NO: 28376689 NR Description: putative zinc finger protein
  misc_feature (174)..(361): Homolog of NCBI NO: 15218606 NR Description: zinc finger protein, putative
  misc_feature (141)..(355): Homolog of NCBI NO: 10241636 NR Description: putative zinc finger protein
  misc_feature (174)..(361): Homolog of NCBI NO: 21593564 NR Description: zinc finger protein, putative [Arabidopsis
  misc_feature (141)..(360): Homolog of NCBI NO: 38346456 NR Description: OSJNBa0019G23.4 [Oryza sativa (japonica
  misc_feature (174)..(400): Homolog of NCBI NO: 34908682 NR Description: putative zinc finger protein
ARDHYLEHPNRKTTRCLVMDSTRSNQVAGRCNSTIASRAATVPPSLTMPRGELADAIVGGGGGGGADGDPRAALLRLSALGDRMAAVRGRICASISGEARPLSYADIQSVSSEISAAAQLVVLNAAELLASSVPFPAPPPPPPSAAPSPAPVREIPVVAASAQEQPLEAAKDDGGYEVVELDAAELLAEHVHFCEICGKGFRRDANLRMHMRAHGDRFKTLDALSRPGHGQPKPPVGSNVRFSCPFAGCNRNRTHRRFRPLKSAVCARNHFRRSHCPKLYACERCGGKKRFTVLADLRSHLRHCGEEAQWRCSCGTTFSRKDKLFGHLALFEGHTPAVTKPNKDVVTGPTESTIDAMEEGGFEEGIPDREEDEEGGYDPEFFKEWMDELRGGAGGSNWPGPAADGH

SEQ ID NO: 2767 - protein, 388 aa, Zea mays subsp. mays
  peptide (1)..(388): Ceres Seq. ID no. 12363289
  misc_feature (174)..(196): Pfam Name: Zinc finger, C2H2 type Pfam Description: Zinc finger, C2H2 type
  misc_feature (129)..(369): Homolog of NCBI NO: 34907180 NR Description: putative zinc finger protein
  misc_feature (123)..(356): Homolog of NCBI NO: 33146841 NR Description: zinc finger protein-like protein
  misc_feature (156)..(319): Homolog of NCBI NO: 30688719 NR Description: expressed protein [Arabidopsis thaliana]
  misc_feature (156)..(319): Homolog of NCBI NO: 10177236 NR Description: contains similarity to C2H2-type zinc finger
  misc_feature (150)..(326): Homolog of NCBI NO: 28376689 NR Description: putative zinc finger protein
  misc_feature (156)..(343): Homolog of NCBI NO: 15218606 NR Description: zinc finger protein, putative
  misc_feature (123)..(337): Homolog of NCBI NO: 10241636 NR Description: putative zinc finger protein
  misc_feature (156)..(343): Homolog of NCBI NO: 21593564 NR Description: zinc finger protein, putative [Arabidopsis
  misc_feature (123)..(342): Homolog of NCBI NO: 38346456 NR Description: OSJNBa0019G23.4 [Oryza sativa (japonica
  misc_feature (156)..(382): Homolog of NCBI NO: 34908682 NR Description: putative zinc finger protein
MDSTRSNQVAGRCNSTIASRAATVPPSLTMPRGELADAIVGGGGGGGADGDPRAALLRLSALGDRMAAVRGRICASISGEARPLSYADIQSVSSEISAAAQLVVLNAAELLASSVPFPAPPPPPPSAAPSPAPVREIPVVAASAQEQPLEAAKDDGGYEVVELDAAELLAEHVHFCEICGKGFRRDANLRMHMRAHGDRFKTLDALSRPGHGQPKPPVGSNVRFSCPFAGCNRNRTHRRFRPLKSAVCARNHFRRSHCPKLYACERCGGKKRFTVLADLRSHLRHCGEEAQWRCSCGTTFSRKDKLFGHLALFEGHTPAVTKPNKDVVTGPTESTIDAMEEGGFEEGIPDREEDEEGGYDPEFFKEWMDELRGGAGGSNWPGPAADGH

SEQ ID NO: 2768 - protein, 359 aa, Zea mays subsp. mays
  peptide (1)..(359): Ceres Seq. ID no. 12363290
  misc_feature (145)..(167): Pfam Name: Zinc finger, C2H2 type Pfam Description: Zinc finger, C2H2 type
  misc_feature (100)..(340): Homolog of NCBI NO: 34907180 NR Description: putative zinc finger protein
  misc_feature (94)..(327): Homolog of NCBI NO: 33146841 NR Description: zinc finger protein-like protein
  misc_feature (127)..(290): Homolog of NCBI NO: 30688719 NR Description: expressed protein [Arabidopsis thaliana]
  misc_feature (127)..(290): Homolog of NCBI NO: 10177236 NR Description: contains similarity to C2H2-type zinc finger
  misc_feature (121)..(297): Homolog of NCBI NO: 28376689 NR Description: putative zinc finger protein
  misc_feature (127)..(314): Homolog of NCBI NO: 15218606 NR Description: zinc finger protein, putative
  misc_feature (94)..(308): Homolog of NCBI NO: 10241636 NR Description: putative zinc finger protein
  misc_feature (127)..(314): Homolog of NCBI NO: 21593564 NR Description: zinc finger protein, putative [Arabidopsis
  misc_feature (94)..(313): Homolog of NCBI NO: 38346456 NR Description: OSJNBa0019G23.4 [Oryza sativa (japonica
  misc_feature (127)..(353): Homolog of NCBI NO: 34908682 NR Description: putative zinc finger protein
MPRGELADAIVGGGGGGGADGDPRAALLRLSALGDRMAAVRGRICASISGEARPLSYADIQSVSSEISAAAQLVVLNAAELLASSVPFPAPPPPPPSAAPSPAPVREIPVVAASAQEQPLEAAKDDGGYEVVELDAAELLAEHVHFCEICGKGFRRDANLRMHMRAHGDRFKTLDALSRPGHGQPKPPVGSNVRFSCPFAGCNRNRTHRRFRPLKSAVCARNHFRRSHCPKLYACERCGGKKRFTVLADLRSHLRHCGEEAQWRCSCGTTFSRKDKLFGHLALFEGHTPAVTKPNKDVVTGPTESTIDAMEEGGFEEGIPDREEDEEGGYDPEFFKEWMDELRGGAGGSNWPGPAADGH

SEQ ID NO: 2769 - DNA, 1409 bp, Zea mays subsp. mays
  misc_feature (1)..(1409): Ceres Seq. ID no. 12373843
  misc_feature: MA Experiment ID: 108528 Result: Down-regulated in Transcription
  misc_feature: MA Experiment 108528 PARAMETER Experiment Name: Zm_Imbibed_Seeds_P Parameter: Age (day) Value: 5 vs. 2
  misc_feature: MA Experiment 108528 PARAMETER Experiment Name: Zm_Imbibed_Seeds_P Parameter: Organism Value: Zea mays
  misc_feature: MA Experiment 108528 PARAMETER Experiment Name: Zm_Imbibed_Seeds_P Parameter: Plant Line Value: 35A19
  misc_feature: MA Experiment 108528 PARAMETER Experiment Name: Zm_Imbibed_Seeds_P Parameter: Tissue Value: Aerial vs. Embryo
  misc_feature: MA Experiment ID: 108543 Result: Up-regulated in Transcription
  misc_feature: MA Experiment ID: 108547 Result: Down-regulated in Transcription
  misc_feature: MA Experiment 108547 PARAMETER Experiment Name: Zm_Imbibed_Seeds_P Parameter: Age (day) Value: 4 vs. 2
  misc_feature: MA Experiment 108547 PARAMETER Experiment Name: Zm_Imbibed_Seeds_P Parameter: Organism Value: Zea mays
  misc_feature: MA Experiment 108547 PARAMETER Experiment Name: Zm_Imbibed_Seeds_P Parameter: Plant Line Value: 35A19
  misc_feature: MA Experiment 108547 PARAMETER Experiment Name: Zm_Imbibed_Seeds_P Parameter: Tissue Value: Aerial vs. Embryo
  misc_feature: MA Experiment ID: 20000492 Result: Down-regulated in Transcription
  misc_feature: MA Experiment 20000492 PARAMETER Experiment Name: Zm_Hybrid_Seed_Dev_P Parameter: DAP Value: 12
  misc_feature: MA Experiment 20000492 PARAMETER Experiment Name: Zm_Hybrid_Seed_Dev_P Parameter: Organism Value: Zea mays
  misc_feature: MA Experiment 20000492 PARAMETER Experiment Name: Zm_Hybrid_Seed_Dev_P Parameter: Plant Line Value: 35A19
  misc_feature: MA Experiment 20000492 PARAMETER Experiment Name: Zm_Hybrid_Seed_Dev_P Parameter: Tissue Value: Fert Kernel vs. Unfert Floret
  misc_feature: MA Experiment ID: 20000535 Result: Down-regulated in Transcription
  misc_feature: MA Experiment 20000535 PARAMETER Experiment Name: Zm_Hybrid_Seed_Dev_P Parameter: DAP Value: 30 vs. 12
  misc_feature: MA Experiment 20000535 PARAMETER Experiment Name: Zm_Hybrid_Seed_Dev_P Parameter: Organism Value: Zea mays
  misc_feature: MA Experiment 20000535 PARAMETER Experiment Name: Zm_Hybrid_Seed_Dev_P Parameter: Plant Line Value: 35A19
  misc_feature: MA Experiment 20000535 PARAMETER Experiment Name: Zm_Hybrid_Seed_Dev_P Parameter: Tissue Value: Embryo vs. Unfert Floret
gaaaaaaaaaggcaccaagggagaatcagcaagacgacaccatggcagcggcgctctacggcaacggcagctcgacgagcggcggtggcggcgcccgtggccgcgggaagcccatcacatgcaaagcggcggtggcgtggggtcccggagtgccgctgtcgctggaggaggtcgaggtggcgccgcctggtcccatggaggtccgcgtcaaggtgctcttcacctccatctgccacaccgacctcagcgcctggaagggagagtgcgaggcgcagcgcaaataccctcgcatcttgggccatgaggcagccggagtggtagagagcgtgggcgaaggagtagaaggcctcgcccctggagaccacgtcgttccgatcttcaccggggagtgcgagaaatgcgtgtactgcaagtcggacaagacaaacctgtgtggaacctaccgtgtggatcctttgaagagcagcatggtctacgacgacggcacgaggttctccgtggtggaccagccgtcaggccagcggcggccggtgtaccacttcctcaacacctccaccttcaccgagtacaccgtgcttgacgcggcatgtgccgtcaaaatcaaccctgaggccccgctgcagaggatgtgcctcctcagctgcggcatctccacaggagtgggagctgcgtggaacactgcaaacgtttctgctcggtccaccgttgcagtgtttggactcggcgctgttggtcttgctgtagctgaaggtgccaggctacgaggggcaactcggatcatcggcgtggacgtaaacccttcaaagttcaccaaaggtaaagagatggggataacagacttcatcgaccctaacgacatctgtgacaaaccggtccatgaggtgatcagggagatgactgacggaggtgtcgactacagcttcgagtgtaccgggataaatgatgtgctgagagaggccttcttgtccacgcatgatggttggggcctgacggtggtgctagggatccattcaacgcccaagatggtgccgctgcacccgatggagctctacagccgtaggatcaccggctgcgtctttggcgacttcaagggcaagtcccagctgcccgacctcgtcgataagtgcgtcaacggggaggtcaatataaacttcgatggcttcataacacacaagatgccattctcgtacatcaacaaggctttccggttactcgaggaaggcaagtcgctgaggtgcctgctcagtctctgatcgacaatacttcatcagcgaggacagttttggattattgagtagcaaaataaatgtacaaggaaagtttttccctagtacattcgcttcttataaaacgaatgcatgcaacttctttcgttctttgaagaagacaaaagggcacaattattctgg

SEQ ID NO: 2770 - protein, 416 aa, Zea mays subsp. mays
  peptide (1)..(416): Ceres Seq. ID no. 12373844
  misc_feature (35)..(416): Homolog of NCBI NO: 1362105 NR Description: alcohol dehydrogenase (EC 1.1.1.1) - common
  misc_feature (35)..(416): Homolog of NCBI NO: 113365 NR Description: Alcohol dehydrogenase 1
  misc_feature (35)..(416): Homolog of NCBI NO: 113386 NR Description: ALCOHOL DEHYDROGENASE 3
  misc_feature (35)..(416): Homolog of NCBI NO: 113379 NR Description: ALCOHOL DEHYDROGENASE 2
  misc_feature (35)..(416): Homolog of NCBI NO: 7427629 NR Description: alcohol dehydrogenase (EC 1.1.1.1) - potato
  misc_feature (35)..(416): Homolog of NCBI NO: 113363 NR Description: ALCOHOL DEHYDROGENASE 1
  misc_feature (34)..(416): Homolog of NCBI NO: 25283039 NR Description: alcohol dehydrogenase (EC 1.-.-.-)
  misc_feature (34)..(416): Homolog of NCBI NO: 15217715 NR Description: alcohol dehydrogenase, putative
  misc_feature (31)..(416): Homolog of NCBI NO: 21592656 NR Description: alcohol dehydrogenase, putative [Arabidopsis
  misc_feature (31)..(416): Homolog of NCBI NO: 18398586 NR Description: alcohol dehydrogenase, putative
KKKAPRENQQDDTMAAALYGNGSSTSGGGGARGRGKPITCKAAVAWGPGVPLSLEEVEVAPPGPMEVRVKVLFTSICHTDLSAWKGECEAQRKYPRILGHEAAGVVESVGEGVEGLAPGDHVVPIFTGECEKCVYCKSDKTNLCGTYRVDPLKSSMVYDDGTRFSVVDQPSGQRRPVYHFLNTSTFTEYTVLDAACAVKINPEAPLQRMCLLSCGISTGVGAAWNTANVSARSTVAVFGLGAVGLAVAEGARLRGATRIIGVDVNPSKFTKGKEMGITDFIDPNDICDKPVHEVIREMTDGGVDYSFECTGINDVLREAFLSTHDGWGLTVVLGIHSTPKMVPLHPMELYSRRITGCVFGDFKGKSQLPDLVDKCVNGEVNINFDGFITHKMPFSYINKAFRLLEEGKSLRCLLSL

SEQ ID NO: 2771 - protein, 403 aa, Zea mays subsp. mays
  peptide (1)..(403): Ceres Seq. ID no. 12373845
  misc_feature (22)..(403): Homolog of NCBI NO: 1362105 NR Description: alcohol dehydrogenase (EC 1.1.1.1) - common
  misc_feature (22)..(403): Homolog of NCBI NO: 113365 NR Description: Alcohol dehydrogenase 1
  misc_feature (22)..(403): Homolog of NCBI NO: 113386 NR Description: ALCOHOL DEHYDROGENASE 3
  misc_feature (22)..(403): Homolog of NCBI NO: 113379 NR Description: ALCOHOL DEHYDROGENASE 2
  misc_feature (22)..(403): Homolog of NCBI NO: 7427629 NR Description: alcohol dehydrogenase (EC 1.1.1.1) - potato
  misc_feature (22)..(403): Homolog of NCBI NO: 113363 NR Description: ALCOHOL DEHYDROGENASE 1
  misc_feature (21)..(403): Homolog of NCBI NO: 25283039 NR Description: alcohol dehydrogenase (EC 1.-.-.-)
  misc_feature (21)..(403): Homolog of NCBI NO: 15217715 NR Description: alcohol dehydrogenase, putative
  misc_feature (18)..(403): Homolog of NCBI NO: 21592656 NR Description: alcohol dehydrogenase, putative [Arabidopsis
  misc_feature (18)..(403): Homolog of NCBI NO: 18398586 NR Description: alcohol dehydrogenase, putative
MAAALYGNGSSTSGGGGARGRGKPITCKAAVAWGPGVPLSLEEVEVAPPGPMEVRVKVLFTSICHTDLSAWKGECEAQRKYPRILGHEAAGVVESVGEGVEGLAPGDHVVPIFTGECEKCVYCKSDKTNLCGTYRVDPLKSSMVYDDGTRFSVVDQPSGQRRPVYHFLNTSTFTEYTVLDAACAVKINPEAPLQRMCLLSCGISTGVGAAWNTANVSARSTVAVFGLGAVGLAVAEGARLRGATRIIGVDVNPSKFTKGKEMGITDFIDPNDICDKPVHEVIREMTDGGVDYSFECTGINDVLREAFLSTHDGWGLTVVLGIHSTPKMVPLHPMELYSRRITGCVFGDFKGKSQLPDLVDKCVNGEVNINFDGFITHKMPFSYINKAFRLLEEGKSLRCLLSL

SEQ ID NO: 2772 - protein, 352 aa, Zea mays subsp. mays
  peptide (1)..(352): Ceres Seq. ID no. 12373846
  misc_feature (1)..(352): Homolog of NCBI NO: 1362105 NR Description: alcohol dehydrogenase (EC 1.1.1.1) - common
  misc_feature (1)..(352): Homolog of NCBI NO: 113365 NR Description: Alcohol dehydrogenase 1
  misc_feature (1)..(352): Homolog of NCBI NO: 113386 NR Description: ALCOHOL DEHYDROGENASE 3
  misc_feature (1)..(352): Homolog of NCBI NO: 113379 NR Description: ALCOHOL DEHYDROGENASE 2
  misc_feature (1)..(352): Homolog of NCBI NO: 7427629 NR Description: alcohol dehydrogenase (EC 1.1.1.1) - potato
  misc_feature (1)..(352): Homolog of NCBI NO: 113363 NR Description: ALCOHOL DEHYDROGENASE 1
  misc_feature (1)..(352): Homolog of NCBI NO: 25283039 NR Description: alcohol dehydrogenase (EC 1.-.-.-)
  misc_feature (1)..(352): Homolog of NCBI NO: 15217715 NR Description: alcohol dehydrogenase, putative
  misc_feature (1)..(352): Homolog of NCBI NO: 21592656 NR Description: alcohol dehydrogenase, putative [Arabidopsis
  misc_feature (1)..(352): Homolog of NCBI NO: 18398586 NR Description: alcohol dehydrogenase, putative
MEVRVKVLFTSICHTDLSAWKGECEAQRKYPRILGHEAAGVVESVGEGVEGLAPGDHVVPIFTGECEKCVYCKSDKTNLCGTYRVDPLKSSMVYDDGTRFSVVDQPSGQRRPVYHFLNTSTFTEYTVLDAACAVKINPEAPLQRMCLLSCGISTGVGAAWNTANVSARSTVAVFGLGAVGLAVAEGARLRGATRIIGVDVNPSKFTKGKEMGITDFIDPNDICDKPVHEVIREMTDGGVDYSFECTGINDVLREAFLSTHDGWGLTVVLGIHSTPKMVPLHPMELYSRRITGCVFGDFKGKSQLPDLVDKCVNGEVNINFDGFITHKMPFSYINKAFRLLEEGKSLRCLLSL

SEQ ID NO: 2773 - DNA, 1170 bp, Zea mays subsp. mays
  misc_feature (1)..(1170): Ceres Seq. ID no. 13498830
  misc_feature: MA Experiment ID: 108523 Result: Down-regulated in Transcription
  misc_feature: MA Experiment 108523 PARAMETER Experiment Name: Zm_42deg_Heat_P Parameter: Age (day) Value: 8
  misc_feature: MA Experiment 108523 PARAMETER Experiment Name: Zm_42deg_Heat_P Parameter: Organism Value: Zea mays
  misc_feature: MA Experiment 108523 PARAMETER Experiment Name: Zm_42deg_Heat_P Parameter: Plant Line Value: 35A19
  misc_feature: MA Experiment 108523 PARAMETER Experiment Name: Zm_42deg_Heat_P Parameter: Temperature (deg C) Value: 42 vs. 22
  misc_feature: MA Experiment 108523 PARAMETER Experiment Name: Zm_42deg_Heat_P Parameter: Timepoint (hr) Value: 6
  misc_feature: MA Experiment 108523 PARAMETER Experiment Name: Zm_42deg_Heat_P Parameter: Tissue Value: Aerial
  misc_feature: MA Experiment ID: 108687 Result: Down-regulated in Transcription
  misc_feature: MA Experiment 108687 PARAMETER Experiment Name: Zm_Embryos-Flowers__P Parameter: Tissue Value: Embryo vs. Aerial+
  misc_feature: MA Experiment ID: 20000534 Result: Up-regulated in Transcription
  misc_feature: MA Experiment 20000534 PARAMETER Experiment Name: Zm_Hybrid_Pollen_P Parameter: Age (day) Value: 8
  misc_feature: MA Experiment 20000534 PARAMETER Experiment Name: Zm_Hybrid_Pollen_P Parameter: Organism Value: Zea mays
  misc_feature: MA Experiment 20000534 PARAMETER Experiment Name: Zm_Hybrid_Pollen_P Parameter: Plant Line Value: 35A19
  misc_feature: MA Experiment 20000534 PARAMETER Experiment Name: Zm_Hybrid_Pollen_P Parameter: Tissue Value: Pollen vs. Aerial
  misc_feature: MA Experiment ID: 20000535 Result: Down-regulated in Transcription
  misc_feature: MA Experiment 20000535 PARAMETER Experiment Name: Zm_Hybrid_Seed_Dev_P Parameter: DAP Value: 30 vs. 12
  misc_feature: MA Experiment 20000535 PARAMETER Experiment Name: Zm_Hybrid_Seed_Dev_P Parameter: Organism Value: Zea mays
  misc_feature: MA Experiment 20000535 PARAMETER Experiment Name: Zm_Hybrid_Seed_Dev_P Parameter: Plant Line Value: 35A19
  misc_feature: MA Experiment 20000535 PARAMETER Experiment Name: Zm_Hybrid_Seed_Dev_P Parameter: Tissue Value: Embryo vs. Unfert Floret
gccatttttggtgagtgcgccctttcccttcctccccagatccccgtccccgttttccacttttgcctccgccccaattcggataacaaacccctccgcctcgtcgcgtctcctcccagccgagccgatccggtagagagagggagagggagggactgagggaggaggagctgggttccggtcccggccgcccggccggctgcgcgattcgattgcagctctcgtccccgggcggcgtccaggatggtgcggggcaagacgcagatgaagcggatagagaacccgaccagccgccaggtcaccttctccaagcgccgcaacggcctgctcaagaaggcgttcgagctctccgtcctctgcgacgccgaggtcgccctcgtcgtcttctccccgcgcggcaagctctacgaattcgccagcggaagtgcgcagaaaacgattgaacgttatagaacatacacaaaggataatgtcagcaacaagacagtgcagcaggatattgagcgagtaaaagctgatgcggatggcctgtcaaagagactcgaagcacttgaagcttacaaaaggaaacttttgggtgagaggttggaagactgctccattgaagagctgcacagtttggaagtcaagcttgagaagagcctgcattgcatcaggggaagaaagactgagctgctggaggagcaagtccgtaagctgaagcagaaggagatgagtctgcgcaagagcaacgaagatttgcgtgaaaagtgcaagaagcagccgcctgtgccgatggcttcggcgccgcctcgtgcgccggcagtcgacaacgtggaggacggtcaccgggagccgaaggacgacgggatggacgtggagacggagctgtacataggattgcccggcagagactaccgctcaagcaaagacaaggctgcagtggcggtcaggtcaggctagcagctacctcagccacgcacaggcccaatcaacgcaagctagctagctgagaataatcttttagatctctggtagtgtggagatcgagatgcaagccaagcaatgtgatatcgcgttgtgtgttaccaacctgtcagtctgtgtatcatcccgtcccgtccgtcagagtctcagagaacgaacacttcttctccttctccctgtagctagctgctcctgcttgtgtcc

SEQ ID NO: 2774 - protein, 232 aa, Zea mays subsp. mays
  peptide (1)..(232): Ceres Seq. ID no. 13498831
  misc_feature (74)..(172): Pfam Name: K-box region Pfam Description: K-box region
  misc_feature (1)..(216): Homolog of NCBI NO: 6635740 NR Description: agamous-like MADS box protein OPMADS1 [Elaeis
  misc_feature (1)..(224): Homolog of NCBI NO: 37536442 NR Description: putative transcription factor
  misc_feature (1)..(224): Homolog of NCBI NO: 33621123 NR Description: transcription factor MADS56
  misc_feature (1)..(214): Homolog of NCBI NO: 33771690 NR Description: MADS-box protein [Brassica rapa]
  misc_feature (1)..(214): Homolog of NCBI NO: 30171309 NR Description: MADS-box protein [Cardamine flexuosa]
  misc_feature (1)..(214): Homolog of NCBI NO: 15225534 NR Description: MADS-box protein (AGL20) [Arabidopsis thaliana]
  misc_feature (1)..(214): Homolog of NCBI NO: 7446552 NR Description: MADS box protein A - white mustard
  misc_feature (1)..(224): Homolog of NCBI NO: 5051933 NR Description: MADS-box protein FDRMADS8 [Oryza sativa]
  misc_feature (1)..(221): Homolog of NCBI NO: 5295990 NR Description: MADS box-like protein [Oryza sativa (japonica
  misc_feature (1)..(232): Homolog of NCBI NO: 12002139 NR Description: MADS box protein 1 [Zea mays]
MVRGKTQMKRIENPTSRQVTFSKRRNGLLKKAFELSVLCDAEVALVVFSPRGKLYEFASGSAQKTIERYRTYTKDNVSNKTVQQDIERVKADADGLSKRLEALEAYKRKLLGERLEDCSIEELHSLEVKLEKSLHCIRGRKTELLEEQVRKLKQKEMSLRKSNEDLREKCKKQPPVPMASAPPRAPAVDNVEDGHREPKDDGMDVETELYIGLPGRDYRSSKDKAAVAVRSG

SEQ ID NO: 2775 - protein, 225 aa, Zea mays subsp. mays
  peptide (1)..(225): Ceres Seq. ID no. 13498832
  misc_feature (67)..(165): Pfam Name: K-box region Pfam Description: K-box region
  misc_feature (1)..(207): Homolog of NCBI NO: 33771690 NR Description: MADS-box protein [Brassica rapa]
  misc_feature (1)..(207): Homolog of NCBI NO: 7446552 NR Description: MADS box protein A - white mustard
  misc_feature (1)..(207): Homolog of NCBI NO: 30171309 NR Description: MADS-box protein [Cardamine flexuosa]
  misc_feature (1)..(207): Homolog of NCBI NO: 15225534 NR Description: MADS-box protein (AGL20) [Arabidopsis thaliana]
  misc_feature (1)..(209): Homolog of NCBI NO: 6635740 NR Description: agamous-like MADS box protein OPMADS1 [Elaeis
  misc_feature (1)..(217): Homolog of NCBI NO: 37536442 NR Description: putative transcription factor
  misc_feature (1)..(217): Homolog of NCBI NO: 33621123 NR Description: transcription factor MADS56
  misc_feature (1)..(217): Homolog of NCBI NO: 5051933 NR Description: MADS-box protein FDRMADS8 [Oryza sativa]
  misc_feature (1)..(214): Homolog of NCBI NO: 5295990 NR Description: MADS box-like protein [Oryza sativa (japonica
  misc_feature (1)..(225): Homolog of NCBI NO: 12002139 NR Description: MADS box protein 1 [Zea mays]
MKRIENPTSRQVTFSKRRNGLLKKAFELSVLCDAEVALVVFSPRGKLYEFASGSAQKTIERYRTYTKDNVSNKTVQQDIERVKADADGLSKRLEALEAYKRKLLGERLEDCSIEELHSLEVKLEKSLHCIRGRKTELLEEQVRKLKQKEMSLRKSNEDLREKCKKQPPVPMASAPPRAPAVDNVEDGHREPKDDGMDVETELYIGLPGRDYRSSKDKAAVAVRSG

SEQ ID NO: 2776 - DNA, 1017 bp, Zea mays subsp. mays
  misc_feature (1)..(1017): Ceres Seq. ID no. 12402465
  misc_feature: MA Experiment ID: 108528 Result: Up-regulated in Transcription
  misc_feature: MA Experiment 108528 PARAMETER Experiment Name: Zm_Imbibed_Seeds_P Parameter: Age (day) Value: 5 vs. 2
  misc_feature: MA Experiment 108528 PARAMETER Experiment Name: Zm_Imbibed_Seeds_P Parameter: Organism Value: Zea mays
  misc_feature: MA Experiment 108528 PARAMETER Experiment Name: Zm_Imbibed_Seeds_P Parameter: Plant Line Value: 35A19
  misc_feature: MA Experiment 108528 PARAMETER Experiment Name: Zm_Imbibed_Seeds_P Parameter: Tissue Value: Aerial vs. Embryo
  misc_feature: MA Experiment ID: 108530 Result: Up-regulated in Transcription
  misc_feature: MA Experiment 108530 PARAMETER Experiment Name: Zm_Imbibed_Seeds_P Parameter: Age (day) Value: 6 vs. 2
  misc_feature: MA Experiment 108530 PARAMETER Experiment Name: Zm_Imbibed_Seeds_P Parameter: Organism Value: Zea mays
  misc_feature: MA Experiment 108530 PARAMETER Experiment Name: Zm_Imbibed_Seeds_P Parameter: Plant Line Value: 35A19
  misc_feature: MA Experiment 108530 PARAMETER Experiment Name: Zm_Imbibed_Seeds_P Parameter: Tissue Value: Aerial vs. Embryo
  misc_feature: MA Experiment ID: 108536 Result: Down-regulated in Transcription
  misc_feature: MA Experiment 108536 PARAMETER Experiment Name: Zm_Meristem_P Parameter: Age (day) Value: 8
  misc_feature: MA Experiment 108536 PARAMETER Experiment Name: Zm_Meristem_P Parameter: Organism Value: Zea mays
  misc_feature: MA Experiment 108536 PARAMETER Experiment Name: Zm_Meristem_P Parameter: Plant Line Value: 35A19
  misc_feature: MA Experiment 108536 PARAMETER Experiment Name: Zm_Meristem_P Parameter: Tissue Value: Shoot Meristem vs. Above Shoot Meristem
  misc_feature: MA Experiment ID: 108543 Result: Up-regulated in Transcription
  misc_feature: MA Experiment ID: 108544 Result: Up-regulated in Transcription
  misc_feature: MA Experiment ID: 108545 Result: Up-regulated in Transcription
  misc_feature: MA Experiment 108545 PARAMETER Experiment Name: Zm_Imbibed_Seeds_P Parameter: Age (day) Value: 3 vs. 2
  misc_feature: MA Experiment 108545 PARAMETER Experiment Name: Zm_Imbibed_Seeds_P Parameter: Organism Value: Zea mays
  misc_feature: MA Experiment 108545 PARAMETER Experiment Name: Zm_Imbibed_Seeds_P Parameter: Plant Line Value: 35A19
  misc_feature: MA Experiment 108545 PARAMETER Experiment Name: Zm_Imbibed_Seeds_P Parameter: Tissue Value: Aerial vs. Embryo
  misc_feature: MA Experiment ID: 108547 Result: Up-regulated in Transcription
  misc_feature: MA Experiment 108547 PARAMETER Experiment Name: Zm_Imbibed_Seeds_P Parameter: Age (day) Value: 4 vs. 2
  misc_feature: MA Experiment 108547 PARAMETER Experiment Name: Zm_Imbibed_Seeds_P Parameter: Organism Value: Zea mays
  misc_feature: MA Experiment 108547 PARAMETER Experiment Name: Zm_Imbibed_Seeds_P Parameter: Plant Line Value: 35A19
  misc_feature: MA Experiment 108547 PARAMETER Experiment Name: Zm_Imbibed_Seeds_P Parameter: Tissue Value: Aerial vs. Embryo
  misc_feature: MA Experiment ID: 108556 Result: Down-regulated in Transcription
  misc_feature: MA Experiment 108556 PARAMETER Experiment Name: Zm_Drought_P Parameter: Age (day) Value: 9
  misc_feature: MA Experiment 108556 PARAMETER Experiment Name: Zm_Drought_P Parameter: Organism Value: Zea mays
  misc_feature: MA Experiment 108556 PARAMETER Experiment Name: Zm_Drought_P Parameter: Plant Line Value: 35A19
  misc_feature: MA Experiment 108556 PARAMETER Experiment Name: Zm_Drought_P Parameter: Timepoint (hr) Value: 24
  misc_feature: MA Experiment 108556 PARAMETER Experiment Name: Zm_Drought_P Parameter: Tissue Value: Aerial
  misc_feature: MA Experiment 108556 PARAMETER Experiment Name: Zm_Drought_P Parameter: Treatment Value: Drought vs. No Drought
  misc_feature: MA Experiment ID: 108559 Result: Down-regulated in Transcription
  misc_feature: MA Experiment 108559 PARAMETER Experiment Name: Zm_5mM_NO_P Parameter: Age (day) Value: 8
  misc_feature: MA Experiment 108559 PARAMETER Experiment Name: Zm_5mM_NO_P Parameter: Organism Value: Zea mays
  misc_feature: MA Experiment 108559 PARAMETER Experiment Name: Zm_5mM_NO_P Parameter: Plant Line Value: 35A19
  misc_feature: MA Experiment 108559 PARAMETER Experiment Name: Zm_5mM_NO_P Parameter: Timepoint (hr) Value: 12
  misc_feature: MA Experiment 108559 PARAMETER Experiment Name: Zm_5mM_NO_P Parameter: Tissue Value: Aerial
  misc_feature: MA Experiment 108559 PARAMETER Experiment Name: Zm_5mM_NO_P Parameter: Treatment Value: 5mM NO vs. No Treatment
  misc_feature: MA Experiment ID: 108687 Result: Down-regulated in Transcription
  misc_feature: MA Experiment 108687 PARAMETER Experiment Name: Zm_Embryos-Flowers__P Parameter: Tissue Value: Embryo vs. Aerial+
  misc_feature: MA Experiment ID: 20000477 Result: Down-regulated in Transcription
  misc_feature: MA Experiment 20000477 PARAMETER Experiment Name: Zm_5mM_SA_P Parameter: Age (day) Value: 10
  misc_feature: MA Experiment 20000477 PARAMETER Experiment Name: Zm_5mM_SA_P Parameter: Organism Value: Zea mays
  misc_feature: MA Experiment 20000477 PARAMETER Experiment Name: Zm_5mM_SA_P Parameter: Plant Line Value: 35A19
  misc_feature: MA Experiment 20000477 PARAMETER Experiment Name: Zm_5mM_SA_P Parameter: Timepoint (hr) Value: 48
  misc_feature: MA Experiment 20000477 PARAMETER Experiment Name: Zm_5mM_SA_P Parameter: Tissue Value: Aerial
  misc_feature: MA Experiment 20000477 PARAMETER Experiment Name: Zm_5mM_SA_P Parameter: Treatment Value: 5mM SA vs. No Treatment
  misc_feature: MA Experiment ID: 20000535 Result: Down-regulated in Transcription
  misc_feature: MA Experiment 20000535 PARAMETER Experiment Name: Zm_Hybrid_Seed_Dev_P Parameter: DAP Value: 30 vs. 12
  misc_feature: MA Experiment 20000535 PARAMETER Experiment Name: Zm_Hybrid_Seed_Dev_P Parameter: Organism Value: Zea mays
  misc_feature: MA Experiment 20000535 PARAMETER Experiment Name: Zm_Hybrid_Seed_Dev_P Parameter: Plant Line Value: 35A19
  misc_feature: MA Experiment 20000535 PARAMETER Experiment Name: Zm_Hybrid_Seed_Dev_P Parameter: Tissue Value: Embryo vs. Unfert Floret
aacccggctggagctcagcctcagctagcctggggaccgctgcacgaacagtagtccttcctcctcctataaagtaaccacacgacccgcctcctacccatccaccagcagctgaggtcgtcggccatggcggagcgggagcagcaagagcaggtggctagcgacgacgcggcggagtggaagcaggtggcggagctgagggccgtcacccaggcccaggacccttcctgcaaggatgaggacgactacacgctccggcgcttcctccgcgcgcgggaccacaacatcggcaaggcgtcggcgatgctgctcaagtacctcaagtggaagcccgcggccaagccccacggcgccatcgcagcggcggaggtggcgcgggaggcggcgcaggggaagctctacctgcagggccacgaccgggagggccgccccctcatctacggcttcggcgcgcgccaccacccggcgcgcagggacctcgacgagttcaagcgctacgtcgtccacgtcctcgacgccaccgtcgcgcgcctgccccctccccctccgggagatggtcgccaggagaagttcgccgccgtcgccgacctcgccggctggggctacgccaactgcgacatccgaggctacctggcggcgctcgacatcatgcagagctactacccggagcgcctcgcccgcgtcttcctcgtccacgtgccctacgtcttcatggccgcctggaagatcgtctacccttttatcgacgacaacaccaagaagaagttcgtcttcgtgccggacaaggacctggacaggacgctccgcgaggccatcgacgactcccagctgccggagatctatggtggcaagctcaagctcgtcacgccggccgcaaaattaccaagccactagctagggggcccggtgcatgacgattgtacgagttcttaactctcactggtatatcaccatccctagccggccgcattgattggggatgcaaaacctaccaaaagataagttcacaagttacat

SEQ ID NO: 2777 - protein, 255 aa, Zea mays subsp. mays
  peptide (1)..(255): Ceres Seq. ID no. 12402466
  misc_feature (90)..(243): Pfam Name: CRAL/TRIO domain Pfam Description: CRAL/TRIO domain
  misc_feature (3)..(248): Homolog of NCBI NO: 27573358 NR Description: putative phosphatidylinositol/phosphatidylcholine
MAEREQQEQVASDDAAEWKQVAELRAVTQAQDPSCKDEDDYTLRRFLRARDHNIGKASAMLLKYLKWKPAAKPHGAIAAAEVAREAAQGKLYLQGHDREGRPLIYGFGARHHPARRDLDEFKRYVVHVLDATVARLPPPPPGDGRQEKFAAVADLAGWGYANCDIRGYLAALDIMQSYYPERLARVFLVHVPYVFMAAWKIVYPFIDDNTKKKFVFVPDKDLDRTLREAIDDSQLPEIYGGKLKLVTPAAKLPSH

SEQ ID NO: 2778 - protein, 220 aa, Zea mays subsp. mays
  peptide (1)..(220): Ceres Seq. ID no. 12402467
  misc_feature (3)..(220): Pfam Name: Equine herpesvirus glycoprotein gp2 Pfam Description: Equine herpesvirus glycoprotein gp2
  misc_feature (1)..(215): Homolog of NCBI NO: 13592175 NR Description: ppg3 [Leishmania major]
  misc_feature (1)..(220): Homolog of NCBI NO: 13592175 NR Description: ppg3 [Leishmania major]
  misc_feature (1)..(215): Homolog of NCBI NO: 13592175 NR Description: ppg3 [Leishmania major]
  misc_feature (1)..(210): Homolog of NCBI NO: 13592175 NR Description: ppg3 [Leishmania major]
  misc_feature (1)..(210): Homolog of NCBI NO: 13592175 NR Description: ppg3 [Leishmania major]
  misc_feature (1)..(220): Homolog of NCBI NO: 13592175 NR Description: ppg3 [Leishmania major]
  misc_feature (1)..(220): Homolog of NCBI NO: 13592175 NR Description: ppg3 [Leishmania major]
  misc_feature (1)..(210): Homolog of NCBI NO: 13592175 NR Description: ppg3 [Leishmania major]
  misc_feature (1)..(215): Homolog of NCBI NO: 13592175 NR Description: ppg3 [Leishmania major]
  misc_feature (1)..(210): Homolog of NCBI NO: 13592175 NR Description: ppg3 [Leishmania major]
MRTTTRSGASSARGTTTSARRRRCCSSTSSGSPRPSPTAPSQRRRWRGRRRRGSSTCRATTGRAAPSSTASARATTRRAGTSTSSSATSSTSSTPPSRACPLPLREMVARRSSPPSPTSPAGATPTATSEATWRRSTSCRATTRSASPASSSSTCPTSSWPPGRSSTLLSTTTPRRSSSSCRTRTWTGRSARPSTTPSCRRSMVASSSSSRRPQNYQATS

SEQ ID NO: 2779 - protein, 196 aa, Zea mays subsp. mays
  peptide (1)..(196): Ceres Seq. ID no. 12402468
  misc_feature (31)..(184): Pfam Name: CRAL/TRIO domain Pfam Description: CRAL/TRIO domain
  misc_feature (1)..(189): Homolog of NCBI NO: 27573358 NR Description: putative phosphatidylinositol/phosphatidylcholine
MLLKYLKWKPAAKPHGAIAAAEVAREAAQGKLYLQGHDREGRPLIYGFGARHHPARRDLDEFKRYVVHVLDATVARLPPPPPGDGRQEKFAAVADLAGWGYANCDIRGYLAALDIMQSYYPERLARVFLVHVPYVFMAAWKIVYPFIDDNTKKKFVFVPDKDLDRTLREAIDDSQLPEIYGGKLKLVTPAAKLPSH

SEQ ID NO: 2780 - DNA, 1367 bp, Zea mays subsp. mays
  misc_feature (1)..(1367): Ceres Seq. ID no. 12366910
  misc_feature: MA Experiment ID: 108529 Result: Up-regulated in Transcription
  misc_feature: MA Experiment 108529 PARAMETER Experiment Name: Zm_Imbibed_Seeds_P Parameter: Age (day) Value: 5 vs. 2
  misc_feature: MA Experiment 108529 PARAMETER Experiment Name: Zm_Imbibed_Seeds_P Parameter: Organism Value: Zea mays
  misc_feature: MA Experiment 108529 PARAMETER Experiment Name: Zm_Imbibed_Seeds_P Parameter: Plant Line Value: 35A19
  misc_feature: MA Experiment 108529 PARAMETER Experiment Name: Zm_Imbibed_Seeds_P Parameter: Tissue Value: Roots vs. Embryo
  misc_feature: MA Experiment ID: 108535 Result: Down-regulated in Transcription
  misc_feature: MA Experiment 108535 PARAMETER Experiment Name: Zm_Meristem_P Parameter: Age (day) Value: 8
  misc_feature: MA Experiment 108535 PARAMETER Experiment Name: Zm_Meristem_P Parameter: Organism Value: Zea mays
  misc_feature: MA Experiment 108535 PARAMETER Experiment Name: Zm_Meristem_P Parameter: Plant Line Value: 35A19
  misc_feature: MA Experiment 108535 PARAMETER Experiment Name: Zm_Meristem_P Parameter: Tissue Value: Root Meristem vs. Above Root Meristem
  misc_feature: MA Experiment ID: 108546 Result: Up-regulated in Transcription
  misc_feature: MA Experiment 108546 PARAMETER Experiment Name: Zm_Imbibed_Seeds_P Parameter: Age (day) Value: 3 vs. 2
  misc_feature: MA Experiment 108546 PARAMETER Experiment Name: Zm_Imbibed_Seeds_P Parameter: Organism Value: Zea mays
  misc_feature: MA Experiment 108546 PARAMETER Experiment Name: Zm_Imbibed_Seeds_P Parameter: Plant Line Value: 35A19
  misc_feature: MA Experiment 108546 PARAMETER Experiment Name: Zm_Imbibed_Seeds_P Parameter: Tissue Value: Roots vs. Embryo
  misc_feature: MA Experiment ID: 20000108 Result: Down-regulated in Transcription
  misc_feature: MA Experiment 20000108 PARAMETER Experiment Name: Zm_Root-Tips_P Parameter: Age (day) Value: 12
  misc_feature: MA Experiment 20000108 PARAMETER Experiment Name: Zm_Root-Tips_P Parameter: Organism Value: Zea mays
  misc_feature: MA Experiment 20000108 PARAMETER Experiment Name: Zm_Root-Tips_P Parameter: Tissue Value: Root tips vs. Root mid region    35
  misc_feature: MA Experiment 20000108 PARAMETER Experiment Name: Zm_Root-Tips_P Parameter: Tissue Value: Root tips vs. Root mid region   Sequence Listing-Misc Features (4)
aaatcatacgtgtagtgatagccatgaggtctcttctccacaccaccaatagcagtagcccgccccctggcagcagcaggaagcagcagcactgcggcagcagatgcttcgtcgtatcccttctcctggtcctgctagctcttgtagcctcggacgtgtatctcagcttcccaaaccgacgacgggttcttccattgttcccccagcagcttttgtctcgcagacagcagcgaggcggcgagggcggctgtgacattttcaggggcgagtgggtgccggacccggacgcgccctactacaccaacgacacctgcaaggtgatccacgagcactacgactgtatggggtacggcaagccggacctgggctttgtcaactggaggtggcagcctgacggctgcgaccttccccgcttcaacccatggcgcttcctccacatgatgaggggcaagacccttgccttcgttggcgactccctcggcaggaaccacaaggactcgctcatctgcctcttgaccacagtcgcggagcctacgacgagctggccgagcagcaagcacaccgtgtactactacgccgactacaacttcaccgtggcccacttctgggcgccgtaccttgtccggcacgagcagatcgacgaggacgggccagcgcacacgggcgtctggaacctctacctggacgagccggacggcgtgtgggcggcgcacgtcgcggagttcgactacgccgtcgtgtccgcgtccagctggttctaccgcccctccatgctgtacgaggccggccggctcgtcggctgccactactgccggctgcccaacgtcaccgacctcacgctgcgctacgcgctgcgcatggccacgcgggccgcgctgcgggcgctgtccggcgccgacggccgcttccgcggcacggccctgctgcgcaccgtggacccgtcgcagtacgagggcggggagtggaacgaggacggcaactgcatccggacggcgccgttccggcgtggccagaacgcggtccagggcctcgagcgtgagttccgcacgctgcagctggaggagttcgcgtcggtggcgaaggcggcgacggacagtggcggtaaggtgaggatgctgctgatggacaccacggaagccatgatactgcgtgcggacgcgcacccgagcaagtaccgggggtggacgccggagaagcacttcaccctgcacaacgactgcgtgcactggtgcctgcccggggccattgatgcgtggaacgacatgctgcttcatatgttgaaatgatcatcagtaattttaattaataatgccaaaccagtgtggctgtgtagtgtgtacaatatggtgctccctccgttgacaagt

SEQ ID NO: 2781 - protein, 427 aa, Zea mays subsp. mays
  peptide (1)..(427): Ceres Seq. ID no. 12366911
  misc_feature (252)..(426): Pfam Name: Arabidopsis proteins of unknown function Pfam Description: Arabidopsis proteins of unknown function
  misc_feature (14)..(423): Homolog of NCBI NO: 15234058 NR Description: hypothetical protein; protein id: At4g01080.1
  misc_feature (14)..(423): Homolog of NCBI NO: 28393189 NR Description: unknown protein [Arabidopsis thaliana]
  misc_feature (87)..(426): Homolog of NCBI NO: 34898640 NR Description: hypothetical protein~similar to Oryza sativa
  misc_feature (68)..(427): Homolog of NCBI NO: 15232914 NR Description: hypothetical protein
  misc_feature (83)..(426): Homolog of NCBI NO: 30678135 NR Description: expressed protein [Arabidopsis thaliana]
  misc_feature (72)..(427): Homolog of NCBI NO: 15237211 NR Description: putative protein; protein id: At5g15890.1
  misc_feature (83)..(427): Homolog of NCBI NO: 15237213 NR Description: putative protein; protein id: At5g15900.1
  misc_feature (83)..(426): Homolog of NCBI NO: 34911888 NR Description: OSJNBb0032K15.21 [Oryza sativa (japonica
  misc_feature (83)..(426): Homolog of NCBI NO: 34911880 NR Description: OSJNBb0032K15.17 [Oryza sativa (japonica
  misc_feature (38)..(426): Homolog of NCBI NO: 34898638 NR Description: contains ESTs
IIRVVIAMRSLLHTTNSSSPPPGSSRKQQHCGSRCFVVSLLLVLLALVASDVYLSFPNRRRVLPLFPQQLLSRRQQRGGEGGCDIFRGEWVPDPDAPYYTNDTCKVIHEHYDCMGYGKPDLGFVNWRWQPDGCDLPRFNPWRFLHMMRGKTLAFVGDSLGRNHKDSLICLLTTVAEPTTSWPSSKHTVYYYADYNFTVAHFWAPYLVRHEQIDEDGPAHTGVWNLYLDEPDGVWAAHVAEFDYAVVSASSWFYRPSMLYEAGRLVGCHYCRLPNVTDLTLRYALRMATRAALRALSGADGRFRGTALLRTVDPSQYEGGEWNEDGNCIRTAPFRRGQNAVQGLEREFRTLQLEEFASVAKAATDSGGKVRMLLMDTTEAMILRADAHPSKYRGWTPEKHFTLHNDCVHWCLPGAIDAWNDMLLHMLK

SEQ ID NO: 2782 - protein, 420 aa, Zea mays subsp. mays
  peptide (1)..(420): Ceres Seq. ID no. 12366912
  misc_feature (245)..(419): Pfam Name: Arabidopsis proteins of unknown function Pfam Description: Arabidopsis proteins of unknown function
  misc_feature (7)..(416): Homolog of NCBI NO: 15234058 NR Description: hypothetical protein; protein id: At4g01080.1
  misc_feature (7)..(416): Homolog of NCBI NO: 28393189 NR Description: unknown protein [Arabidopsis thaliana]
  misc_feature (80)..(419): Homolog of NCBI NO: 34898640 NR Description: hypothetical protein~similar to Oryza sativa
  misc_feature (61)..(420): Homolog of NCBI NO: 15232914 NR Description: hypothetical protein
  misc_feature (76)..(419): Homolog of NCBI NO: 30678135 NR Description: expressed protein [Arabidopsis thaliana]
  misc_feature (65)..(420): Homolog of NCBI NO: 15237211 NR Description: putative protein; protein id: At5g15890.1
  misc_feature (76)..(420): Homolog of NCBI NO: 15237213 NR Description: putative protein; protein id: At5g15900.1
  misc_feature (76)..(419): Homolog of NCBI NO: 34911888 NR Description: OSJNBb0032K15.21 [Oryza sativa (japonica
  misc_feature (76)..(419): Homolog of NCBI NO: 34911880 NR Description: OSJNBb0032K15.17 [Oryza sativa (japonica
  misc_feature (31)..(419): Homolog of NCBI NO: 34898638 NR Description: contains ESTs
MRSLLHTTNSSSPPPGSSRKQQHCGSRCFVVSLLLVLLALVASDVYLSFPNRRRVLPLFPQQLLSRRQQRGGEGGCDIFRGEWVPDPDAPYYTNDTCKVIHEHYDCMGYGKPDLGFVNWRWQPDGCDLPRFNPWRFLHMMRGKTLAFVGDSLGRNHKDSLICLLTTVAEPTTSWPSSKHTVYYYADYNFTVAHFWAPYLVRHEQIDEDGPAHTGVWNLYLDEPDGVWAAHVAEFDYAVVSASSWFYRPSMLYEAGRLVGCHYCRLPNVTDLTLRYALRMATRAALRALSGADGRFRGTALLRTVDPSQYEGGEWNEDGNCIRTAPFRRGQNAVQGLEREFRTLQLEEFASVAKAATDSGGKVRMLLMDTTEAMILRADAHPSKYRGWTPEKHFTLHNDCVHWCLPGAIDAWNDMLLHMLK

SEQ ID NO: 2783 - protein, 314 aa, Zea mays subsp. mays
  peptide (1)..(314): Ceres Seq. ID no. 12366913
  misc_feature (139)..(313): Pfam Name: Arabidopsis proteins of unknown function Pfam Description: Arabidopsis proteins of unknown function
  misc_feature (1)..(310): Homolog of NCBI NO: 15234058 NR Description: hypothetical protein; protein id: At4g01080.1
  misc_feature (1)..(310): Homolog of NCBI NO: 28393189 NR Description: unknown protein [Arabidopsis thaliana]
  misc_feature (1)..(313): Homolog of NCBI NO: 34898640 NR Description: hypothetical protein~similar to Oryza sativa
  misc_feature (1)..(314): Homolog of NCBI NO: 15232914 NR Description: hypothetical protein
  misc_feature (1)..(313): Homolog of NCBI NO: 30678135 NR Description: expressed protein [Arabidopsis thaliana]
  misc_feature (1)..(314): Homolog of NCBI NO: 15237211 NR Description: putative protein; protein id: At5g15890.1
  misc_feature (1)..(314): Homolog of NCBI NO: 15237213 NR Description: putative protein; protein id: At5g15900.1
  misc_feature (1)..(313): Homolog of NCBI NO: 34911888 NR Description: OSJNBb0032K15.21 [Oryza sativa (japonica
  misc_feature (1)..(313): Homolog of NCBI NO: 34911880 NR Description: OSJNBb0032K15.17 [Oryza sativa (japonica
  misc_feature (1)..(313): Homolog of NCBI NO: 34898638 NR Description: contains ESTs
MGYGKPDLGFVNWRWQPDGCDLPRFNPWRFLHMMRGKTLAFVGDSLGRNHKDSLICLLTTVAEPTTSWPSSKHTVYYYADYNFTVAHFWAPYLVRHEQIDEDGPAHTGVWNLYLDEPDGVWAAHVAEFDYAVVSASSWFYRPSMLYEAGRLVGCHYCRLPNVTDLTLRYALRMATRAALRALSGADGRFRGTALLRTVDPSQYEGGEWNEDGNCIRTAPFRRGQNAVQGLEREFRTLQLEEFASVAKAATDSGGKVRMLLMDTTEAMILRADAHPSKYRGWTPEKHFTLHNDCVHWCLPGAIDAWNDMLLHMLK

SEQ ID NO: 2784 - DNA, 1312 bp, Zea mays subsp. mays
  misc_feature (1)..(1312): Ceres Seq. ID no. 12406486
  misc_feature: MA Experiment ID: 108543 Result: Down-regulated in Transcription
  misc_feature: MA Experiment ID: 20000477 Result: Down-regulated in Transcription
  misc_feature: MA Experiment 20000477 PARAMETER Experiment Name: Zm_5mM_SA_P Parameter: Age (day) Value: 10
  misc_feature: MA Experiment 20000477 PARAMETER Experiment Name: Zm_5mM_SA_P Parameter: Organism Value: Zea mays
  misc_feature: MA Experiment 20000477 PARAMETER Experiment Name: Zm_5mM_SA_P Parameter: Plant Line Value: 35A19
  misc_feature: MA Experiment 20000477 PARAMETER Experiment Name: Zm_5mM_SA_P Parameter: Timepoint (hr) Value: 48
  misc_feature: MA Experiment 20000477 PARAMETER Experiment Name: Zm_5mM_SA_P Parameter: Tissue Value: Aerial
  misc_feature: MA Experiment 20000477 PARAMETER Experiment Name: Zm_5mM_SA_P Parameter: Treatment Value: 5mM SA vs. No Treatment
  misc_feature: MA Experiment ID: 20000492 Result: Up-regulated in Transcription
  misc_feature: MA Experiment 20000492 PARAMETER Experiment Name: Zm_Hybrid_Seed_Dev_P Parameter: DAP Value: 12
  misc_feature: MA Experiment 20000492 PARAMETER Experiment Name: Zm_Hybrid_Seed_Dev_P Parameter: Organism Value: Zea mays
  misc_feature: MA Experiment 20000492 PARAMETER Experiment Name: Zm_Hybrid_Seed_Dev_P Parameter: Plant Line Value: 35A19
  misc_feature: MA Experiment 20000492 PARAMETER Experiment Name: Zm_Hybrid_Seed_Dev_P Parameter: Tissue Value: Fert Kernel vs. Unfert Floret
agttgttctttggcttctgatttcaacaaaaaaaatggtgtttctctaaaacccacaaagccctcctctgctctccatccctgtctctcgctttccctaacccacaccagaataccagatcgagcaccgatctagggttgcacctcttctgctagccggctggcgaggagccgttcggcatctggacgcggccaagggagatgaagctcgcggggctcaagtctgtggacggcgctcacgaggagtccatctgggcggcggcgtgggcgcccgccgctgaccaccgccccacggcggtgctcctcactggcgcgctcgacgagaccgtccgcgcttggctccccgacgacctcgctgccttggggtcccccacacggggccacgcgctcggagtcgtctccctcgccgcccaccccgccggctcgctcgccgccgccgtgtcgctcgacagcttcatccgcgtctttgacgtcgacacgggggcatccgtcgccacgctggaggcgccgccgtccgagatttggggcgtccagttccatcccaagggtaatgctctggccgcagccggtggtggcagtggatcagtgaagctgtgggacacggagaagtggaaggcgatcaccagcctcgccgtcccacgcccggagggagctcgccccgacaagacaggcagcggcaagttcgtcctgtcagtcgcctggagccccgacggaaggctcctagcatgcgggtccatggacggcacgatcgccgtctacgacgcggtccgcatgaagttcctgcaccacctggagggccaccacatgccggtgcggtccatggtgttctccccggtggacccgcacgtgcttttcacggcctgcgacgactgccacgtccacatctacgacgccagggagaagggcctcgtcggggccatgtcgggccacgcgagctgggtgctgagcatcgacgcgagccccgacggcctggcggtggccacggggtcgagcgaccgcaccgtccggctctgggacctcaacatgaggacctcggtgcagaccatgagcaaccactccgatcaggtgtgggccgtggccttcaggccaccaggcggtgccggagtccgagcagggcgtctggctagcgcgtcggatgacaagagcgtctccctgtacgattactcgtaggtttttgtttccttataaaccgttgcaaatgcctctgttgtaccgaccagagatttgaattcgggcatggtggttggaagaattgttgtacgcagcacagtagtcgaggtgttaaattgcaaggaaagagtttatttcgtgct

SEQ ID NO: 2785 - protein, 322 aa, Zea mays subsp. mays
  peptide (1)..(322): Ceres Seq. ID no. 12406487
  misc_feature (34)..(320): Homolog of NCBI NO: 13173173 NR Description: unknown protein i8 [Aedes aegypti]
  misc_feature (12)..(288): Homolog of NCBI NO: 26345856 NR Description: unnamed protein product [Mus musculus]
  misc_feature (29)..(319): Homolog of NCBI NO: 21356075 NR Description: CG3909-PA [Drosophila melanogaster]
  misc_feature (12)..(320): Homolog of NCBI NO: 33150742 NR Description: G protein beta subunit-like protein [Homo sapiens]
  misc_feature (12)..(320): Homolog of NCBI NO: 12849020 NR Description: unnamed protein product [Mus musculus]
  misc_feature (12)..(320): Homolog of NCBI NO: 13277350 NR Description: meiotic recombination protein REC14 [Mus
  misc_feature (12)..(320): Homolog of NCBI NO: 13376840 NR Description: recombination protein REC14 [Homo sapiens]
  misc_feature (12)..(320): Homolog of NCBI NO: 37590940 NR Description: Unknown (protein for MGC:75826) [Silurana
  misc_feature (12)..(320): Homolog of NCBI NO: 38541742 NR Description: Unknown (protein for MGC:77675) [Danio rerio]
  misc_feature (1)..(322): Homolog of NCBI NO: 15233721 NR Description: G-protein beta family
MKLAGLKSVDGAHEESIWAAAWAPAADHRPTAVLLTGALDETVRAWLPDDLAALGSPTRGHALGVVSLAAHPAGSLAAAVSLDSFIRVFDVDTGASVATLEAPPSEIWGVQFHPKGNALAAAGGGSGSVKLWDTEKWKAITSLAVPRPEGARPDKTGSGKFVLSVAWSPDGRLLACGSMDGTIAVYDAVRMKFLHHLEGHHMPVRSMVFSPVDPHVLFTACDDCHVHIYDAREKGLVGAMSGHASWVLSIDASPDGLAVATGSSDRTVRLWDLNMRTSVQTMSNHSDQVWAVAFRPPGGAGVRAGRLASASDDKSVSLYDYS

SEQ ID NO: 2786 - DNA, 491 bp, Zea mays subsp. mays
  misc_feature (1)..(491): Ceres Seq. ID no. 5758056
  misc_feature: MA Experiment ID: 108504 Result: Down-regulated in Transcription
  misc_feature: MA Experiment 108504 PARAMETER Experiment Name: Zm_Drought_P Parameter: Age (day) Value: 8
  misc_feature: MA Experiment 108504 PARAMETER Experiment Name: Zm_Drought_P Parameter: Organism Value: Zea mays
  misc_feature: MA Experiment 108504 PARAMETER Experiment Name: Zm_Drought_P Parameter: Plant Line Value: 35A19
  misc_feature: MA Experiment 108504 PARAMETER Experiment Name: Zm_Drought_P Parameter: Timepoint (hr) Value: 12
  misc_feature: MA Experiment 108504 PARAMETER Experiment Name: Zm_Drought_P Parameter: Tissue Value: Aerial
  misc_feature: MA Experiment 108504 PARAMETER Experiment Name: Zm_Drought_P Parameter: Treatment Value: Drought vs. No Drought
  misc_feature: MA Experiment ID: 108527 Result: Down-regulated in Transcription
  misc_feature: MA Experiment 108527 PARAMETER Experiment Name: Zm_5mM_NO_P Parameter: Age (day) Value: 8
  misc_feature: MA Experiment 108527 PARAMETER Experiment Name: Zm_5mM_NO_P Parameter: Organism Value: Zea mays
  misc_feature: MA Experiment 108527 PARAMETER Experiment Name: Zm_5mM_NO_P Parameter: Plant Line Value: 35A19
  misc_feature: MA Experiment 108527 PARAMETER Experiment Name: Zm_5mM_NO_P Parameter: Timepoint (hr) Value: 6
  misc_feature: MA Experiment 108527 PARAMETER Experiment Name: Zm_5mM_NO_P Parameter: Tissue Value: Aerial
  misc_feature: MA Experiment 108527 PARAMETER Experiment Name: Zm_5mM_NO_P Parameter: Treatment Value: 5mM NO vs. No Treatment
  misc_feature: MA Experiment ID: 108528 Result: Down-regulated in Transcription
  misc_feature: MA Experiment 108528 PARAMETER Experiment Name: Zm_Imbibed_Seeds_P Parameter: Age (day) Value: 5 vs. 2
  misc_feature: MA Experiment 108528 PARAMETER Experiment Name: Zm_Imbibed_Seeds_P Parameter: Organism Value: Zea mays
  misc_feature: MA Experiment 108528 PARAMETER Experiment Name: Zm_Imbibed_Seeds_P Parameter: Plant Line Value: 35A19
  misc_feature: MA Experiment 108528 PARAMETER Experiment Name: Zm_Imbibed_Seeds_P Parameter: Tissue Value: Aerial vs. Embryo
  misc_feature: MA Experiment ID: 108529 Result: Down-regulated in Transcription
  misc_feature: MA Experiment 108529 PARAMETER Experiment Name: Zm_Imbibed_Seeds_P Parameter: Age (day) Value: 5 vs. 2
  misc_feature: MA Experiment 108529 PARAMETER Experiment Name: Zm_Imbibed_Seeds_P Parameter: Organism Value: Zea mays
  misc_feature: MA Experiment 108529 PARAMETER Experiment Name: Zm_Imbibed_Seeds_P Parameter: Plant Line Value: 35A19
  misc_feature: MA Experiment 108529 PARAMETER Experiment Name: Zm_Imbibed_Seeds_P Parameter: Tissue Value: Roots vs. Embryo
  misc_feature: MA Experiment ID: 108530 Result: Down-regulated in Transcription
  misc_feature: MA Experiment 108530 PARAMETER Experiment Name: Zm_Imbibed_Seeds_P Parameter: Age (day) Value: 6 vs. 2
  misc_feature: MA Experiment 108530 PARAMETER Experiment Name: Zm_Imbibed_Seeds_P Parameter: Organism Value: Zea mays
  misc_feature: MA Experiment 108530 PARAMETER Experiment Name: Zm_Imbibed_Seeds_P Parameter: Plant Line Value: 35A19
  misc_feature: MA Experiment 108530 PARAMETER Experiment Name: Zm_Imbibed_Seeds_P Parameter: Tissue Value: Aerial vs. Embryo
  misc_feature: MA Experiment ID: 108535 Result: Up-regulated in Transcription
  misc_feature: MA Experiment 108535 PARAMETER Experiment Name: Zm_Meristem_P Parameter: Age (day) Value: 8
  misc_feature: MA Experiment 108535 PARAMETER Experiment Name: Zm_Meristem_P Parameter: Organism Value: Zea mays
  misc_feature: MA Experiment 108535 PARAMETER Experiment Name: Zm_Meristem_P Parameter: Plant Line Value: 35A19
  misc_feature: MA Experiment 108535 PARAMETER Experiment Name: Zm_Meristem_P Parameter: Tissue Value: Root Meristem vs. Above Root Meristem
  misc_feature: MA Experiment ID: 108544 Result: Down-regulated in Transcription
  misc_feature: MA Experiment ID: 108556 Result: Down-regulated in Transcription
  misc_feature: MA Experiment 108556 PARAMETER Experiment Name: Zm_Drought_P Parameter: Age (day) Value: 9
  misc_feature: MA Experiment 108556 PARAMETER Experiment Name: Zm_Drought_P Parameter: Organism Value: Zea mays
  misc_feature: MA Experiment 108556 PARAMETER Experiment Name: Zm_Drought_P Parameter: Plant Line Value: 35A19
  misc_feature: MA Experiment 108556 PARAMETER Experiment Name: Zm_Drought_P Parameter: Timepoint (hr) Value: 24
  misc_feature: MA Experiment 108556 PARAMETER Experiment Name: Zm_Drought_P Parameter: Tissue Value: Aerial
  misc_feature: MA Experiment 108556 PARAMETER Experiment Name: Zm_Drought_P Parameter: Treatment Value: Drought vs. No Drought
  misc_feature: MA Experiment ID: 20000478 Result: Down-regulated in Transcription
  misc_feature: MA Experiment 20000478 PARAMETER Experiment Name: Zm_5mM_SA_P Parameter: Age (day) Value: 11
  misc_feature: MA Experiment 20000478 PARAMETER Experiment Name: Zm_5mM_SA_P Parameter: Organism Value: Zea mays
  misc_feature: MA Experiment 20000478 PARAMETER Experiment Name: Zm_5mM_SA_P Parameter: Plant Line Value: 35A19
  misc_feature: MA Experiment 20000478 PARAMETER Experiment Name: Zm_5mM_SA_P Parameter: Timepoint (hr) Value: 72
  misc_feature: MA Experiment 20000478 PARAMETER Experiment Name: Zm_5mM_SA_P Parameter: Tissue Value: Aerial
  misc_feature: MA Experiment 20000478 PARAMETER Experiment Name: Zm_5mM_SA_P Parameter: Treatment Value: 5mM SA vs. No Treatment
  misc_feature: MA Experiment ID: 20000487 Result: Up-regulated in Transcription
  misc_feature: MA Experiment 20000487 PARAMETER Experiment Name: Zm_50mM_NH4NO3_L_to_H_P Parameter: Organism Value: Zea mays
  misc_feature: MA Experiment 20000487 PARAMETER Experiment Name: Zm_50mM_NH4NO3_L_to_H_P Parameter: Timepoint (hr) Value: 4
  misc_feature: MA Experiment 20000487 PARAMETER Experiment Name: Zm_50mM_NH4NO3_L_to_H_P Parameter: Tissue Value: Leaves
  misc_feature: MA Experiment 20000487 PARAMETER Experiment Name: Zm_50mM_NH4NO3_L_to_H_P Parameter: Treatment Value: 50mM NH4NO3 vs. 100mM Mannitol
  misc_feature: MA Experiment ID: 20000488 Result: Up-regulated in Transcription
  misc_feature: MA Experiment 20000488 PARAMETER Experiment Name: Zm_50mM_NH4NO3_L_to_H_P Parameter: Organism Value: Zea mays
  misc_feature: MA Experiment 20000488 PARAMETER Experiment Name: Zm_50mM_NH4NO3_L_to_H_P Parameter: Timepoint (hr) Value: 8
  misc_feature: MA Experiment 20000488 PARAMETER Experiment Name: Zm_50mM_NH4NO3_L_to_H_P Parameter: Tissue Value: Leaves
  misc_feature: MA Experiment 20000488 PARAMETER Experiment Name: Zm_50mM_NH4NO3_L_to_H_P Parameter: Treatment Value: 50mM NH4NO3 vs. 100mM Mannitol
  misc_feature: MA Experiment ID: 20000492 Result: Up-regulated in Transcription
  misc_feature: MA Experiment 20000492 PARAMETER Experiment Name: Zm_Hybrid_Seed_Dev_P Parameter: DAP Value: 12
  misc_feature: MA Experiment 20000492 PARAMETER Experiment Name: Zm_Hybrid_Seed_Dev_P Parameter: Organism Value: Zea mays
  misc_feature: MA Experiment 20000492 PARAMETER Experiment Name: Zm_Hybrid_Seed_Dev_P Parameter: Plant Line Value: 35A19
  misc_feature: MA Experiment 20000492 PARAMETER Experiment Name: Zm_Hybrid_Seed_Dev_P Parameter: Tissue Value: Fert Kernel vs. Unfert Floret
  misc_feature: MA Experiment ID: 20000534 Result: Down-regulated in Transcription
  misc_feature: MA Experiment 20000534 PARAMETER Experiment Name: Zm_Hybrid_Pollen_P Parameter: Age (day) Value: 8
  misc_feature: MA Experiment 20000534 PARAMETER Experiment Name: Zm_Hybrid_Pollen_P Parameter: Organism Value: Zea mays
  misc_feature: MA Experiment 20000534 PARAMETER Experiment Name: Zm_Hybrid_Pollen_P Parameter: Plant Line Value: 35A19
  misc_feature: MA Experiment 20000534 PARAMETER Experiment Name: Zm_Hybrid_Pollen_P Parameter: Tissue Value: Pollen vs. Aerial
  misc_feature: MA Experiment ID: 20000632 Result: Down-regulated in Transcription
  misc_feature: MA Experiment 20000632 PARAMETER Experiment Name: Zm_Herbicide-Treatments_P Parameter: Timepoint (hr) Value: 4
  misc_feature: MA Experiment 20000632 PARAMETER Experiment Name: Zm_Herbicide-Treatments_P Parameter: Tissue Value: Aerial
  misc_feature: MA Experiment 20000632 PARAMETER Experiment Name: Zm_Herbicide-Treatments_P Parameter: Treatment Value: Glean vs. No Treatment
aaaaacgaacccgcccggagcagcaaagcatatgcgctctgcaccaagaacatggtcccgggagaktccgtgtacgagagaagcgtgtctccgttcagaatgaggatggaacaaaggtcgaatacagggtgtggaaccccttccgttccaagctggctgctgctgtgcttggtggtgttgacaacatctggattgctcctggtacccgtgtgctgtatcttggtgctgcttctggcacaaccgtatctcatgtgtctgatattgtagggccggatggtttggtctacgctgttgagttctctcacaggagcggaagagaccttgtcaacatggcaaagaagaggaccaatgtgatccccattattgaggatgccaggcatccgncaaggtaccggatgttggtaggcatggttgatgttatcttctctgatgttgcacagccagaccaggctaggatcttagcacttaatgcttcatacttcttgaagaac

SEQ ID NO: 2787 - protein, 163 aa, Zea mays subsp. mays
  peptide (1)..(163): Ceres Seq. ID no. 5758057
  misc_feature (19)..(162): Pfam Name: Fibrillarin Pfam Description: Fibrillarin
  misc_feature (19)..(162): Homolog of NCBI NO: 25012804 NR Description: RE72617p [Drosophila melanogaster]
  misc_feature (19)..(162): Homolog of NCBI NO: 17647425 NR Description: Fibrillarin CG9888-PA
  misc_feature (19)..(162): Homolog of NCBI NO: 31200907 NR Description: ENSANGP00000015622 [Anopheles gambiae]
  misc_feature (19)..(162): Homolog of NCBI NO: 27374264 NR Description: Fib-PA [Drosophila erecta]
  misc_feature (19)..(162): Homolog of NCBI NO: 19113021 NR Description: fibrillarin. [Schizosaccharomyces pombe]
  misc_feature (26)..(162): Homolog of NCBI NO: 2982266 NR Description: probable fibrillarin [Picea mariana]
  misc_feature (19)..(162): Homolog of NCBI NO: 6003681 NR Description: fibrillarin homolog [Arabidopsis thaliana]
  misc_feature (19)..(162): Homolog of NCBI NO: 30696189 NR Description: fibrillarin 1 (Fib1) (SKIP7) [Arabidopsis
  misc_feature (19)..(162): Homolog of NCBI NO: 15028155 NR Description: putative fibrillarin 2 protein AtFib2
  misc_feature (19)..(162): Homolog of NCBI NO: 18416588 NR Description: fibrillarin 2 (AtFib2)
  misc_feature (22)..(22): Xaa is any aa, unknown or other
  misc_feature (128)..(128): Xaa is any aa, unknown or other
KRTRPEQQSICALHQEHGPGRXRVREKRVSVQNEDGTKVEYRVWNPFRSKLAAAVLGGVDNIWIAPGTRVLYLGAASGTTVSHVSDIVGPDGLVYAVEFSHRSGRDLVNMAKKRTNVIPIIEDARHPXRYRMLVGMVDVIFSDVAQPDQARILALNASYFLKN

SEQ ID NO: 2788 - protein, 88 aa, Zea mays subsp. mays
  peptide (1)..(88): Ceres Seq. ID no. 5758058
  misc_feature (22)..(22): Xaa is any aa, unknown or other
KNEPARSSKAYALCTKNMVPGXSVYERSVSPFRMRMEQRSNTGCGTPSVPSWLLLCLVVLTTSGLLLVPVCCILVLLLAQPYLMCLIL

SEQ ID NO: 2789 - DNA, 1366 bp, Zea mays subsp. mays
  misc_feature (1)..(1366): Ceres Seq. ID no. 12407332
  misc_feature: MA Experiment ID: 108543 Result: Down-regulated in Transcription
  misc_feature: MA Experiment ID: 20000626 Result: Up-regulated in Transcription
  misc_feature: MA Experiment 20000626 PARAMETER Experiment Name: Zm_Herbicide-Treatments_P Parameter: Timepoint (hr) Value: 12
  misc_feature: MA Experiment 20000626 PARAMETER Experiment Name: Zm_Herbicide-Treatments_P Parameter: Tissue Value: Aerial
  misc_feature: MA Experiment 20000626 PARAMETER Experiment Name: Zm_Herbicide-Treatments_P Parameter: Treatment Value: Roundup vs. No Treatment
  misc_feature: MA Experiment ID: 20000630 Result: Up-regulated in Transcription
  misc_feature: MA Experiment 20000630 PARAMETER Experiment Name: Zm_Herbicide-Treatments_P Parameter: Timepoint (hr) Value: 4
  misc_feature: MA Experiment 20000630 PARAMETER Experiment Name: Zm_Herbicide-Treatments_P Parameter: Tissue Value: Aerial
  misc_feature: MA Experiment 20000630 PARAMETER Experiment Name: Zm_Herbicide-Treatments_P Parameter: Treatment Value: Roundup vs. No Treatment
aagcgcaaggaagcaatcgggaagagacaacggcaagcgacgggactcgggaggaagcaagtgcaaagcagcattcttgtaggagagtgagtgagtttcttcgtaccgagctaagagaaacaaaagaacagcaagaaccggcagtgcaacataagactacgtagctgctaatcgaacctggcgtctactgtttcctcttccttttgcccaaaatcacagcgcctggggttcaatccaaactacttgcattgctatccaagtttttagttacaggatcggcgagctactcggattcctctcccacggcgttgcctgcgcgccacgcccggcgccgaacgtctcggctgcgccggccccggtcccggccatgccgccgatgggctggacgaacgcggggaggcctcgtcctgccgacgcgcccgacgggctcatcccgagccccaggaagtccagcgtcgccgggcttcccgctgaacagagacgactggcccatcatgagctccggcaggctcacctgagccccggtggagtcgtacggcagcccaaggccgagcccggccgacagcattggcgccggctccagctccagccgcggcggccattgctgcagcgaggcgtccgggagtgacacccgcatggcctcctggtgctggtgctgctggcctgacgacgaggcgcccggcgacgacgaggagacgtccaggcccagcccgcgcaggaacgaggagctcgacgaggtggcgcccatctgcgcggccttctgcagcagcgcggtggccgacatgtgtgcggacggggacggggacggaggcggcggcgcgaactgctggcgctcggcggtcaccgccggcgccgccgagaagatcgacgacgatgcgtccgtggcgaggcacagcggcgggggcttggcgggatgggcgcgctccggccggccgccgaggtccgcgtactgcggcgctgacgccatcgacgacggcgcgaacataccgccgagcaggctctgcgacgtccccgcgacgctgctgctgctgctgctggcgccaacgttggcagcagcgctcaccgaatcttgcgaaagcaccggtacctgtaactgcggcggcggcggtggcggaggcggcggcggtggcggaggcggcggcgcgaactggacggcctcagtcgcattcgtgtcagtctctgcatgcattgcaacgaagcattagcgaatcgggggcatggattagattcagactagattgattagtgtaaaaggcgctaaaagctcgggagatgcagaaagcaacgagaggccatgatggcgtccttttcatgttgctcgtgggcgtgcttttgtcatcggatttcaatgctctgagaagttctg

SEQ ID NO: 2790 - protein, 189 aa, Zea mays subsp. mays
  peptide (1)..(189): Ceres Seq. ID no. 12407333
MASWCWCCWPDDEAPGDDEETSRPSPRRNEELDEVAPICAAFCSSAVADMCADGDGDGGGGANCWRSAVTAGAAEKIDDDASVARHSGGGLAGWARSGRPPRSAYCGADAIDDGANIPPSRLCDVPATLLLLLLAPTLAAALTESCESTGTCNCGGGGGGGGGGGGGGGANWTASVAFVSVSACIATKH

SEQ ID NO: 2791 - protein, 140 aa, Zea mays subsp. mays
  peptide (1)..(140): Ceres Seq. ID no. 12407334
MCADGDGDGGGGANCWRSAVTAGAAEKIDDDASVARHSGGGLAGWARSGRPPRSAYCGADAIDDGANIPPSRLCDVPATLLLLLLAPTLAAALTESCESTGTCNCGGGGGGGGGGGGGGGANWTASVAFVSVSACIATKH

SEQ ID NO: 2792 - protein, 122 aa, Zea mays subsp. mays
  peptide (1)..(122): Ceres Seq. ID no. 12407335
  misc_feature (1)..(92): Homolog of NCBI NO: 11360494 NR Description: antifreeze glycopeptide AFGP polyprotein
  misc_feature (1)..(40): Homolog of NCBI NO: 25989119 NR Description: unknown [Streptomyces aureofaciens]
  misc_feature (1)..(94): Homolog of NCBI NO: 11360494 NR Description: antifreeze glycopeptide AFGP polyprotein
  misc_feature (1)..(90): Homolog of NCBI NO: 9366817 NR Description: conserved hypothetical protein [Trypanosoma
  misc_feature (1)..(95): Homolog of NCBI NO: 11360494 NR Description: antifreeze glycopeptide AFGP polyprotein
  misc_feature (1)..(92): Homolog of NCBI NO: 11360494 NR Description: antifreeze glycopeptide AFGP polyprotein
  misc_feature (1)..(115): Homolog of NCBI NO: 11360494 NR Description: antifreeze glycopeptide AFGP polyprotein
  misc_feature (1)..(86): Homolog of NCBI NO: 11360494 NR Description: antifreeze glycopeptide AFGP polyprotein
  misc_feature (1)..(49): Homolog of NCBI NO: 29250754 NR Description: GLP_49_64409_65443 [Giardia lamblia ATCC 50803]
  misc_feature (1)..(94): Homolog of NCBI NO: 11360494 NR Description: antifreeze glycopeptide AFGP polyprotein
MRPWRGTAAGAWRDGRAPAGRRGPRTAALTPSTTARTYRRAGSATSPRRCCCCCWRQRWQQRSPNLAKAPVPVTAAAAVAEAAAVAEAAARTGRPQSHSCQSLHALQRSISESGAWIRFRLD

SEQ ID NO: 2793 - DNA, 1572 bp, Zea mays subsp. mays
  misc_feature (1)..(1572): Ceres Seq. ID no. 12410547
  misc_feature: MA Experiment ID: 108522 Result: Down-regulated in Transcription
  misc_feature: MA Experiment 108522 PARAMETER Experiment Name: Zm_42deg_Heat_P Parameter: Age (day) Value: 8
  misc_feature: MA Experiment 108522 PARAMETER Experiment Name: Zm_42deg_Heat_P Parameter: Organism Value: Zea mays
  misc_feature: MA Experiment 108522 PARAMETER Experiment Name: Zm_42deg_Heat_P Parameter: Plant Line Value: 35A19
  misc_feature: MA Experiment 108522 PARAMETER Experiment Name: Zm_42deg_Heat_P Parameter: Temperature (deg C) Value: 42 vs. 22
  misc_feature: MA Experiment 108522 PARAMETER Experiment Name: Zm_42deg_Heat_P Parameter: Timepoint (hr) Value: 1
  misc_feature: MA Experiment 108522 PARAMETER Experiment Name: Zm_42deg_Heat_P Parameter: Tissue Value: Aerial
  misc_feature: MA Experiment ID: 108544 Result: Down-regulated in Transcription
gcacaaccaagaggcaacagagcaacgccagccacacacgacacgaaccaggtaaccagctgccgaggaaccctagcggaacactgtgcaggtgacggcggcgcgctaccggtgacggggtataccgtatacggcggcatcgtccccctcggcccctcctccatcccggcgcggcggcgcaggcagccagccttcaggggttaaacctgatgccaatccgcaggggttaaacctaatgccaatccgaagggccttgctgagctcgcctccatcgcccaggacctcgccgcctcctctgtgtcgttgcccagaacctcacagccaacacacgcatcctcttatcgtgcctcatcctccaagacgatgggctgctccccctacgtgcctcctcctccacgccgacaagcatctccccccgacacgcatcctcctccacgccgtgcttggtggtggcggcggacggtggttacctggggctgcggtgggccgtgcctggcatgcaaggtgagcagtccagcatcgagtggtcagtgtagggtgtgccgcggtctgccattgcgctgattgaagcagagtcagtgagttactgccgtgcgctgattggagccttcgtagccggctggagcgccgccgagaggtgaaggccacacgcgattgctgattagagattagagcagatccattgagccaccactccacctctgttcaccggcacgagtgaattgaattgggttttctgactcagattacttgttcactgtggggtgcaagcttaatcggccaccatggatgttgataagcaagaaacaatggaggagaccatccttgttggtgatgatctcatgcgtgggccgccatcccctgtcataccgaaagagatcgcatcacatgtccttgaagatgttgagctttgtgatggtatactcaagaaccttttcttatgcctacagatcaatgatattgagccattctgccaagatgaaattgtgctatatcgacagtgtgctgagaaaagggacaaggaaataagagagcggatgcaaaatagtgaatataaattgggtttttcaatgcccctggaagaagcgaaagagagagctactcaactccaatcagaagtaacactgctagaaaggcgcatgattcttgctagtggacttgagggtatggaaggatttcgccagagatggagcttgcatggacagcttgaagacacaaggaaaaggctagaagcactgaaccatggcatggcaaaacgagagaaccaaagttctacggcggagaggacaaaatctccagctaggaagaagtggttcttttggtaggttagtatcattgtcagacttgagaaatattgtagcttgagttgtattagcggcaatgctacacactttttaacttccacagcactctgcctccaactagccacttaatttgctaacaagtaacaagcgatttgcttatatatagctgcagttttaaatgtttaaatcatgtattaaaccttgtaactgcaggtgatggtacggttgcattccattttgtgatttatgacagccacttgccctcctc

SEQ ID NO: 2794 - protein, 179 aa, Zea mays subsp. mays
  peptide (1)..(179): Ceres Seq. ID no. 12410548
  misc_feature (128)..(166): Homolog of NCBI NO: 34906406 NR Description: P0710E05.16 [Oryza sativa (japonica
  misc_feature (9)..(143): Homolog of NCBI NO: 15233419 NR Description: hypothetical protein; protein id: At4g04190.1
  misc_feature (9)..(179): Homolog of NCBI NO: 21741739 NR Description: OSJNBa0073L04.19 [Oryza sativa (japonica
MDVDKQETMEETILVGDDLMRGPPSPVIPKEIASHVLEDVELCDGILKNLFLCLQINDIEPFCQDEIVLYRQCAEKRDKEIRERMQNSEYKLGFSMPLEEAKERATQLQSEVTLLERRMILASGLEGMEGFRQRWSLHGQLEDTRKRLEALNHGMAKRENQSSTAERTKSPARKKWFFW

SEQ ID NO: 2795 - protein, 171 aa, Zea mays subsp. mays
  peptide (1)..(171): Ceres Seq. ID no. 12410549
  misc_feature (120)..(158): Homolog of NCBI NO: 34906406 NR Description: P0710E05.16 [Oryza sativa (japonica
  misc_feature (1)..(135): Homolog of NCBI NO: 15233419 NR Description: hypothetical protein; protein id: At4g04190.1
  misc_feature (1)..(171): Homolog of NCBI NO: 21741739 NR Description: OSJNBa0073L04.19 [Oryza sativa (japonica
MEETILVGDDLMRGPPSPVIPKEIASHVLEDVELCDGILKNLFLCLQINDIEPFCQDEIVLYRQCAEKRDKEIRERMQNSEYKLGFSMPLEEAKERATQLQSEVTLLERRMILASGLEGMEGFRQRWSLHGQLEDTRKRLEALNHGMAKRENQSSTAERTKSPARKKWFFW

SEQ ID NO: 2796 - protein, 160 aa, Zea mays subsp. mays
  peptide (1)..(160): Ceres Seq. ID no. 12410550
  misc_feature (109)..(147): Homolog of NCBI NO: 34906406 NR Description: P0710E05.16 [Oryza sativa (japonica
  misc_feature (1)..(124): Homolog of NCBI NO: 15233419 NR Description: hypothetical protein; protein id: At4g04190.1
  misc_feature (1)..(160): Homolog of NCBI NO: 21741739 NR Description: OSJNBa0073L04.19 [Oryza sativa (japonica
MRGPPSPVIPKEIASHVLEDVELCDGILKNLFLCLQINDIEPFCQDEIVLYRQCAEKRDKEIRERMQNSEYKLGFSMPLEEAKERATQLQSEVTLLERRMILASGLEGMEGFRQRWSLHGQLEDTRKRLEALNHGMAKRENQSSTAERTKSPARKKWFFW

SEQ ID NO: 2797 - DNA, 1415 bp, Zea mays subsp. mays
  misc_feature (1)..(1415): Ceres Seq. ID no. 12352133
  misc_feature: MA Experiment ID: 108523 Result: Down-regulated in Transcription
  misc_feature: MA Experiment 108523 PARAMETER Experiment Name: Zm_42deg_Heat_P Parameter: Age (day) Value: 8
  misc_feature: MA Experiment 108523 PARAMETER Experiment Name: Zm_42deg_Heat_P Parameter: Organism Value: Zea mays
  misc_feature: MA Experiment 108523 PARAMETER Experiment Name: Zm_42deg_Heat_P Parameter: Plant Line Value: 35A19
  misc_feature: MA Experiment 108523 PARAMETER Experiment Name: Zm_42deg_Heat_P Parameter: Temperature (deg C) Value: 42 vs. 22
  misc_feature: MA Experiment 108523 PARAMETER Experiment Name: Zm_42deg_Heat_P Parameter: Timepoint (hr) Value: 6
  misc_feature: MA Experiment 108523 PARAMETER Experiment Name: Zm_42deg_Heat_P Parameter: Tissue Value: Aerial
  misc_feature: MA Experiment ID: 108529 Result: Down-regulated in Transcription
  misc_feature: MA Experiment 108529 PARAMETER Experiment Name: Zm_Imbibed_Seeds_P Parameter: Age (day) Value: 5 vs. 2
  misc_feature: MA Experiment 108529 PARAMETER Experiment Name: Zm_Imbibed_Seeds_P Parameter: Organism Value: Zea mays
  misc_feature: MA Experiment 108529 PARAMETER Experiment Name: Zm_Imbibed_Seeds_P Parameter: Plant Line Value: 35A19
  misc_feature: MA Experiment 108529 PARAMETER Experiment Name: Zm_Imbibed_Seeds_P Parameter: Tissue Value: Roots vs. Embryo
  misc_feature: MA Experiment ID: 108543 Result: Up-regulated in Transcription
  misc_feature: MA Experiment ID: 108544 Result: Down-regulated in Transcription
  misc_feature: MA Experiment ID: 108546 Result: Down-regulated in Transcription
  misc_feature: MA Experiment 108546 PARAMETER Experiment Name: Zm_Imbibed_Seeds_P Parameter: Age (day) Value: 3 vs. 2
  misc_feature: MA Experiment 108546 PARAMETER Experiment Name: Zm_Imbibed_Seeds_P Parameter: Organism Value: Zea mays
  misc_feature: MA Experiment 108546 PARAMETER Experiment Name: Zm_Imbibed_Seeds_P Parameter: Plant Line Value: 35A19
  misc_feature: MA Experiment 108546 PARAMETER Experiment Name: Zm_Imbibed_Seeds_P Parameter: Tissue Value: Roots vs. Embryo
aatacttgcttgcattgcctcccgtttgccccgatccaacgacgacgttcgctggccgtagccaagaaggtatctcgcccaaacaaaggccgtcaagccaccatatggccgtgtccggcgagaagccgccaccgccaccgccaccggccacggcgtccggcggaacggcaaggaagctcatcctagcgctgcttacatgtctgtcgtcggcgctgctgtacaggcagattcagccgctaccgcccaagatccccggcacgccgggcggcccgccggtgacggcgaccaggacgaggctcagcgacggcaggtacctggcctatctggaaaccggcgtcccgagggagaaggccaagcacaggctcgtctttgtccatgggttcgactcctgcagacacgacgcgcttccgatctccacggagcttgcgcaagagctgggcgtttacatgttgtccttcgatcgccccgggtacgccgagagcgacccgcacccggccaggaccgaggagagcatcgccctcgacatcgccgagctcgccgacaacctgcagctgggtcgcaagttctaccttgctggcttctccatgggcggcgagatcatgtggagctgcctcaagtacatcccacacaggctctccggcgtggccattctcggccccgtaggcaactactggtggcccggcttgccgtcgaacgtgtcgcgggacgcctggtaccagcagctccctcgggaccagtgggcggtctgggtcgcgcatcacctgccgtggctcacctactggtggaacacccagaagctcttcccggcctccagcgtcatcgcctacaaccctgccctcctgtcccaagaggacgagatgctcatggccaagtttggctatagagcctacatgccgcagatcaggcaacagggggagcacgagtgcctgcaccgggacatgatggtcgggttcggcaagtggagctggagccccgctgcagctggagaacccgttcgccgacgccgacgccgacgatggccagggggcggggaaggtgcacctgtggcacggcgccgaggacctcatcgtgccggtcagcctgtccaggtacatcagccagaagctgccgtgggtcgtctaccacgagctccccaagtcgggacatctcttcccgatcgccgaggggatggctgacatcattgtcaagtccctgctgctcggagacgatcatccgtcgtcgtcggcctcacagcgtcctcattctccatgaatccaggtcgtcacgtagtccgttcgcatctcgtggcccgtctctcactgtttctgtaaagggaccgatggtgcagctttctctagcgtgtagctaggatgctcttttttttttgaaaaataatggaactaagttttagcctatatatatcatctgataatgtt

SEQ ID NO: 2798 - protein, 390 aa, Zea mays subsp. mays
  peptide (1)..(390): Ceres Seq. ID no. 12352134
  misc_feature (147)..(330): Pfam Name: alpha/beta hydrolase fold Pfam Description: alpha/beta hydrolase fold
  misc_feature (49)..(330): Homolog of NCBI NO: 37536164 NR Description: putative alpha/beta hydrolase
  misc_feature (61)..(330): Homolog of NCBI NO: 34908462 NR Description: P0683F02.22 [Oryza sativa (japonica
  misc_feature (70)..(371): Homolog of NCBI NO: 21592662 NR Description: unknown [Arabidopsis thaliana]
  misc_feature (52)..(377): Homolog of NCBI NO: 28416665 NR Description: At2g36290 [Arabidopsis thaliana]
  misc_feature (52)..(377): Homolog of NCBI NO: 18404095 NR Description: expressed protein
  misc_feature (61)..(330): Homolog of NCBI NO: 15242253 NR Description: putative protein
  misc_feature (76)..(352): Homolog of NCBI NO: 15232465 NR Description: putative protein (fragment); protein id:
  misc_feature (76)..(352): Homolog of NCBI NO: 11357595 NR Description: hypothetical protein F24B22.200 - Arabidopsis
  misc_feature (50)..(330): Homolog of NCBI NO: 15228377 NR Description: putative protein
  misc_feature (57)..(330): Homolog of NCBI NO: 38346334 NR Description: OSJNBa0073L04.5 [Oryza sativa (japonica
YLLALPPVCPDPTTTFAGRSQEGISPKQRPSSHHMAVSGEKPPPPPPPATASGGTARKLILALLTCLSSALLYRQIQPLPPKIPGTPGGPPVTATRTRLSDGRYLAYLETGVPREKAKHRLVFVHGFDSCRHDALPISTELAQELGVYMLSFDRPGYAESDPHPARTEESIALDIAELADNLQLGRKFYLAGFSMGGEIMWSCLKYIPHRLSGVAILGPVGNYWWPGLPSNVSRDAWYQQLPRDQWAVWVAHHLPWLTYWWNTQKLFPASSVIAYNPALLSQEDEMLMAKFGYRAYMPQIRQQGEHECLHRDMMVGFGKWSWSPAAAGEPVRRRRRRRWPGGGEGAPVARRRGPHRAGQPVQVHQPEAAVGRLPRAPQVGTSLPDRRGDG

SEQ ID NO: 2799 - protein, 356 aa, Zea mays subsp. mays
  peptide (1)..(356): Ceres Seq. ID no. 12352135
  misc_feature (113)..(296): Pfam Name: alpha/beta hydrolase fold Pfam Description: alpha/beta hydrolase fold
  misc_feature (15)..(296): Homolog of NCBI NO: 37536164 NR Description: putative alpha/beta hydrolase
  misc_feature (27)..(296): Homolog of NCBI NO: 34908462 NR Description: P0683F02.22 [Oryza sativa (japonica
  misc_feature (36)..(337): Homolog of NCBI NO: 21592662 NR Description: unknown [Arabidopsis thaliana]
  misc_feature (18)..(343): Homolog of NCBI NO: 28416665 NR Description: At2g36290 [Arabidopsis thaliana]
  misc_feature (18)..(343): Homolog of NCBI NO: 18404095 NR Description: expressed protein
  misc_feature (27)..(296): Homolog of NCBI NO: 15242253 NR Description: putative protein
  misc_feature (42)..(318): Homolog of NCBI NO: 15232465 NR Description: putative protein (fragment); protein id:
  misc_feature (42)..(318): Homolog of NCBI NO: 11357595 NR Description: hypothetical protein F24B22.200 - Arabidopsis
  misc_feature (16)..(296): Homolog of NCBI NO: 15228377 NR Description: putative protein
  misc_feature (23)..(296): Homolog of NCBI NO: 38346334 NR Description: OSJNBa0073L04.5 [Oryza sativa (japonica
MAVSGEKPPPPPPPATASGGTARKLILALLTCLSSALLYRQIQPLPPKIPGTPGGPPVTATRTRLSDGRYLAYLETGVPREKAKHRLVFVHGFDSCRHDALPISTELAQELGVYMLSFDRPGYAESDPHPARTEESIALDIAELADNLQLGRKFYLAGFSMGGEIMWSCLKYIPHRLSGVAILGPVGNYWWPGLPSNVSRDAWYQQLPRDQWAVWVAHHLPWLTYWWNTQKLFPASSVIAYNPALLSQEDEMLMAKFGYRAYMPQIRQQGEHECLHRDMMVGFGKWSWSPAAAGEPVRRRRRRRWPGGGEGAPVARRRGPHRAGQPVQVHQPEAAVGRLPRAPQVGTSLPDRRGDG

SEQ ID NO: 2800 - protein, 242 aa, Zea mays subsp. mays
  peptide (1)..(242): Ceres Seq. ID no. 12352136
  misc_feature (1)..(182): Pfam Name: alpha/beta hydrolase fold Pfam Description: alpha/beta hydrolase fold
  misc_feature (1)..(182): Homolog of NCBI NO: 37536164 NR Description: putative alpha/beta hydrolase
  misc_feature (1)..(182): Homolog of NCBI NO: 34908462 NR Description: P0683F02.22 [Oryza sativa (japonica
  misc_feature (1)..(223): Homolog of NCBI NO: 21592662 NR Description: unknown [Arabidopsis thaliana]
  misc_feature (1)..(229): Homolog of NCBI NO: 28416665 NR Description: At2g36290 [Arabidopsis thaliana]
  misc_feature (1)..(229): Homolog of NCBI NO: 18404095 NR Description: expressed protein
  misc_feature (1)..(182): Homolog of NCBI NO: 15242253 NR Description: putative protein
  misc_feature (1)..(204): Homolog of NCBI NO: 15232465 NR Description: putative protein (fragment); protein id:
  misc_feature (1)..(204): Homolog of NCBI NO: 11357595 NR Description: hypothetical protein F24B22.200 - Arabidopsis
  misc_feature (1)..(182): Homolog of NCBI NO: 15228377 NR Description: putative protein
  misc_feature (1)..(182): Homolog of NCBI NO: 38346334 NR Description: OSJNBa0073L04.5 [Oryza sativa (japonica
MLSFDRPGYAESDPHPARTEESIALDIAELADNLQLGRKFYLAGFSMGGEIMWSCLKYIPHRLSGVAILGPVGNYWWPGLPSNVSRDAWYQQLPRDQWAVWVAHHLPWLTYWWNTQKLFPASSVIAYNPALLSQEDEMLMAKFGYRAYMPQIRQQGEHECLHRDMMVGFGKWSWSPAAAGEPVRRRRRRRWPGGGEGAPVARRRGPHRAGQPVQVHQPEAAVGRLPRAPQVGTSLPDRRGDG

SEQ ID NO: 2801 - DNA, 497 bp, Zea mays subsp. mays
  misc_feature (1)..(497): Ceres Seq. ID no. 1351195
  misc_feature: MA Experiment ID: 108527 Result: Down-regulated in Transcription
  misc_feature: MA Experiment 108527 PARAMETER Experiment Name: Zm_5mM_NO_P Parameter: Age (day) Value: 8
  misc_feature: MA Experiment 108527 PARAMETER Experiment Name: Zm_5mM_NO_P Parameter: Organism Value: Zea mays
  misc_feature: MA Experiment 108527 PARAMETER Experiment Name: Zm_5mM_NO_P Parameter: Plant Line Value: 35A19
  misc_feature: MA Experiment 108527 PARAMETER Experiment Name: Zm_5mM_NO_P Parameter: Timepoint (hr) Value: 6
  misc_feature: MA Experiment 108527 PARAMETER Experiment Name: Zm_5mM_NO_P Parameter: Tissue Value: Aerial
  misc_feature: MA Experiment 108527 PARAMETER Experiment Name: Zm_5mM_NO_P Parameter: Treatment Value: 5mM NO vs. No Treatment
  misc_feature: MA Experiment ID: 108528 Result: Down-regulated in Transcription
  misc_feature: MA Experiment 108528 PARAMETER Experiment Name: Zm_Imbibed_Seeds_P Parameter: Age (day) Value: 5 vs. 2
  misc_feature: MA Experiment 108528 PARAMETER Experiment Name: Zm_Imbibed_Seeds_P Parameter: Organism Value: Zea mays
  misc_feature: MA Experiment 108528 PARAMETER Experiment Name: Zm_Imbibed_Seeds_P Parameter: Plant Line Value: 35A19
  misc_feature: MA Experiment 108528 PARAMETER Experiment Name: Zm_Imbibed_Seeds_P Parameter: Tissue Value: Aerial vs. Embryo
  misc_feature: MA Experiment ID: 108530 Result: Down-regulated in Transcription
  misc_feature: MA Experiment 108530 PARAMETER Experiment Name: Zm_Imbibed_Seeds_P Parameter: Age (day) Value: 6 vs. 2
  misc_feature: MA Experiment 108530 PARAMETER Experiment Name: Zm_Imbibed_Seeds_P Parameter: Organism Value: Zea mays
  misc_feature: MA Experiment 108530 PARAMETER Experiment Name: Zm_Imbibed_Seeds_P Parameter: Plant Line Value: 35A19
  misc_feature: MA Experiment 108530 PARAMETER Experiment Name: Zm_Imbibed_Seeds_P Parameter: Tissue Value: Aerial vs. Embryo
  misc_feature: MA Experiment ID: 108535 Result: Down-regulated in Transcription
  misc_feature: MA Experiment 108535 PARAMETER Experiment Name: Zm_Meristem_P Parameter: Age (day) Value: 8
  misc_feature: MA Experiment 108535 PARAMETER Experiment Name: Zm_Meristem_P Parameter: Organism Value: Zea mays
  misc_feature: MA Experiment 108535 PARAMETER Experiment Name: Zm_Meristem_P Parameter: Plant Line Value: 35A19
  misc_feature: MA Experiment 108535 PARAMETER Experiment Name: Zm_Meristem_P Parameter: Tissue Value: Root Meristem vs. Above Root Meristem
  misc_feature: MA Experiment ID: 108543 Result: Up-regulated in Transcription
  misc_feature: MA Experiment ID: 108597 Result: Up-regulated in Transcription
  misc_feature: MA Experiment 108597 PARAMETER Experiment Name: Zm_100uM_ABA_P Parameter: Age (day) Value: 9
  misc_feature: MA Experiment 108597 PARAMETER Experiment Name: Zm_100uM_ABA_P Parameter: Organism Value: Zea mays
  misc_feature: MA Experiment 108597 PARAMETER Experiment Name: Zm_100uM_ABA_P Parameter: Plant Line Value: 35A19
  misc_feature: MA Experiment 108597 PARAMETER Experiment Name: Zm_100uM_ABA_P Parameter: Timepoint (hr) Value: 24
  misc_feature: MA Experiment 108597 PARAMETER Experiment Name: Zm_100uM_ABA_P Parameter: Tissue Value: Aerial
  misc_feature: MA Experiment 108597 PARAMETER Experiment Name: Zm_100uM_ABA_P Parameter: Treatment Value: 100uM ABA vs. No Treatment
  misc_feature: MA Experiment ID: 108689 Result: Up-regulated in Transcription
  misc_feature: MA Experiment 108689 PARAMETER Experiment Name: Zm_Drought_Roots_P Parameter: Age (day) Value: 9
  misc_feature: MA Experiment 108689 PARAMETER Experiment Name: Zm_Drought_Roots_P Parameter: Organism Value: Zea mays
  misc_feature: MA Experiment 108689 PARAMETER Experiment Name: Zm_Drought_Roots_P Parameter: Plant Line Value: 35A19
  misc_feature: MA Experiment 108689 PARAMETER Experiment Name: Zm_Drought_Roots_P Parameter: Timepoint (hr) Value: 24
  misc_feature: MA Experiment 108689 PARAMETER Experiment Name: Zm_Drought_Roots_P Parameter: Tissue Value: Roots
  misc_feature: MA Experiment 108689 PARAMETER Experiment Name: Zm_Drought_Roots_P Parameter: Treatment Value: Drought vs. No Drought
  misc_feature: MA Experiment ID: 20000477 Result: Up-regulated in Transcription
  misc_feature: MA Experiment 20000477 PARAMETER Experiment Name: Zm_5mM_SA_P Parameter: Age (day) Value: 10
  misc_feature: MA Experiment 20000477 PARAMETER Experiment Name: Zm_5mM_SA_P Parameter: Organism Value: Zea mays
  misc_feature: MA Experiment 20000477 PARAMETER Experiment Name: Zm_5mM_SA_P Parameter: Plant Line Value: 35A19
  misc_feature: MA Experiment 20000477 PARAMETER Experiment Name: Zm_5mM_SA_P Parameter: Timepoint (hr) Value: 48
  misc_feature: MA Experiment 20000477 PARAMETER Experiment Name: Zm_5mM_SA_P Parameter: Tissue Value: Aerial
  misc_feature: MA Experiment 20000477 PARAMETER Experiment Name: Zm_5mM_SA_P Parameter: Treatment Value: 5mM SA vs. No Treatment
  misc_feature: MA Experiment ID: 20000480 Result: Up-regulated in Transcription
  misc_feature: MA Experiment 20000480 PARAMETER Experiment Name: Zm_Drought_P Parameter: Age (day) Value: 11
  misc_feature: MA Experiment 20000480 PARAMETER Experiment Name: Zm_Drought_P Parameter: Organism Value: Zea mays
  misc_feature: MA Experiment 20000480 PARAMETER Experiment Name: Zm_Drought_P Parameter: Plant Line Value: 35A19
  misc_feature: MA Experiment 20000480 PARAMETER Experiment Name: Zm_Drought_P Parameter: Timepoint (hr) Value: 72
  misc_feature: MA Experiment 20000480 PARAMETER Experiment Name: Zm_Drought_P Parameter: Tissue Value: Aerial
  misc_feature: MA Experiment 20000480 PARAMETER Experiment Name: Zm_Drought_P Parameter: Treatment Value: Drought vs. No Drought
  misc_feature: MA Experiment ID: 20000487 Result: Up-regulated in Transcription
  misc_feature: MA Experiment 20000487 PARAMETER Experiment Name: Zm_50mM_NH4NO3_L_to_H_P Parameter: Organism Value: Zea mays
  misc_feature: MA Experiment 20000487 PARAMETER Experiment Name: Zm_50mM_NH4NO3_L_to_H_P Parameter: Timepoint (hr) Value: 4
  misc_feature: MA Experiment 20000487 PARAMETER Experiment Name: Zm_50mM_NH4NO3_L_to_H_P Parameter: Tissue Value: Leaves
  misc_feature: MA Experiment 20000487 PARAMETER Experiment Name: Zm_50mM_NH4NO3_L_to_H_P Parameter: Treatment Value: 50mM NH4NO3 vs. 100mM Mannitol
  misc_feature: MA Experiment ID: 20000492 Result: Down-regulated in Transcription
  misc_feature: MA Experiment 20000492 PARAMETER Experiment Name: Zm_Hybrid_Seed_Dev_P Parameter: DAP Value: 12
  misc_feature: MA Experiment 20000492 PARAMETER Experiment Name: Zm_Hybrid_Seed_Dev_P Parameter: Organism Value: Zea mays
  misc_feature: MA Experiment 20000492 PARAMETER Experiment Name: Zm_Hybrid_Seed_Dev_P Parameter: Plant Line Value: 35A19
  misc_feature: MA Experiment 20000492 PARAMETER Experiment Name: Zm_Hybrid_Seed_Dev_P Parameter: Tissue Value: Fert Kernel vs. Unfert Floret
  misc_feature: MA Experiment ID: 20000632 Result: Down-regulated in Transcription
  misc_feature: MA Experiment 20000632 PARAMETER Experiment Name: Zm_Herbicide-Treatments_P Parameter: Timepoint (hr) Value: 4
  misc_feature: MA Experiment 20000632 PARAMETER Experiment Name: Zm_Herbicide-Treatments_P Parameter: Tissue Value: Aerial
  misc_feature: MA Experiment 20000632 PARAMETER Experiment Name: Zm_Herbicide-Treatments_P Parameter: Treatment Value: Glean vs. No Treatment
  misc_feature: MA Experiment ID: 20000633 Result: Down-regulated in Transcription
  misc_feature: MA Experiment 20000633 PARAMETER Experiment Name: Zm_Herbicide-Treatments_P Parameter: Timepoint (hr) Value: 4
  misc_feature: MA Experiment 20000633 PARAMETER Experiment Name: Zm_Herbicide-Treatments_P Parameter: Tissue Value: Aerial
  misc_feature: MA Experiment 20000633 PARAMETER Experiment Name: Zm_Herbicide-Treatments_P Parameter: Treatment Value: Trimec vs. No Treatment
  misc_feature: MA Experiment ID: 20001610 Result: Up-regulated in Transcription
  misc_feature: MA Experiment 20001610 PARAMETER Experiment Name: Zm_50ppm_KNO3_L-to-H_P Parameter: Age (day) Value: 19
  misc_feature: MA Experiment 20001610 PARAMETER Experiment Name: Zm_50ppm_KNO3_L-to-H_P Parameter: Organism Value: Zea mays
  misc_feature: MA Experiment 20001610 PARAMETER Experiment Name: Zm_50ppm_KNO3_L-to-H_P Parameter: Plant Line Value: 35A19
  misc_feature: MA Experiment 20001610 PARAMETER Experiment Name: Zm_50ppm_KNO3_L-to-H_P Parameter: Timepoint (hr) Value: 2
  misc_feature: MA Experiment 20001610 PARAMETER Experiment Name: Zm_50ppm_KNO3_L-to-H_P Parameter: Tissue Value: Roots
  misc_feature: MA Experiment 20001610 PARAMETER Experiment Name: Zm_50ppm_KNO3_L-to-H_P Parameter: Treatment Value: 50ppm KNO3 vs. 50ppm KCl
  misc_feature: MA Experiment ID: 20001612 Result: Up-regulated in Transcription
  misc_feature: MA Experiment 20001612 PARAMETER Experiment Name: Zm_50ppm_KNO3_L-to-H_P Parameter: Age (day) Value: 19
  misc_feature: MA Experiment 20001612 PARAMETER Experiment Name: Zm_50ppm_KNO3_L-to-H_P Parameter: Organism Value: Zea mays
  misc_feature: MA Experiment 20001612 PARAMETER Experiment Name: Zm_50ppm_KNO3_L-to-H_P Parameter: Plant Line Value: 35A19
  misc_feature: MA Experiment 20001612 PARAMETER Experiment Name: Zm_50ppm_KNO3_L-to-H_P Parameter: Timepoint (hr) Value: 8
  misc_feature: MA Experiment 20001612 PARAMETER Experiment Name: Zm_50ppm_KNO3_L-to-H_P Parameter: Tissue Value: Roots
  misc_feature: MA Experiment 20001612 PARAMETER Experiment Name: Zm_50ppm_KNO3_L-to-H_P Parameter: Treatment Value: 50ppm KNO3 vs. 50ppm KCl
  misc_feature: MA Experiment ID: 20001613 Result: Up-regulated in Transcription
  misc_feature: MA Experiment 20001613 PARAMETER Experiment Name: Zm_50ppm_KNO3_L-to-H_P Parameter: Age (day) Value: 20
  misc_feature: MA Experiment 20001613 PARAMETER Experiment Name: Zm_50ppm_KNO3_L-to-H_P Parameter: Organism Value: Zea mays
  misc_feature: MA Experiment 20001613 PARAMETER Experiment Name: Zm_50ppm_KNO3_L-to-H_P Parameter: Plant Line Value: 35A19
  misc_feature: MA Experiment 20001613 PARAMETER Experiment Name: Zm_50ppm_KNO3_L-to-H_P Parameter: Timepoint (hr) Value: 24
  misc_feature: MA Experiment 20001613 PARAMETER Experiment Name: Zm_50ppm_KNO3_L-to-H_P Parameter: Tissue Value: Roots
  misc_feature: MA Experiment 20001613 PARAMETER Experiment Name: Zm_50ppm_KNO3_L-to-H_P Parameter: Treatment Value: 50ppm KNO3 vs. 50ppm KCl
gatgaactgtagcgcgtgayagtgaggggatttggttggatccaatgtttggtcggtctgcttgcatcacctggtttcctggctataaagcgacggggcccttgckctgggcsggagactggagagggcgagagtcctcccatccacaagttcttagcttttgctgagattgagatccggctggggacagaccgacagaggaaggaggacagaaaaatggggattggagatggatcttcaaatgggaaccagcaaccggtgcataaggaaatacgagatgagaccacaccacttcttccagtcaaggtggaggaggacgaggggtttcatgagttcaatggagcttcattctctggggcagttttcaatctgtcgaccaccatagttggggctggaattatggctcttccagcaagtatcaagatgctgggcatcatcccggggattctgttgatcatccttgtggcactgctcacagaggcatccatcgacatgct

SEQ ID NO: 2802 - protein, 93 aa, Zea mays subsp. mays
  peptide (1)..(93): Ceres Seq. ID no. 1351196
  misc_feature (43)..(92): Homolog of NCBI NO: 34907894 NR Description: P0439E11.11 [Oryza sativa (japonica
  misc_feature (24)..(91): Homolog of NCBI NO: 15228851 NR Description: putative protein
  misc_feature (1)..(92): Homolog of NCBI NO: 24461850 NR Description: CTV.3 [Poncirus trifoliata]
  misc_feature (42)..(92): Homolog of NCBI NO: 18412864 NR Description: expressed protein
  misc_feature (25)..(90): Homolog of NCBI NO: 30688270 NR Description: amino acid transporter family [Arabidopsis
  misc_feature (25)..(92): Homolog of NCBI NO: 34907896 NR Description: P0439E11.12 [Oryza sativa (japonica
  misc_feature (25)..(92): Homolog of NCBI NO: 34898706 NR Description: hypothetical protein [Oryza sativa (japonica
  misc_feature (21)..(92): Homolog of NCBI NO: 18406463 NR Description: expressed protein
  misc_feature (11)..(92): Homolog of NCBI NO: 9758059 NR Description: amino acid transporter-like protein [Arabidopsis
  misc_feature (11)..(92): Homolog of NCBI NO: 15241555 NR Description: transporter -like protein; protein id:
MGIGDGSSNGNQQPVHKEIRDETTPLLPVKVEEDEGFHEFNGASFSGAVFNLSTTIVGAGIMALPASIKMLGIIPGILLIILVALLTEASIDM

SEQ ID NO: 2803 - protein, 51 aa, Zea mays subsp. mays
  peptide (1)..(51): Ceres Seq. ID no. 1351197
MDLQMGTSNRCIRKYEMRPHHFFQSRWRRTRGFMSSMELHSLGQFSICRPP

SEQ ID NO: 2804 - protein, 47 aa, Zea mays subsp. mays
  peptide (1)..(47): Ceres Seq. ID no. 1351198
MGTSNRCIRKYEMRPHHFFQSRWRRTRGFMSSMELHSLGQFSICRPP

SEQ ID NO: 2805 - DNA, 1033 bp, Zea mays subsp. mays
  misc_feature (1)..(1033): Ceres Seq. ID no. 12455198
  misc_feature: MA Experiment ID: 108544 Result: Up-regulated in Transcription
  misc_feature: MA Experiment ID: 108689 Result: Up-regulated in Transcription
  misc_feature: MA Experiment 108689 PARAMETER Experiment Name: Zm_Drought_Roots_P Parameter: Age (day) Value: 9
  misc_feature: MA Experiment 108689 PARAMETER Experiment Name: Zm_Drought_Roots_P Parameter: Organism Value: Zea mays
  misc_feature: MA Experiment 108689 PARAMETER Experiment Name: Zm_Drought_Roots_P Parameter: Plant Line Value: 35A19
  misc_feature: MA Experiment 108689 PARAMETER Experiment Name: Zm_Drought_Roots_P Parameter: Timepoint (hr) Value: 24
  misc_feature: MA Experiment 108689 PARAMETER Experiment Name: Zm_Drought_Roots_P Parameter: Tissue Value: Roots
  misc_feature: MA Experiment 108689 PARAMETER Experiment Name: Zm_Drought_Roots_P Parameter: Treatment Value: Drought vs. No Drought
  misc_feature: MA Experiment ID: 20000480 Result: Up-regulated in Transcription
  misc_feature: MA Experiment 20000480 PARAMETER Experiment Name: Zm_Drought_P Parameter: Age (day) Value: 11
  misc_feature: MA Experiment 20000480 PARAMETER Experiment Name: Zm_Drought_P Parameter: Organism Value: Zea mays
  misc_feature: MA Experiment 20000480 PARAMETER Experiment Name: Zm_Drought_P Parameter: Plant Line Value: 35A19
  misc_feature: MA Experiment 20000480 PARAMETER Experiment Name: Zm_Drought_P Parameter: Timepoint (hr) Value: 72
  misc_feature: MA Experiment 20000480 PARAMETER Experiment Name: Zm_Drought_P Parameter: Tissue Value: Aerial
  misc_feature: MA Experiment 20000480 PARAMETER Experiment Name: Zm_Drought_P Parameter: Treatment Value: Drought vs. No Drought
  misc_feature: MA Experiment ID: 20000535 Result: Down-regulated in Transcription
  misc_feature: MA Experiment 20000535 PARAMETER Experiment Name: Zm_Hybrid_Seed_Dev_P Parameter: DAP Value: 30 vs. 12
  misc_feature: MA Experiment 20000535 PARAMETER Experiment Name: Zm_Hybrid_Seed_Dev_P Parameter: Organism Value: Zea mays
  misc_feature: MA Experiment 20000535 PARAMETER Experiment Name: Zm_Hybrid_Seed_Dev_P Parameter: Plant Line Value: 35A19
  misc_feature: MA Experiment 20000535 PARAMETER Experiment Name: Zm_Hybrid_Seed_Dev_P Parameter: Tissue Value: Embryo vs. Unfert Floret
gtgtctcttatttctttgtgtgtttggttgctggaaagggagtggacttttacaacttctcatgtccctattgttgggagggttcggagtccggatcgggatttgccacaaccagattgttcaacactcggaaggctcaccaaatcgtcctacgcttctgcttcctcctccacgaggtgaggaaaccctagcgactgaccatggcgttgctcccgcgcaccgcacggttggccttcctctctaccccgcggtcgtactccgccgccgccgctgcgggcgcctccccgacctccccagcgccatacgggggcgcgcccccaccggcgatgtcgaagacggccgagttcgtggtctccaaggttgatgacctgatgaactgggcgcgtaagggctcgatttggcccatgacctttgggctcgcctgctgcgcggtcgagatgatgcacgccggcgcgtcccgctacgacttcgaccggttcggcgtcatcttccgtccctcgccgcgccagtccgattgcatgatcgtcgccggcacgctcaccaacaaaatggctccagccctccgcaaggtttatgaccaaatgcctgagcctagatgggttatttcaatgggcagctgtgccaacggtggtggatactaccattactcctactctgttgtacgtggatgtgaccgtatagtccccgtggacatctacgtccctgggtgcccaccaactgctgaggcactgctgtacggtgttcttcagctccaaaagaagatcaacaggcgtaaggatttccttcactggtggaccaagtgaagcatgcttctgctgttgctcgcttgctacgtttctttgcactcgacctacctgtcttatctgaaataaggacggactttgctcggattcacaaatttgttgtgcctggaaggatgtatgcccaggttgtgacgaacatataacttgtgtacttggagtcagttcgcctgtaatggacaccagacctgctgtgaatctgtttttaagcttccattgtaatacagcaatac

SEQ ID NO: 2806 - protein, 200 aa, Zea mays subsp. mays
  peptide (1)..(200): Ceres Seq. ID no. 12455199
  misc_feature (78)..(185): Pfam Name: NADH ubiquinone oxidoreductase, 20 Kd subunit Pfam Description: NADH ubiquinone oxidoreductase, 20 Kd subunit
  misc_feature (44)..(200): Homolog of NCBI NO: 11466535 NR Description: NADH dehydrogenase, subunit 10 [Reclinomonas
  misc_feature (40)..(200): Homolog of NCBI NO: 34328788 NR Description: NADH:ubiquinone oxidoreductase subunit 10;
  misc_feature (43)..(200): Homolog of NCBI NO: 11466592 NR Description: NADH dehydrogenase subunit 10 [Rhodomonas salina]
  misc_feature (1)..(200): Homolog of NCBI NO: 2499328 NR Description: NADH-ubiquinone oxidoreductase 20 kDa subunit,
  misc_feature (28)..(200): Homolog of NCBI NO: 9652190 NR Description: NADH-ubiquinone oxidoreductase subunit PSST
  misc_feature (1)..(200): Homolog of NCBI NO: 9652180 NR Description: NADH-ubiquinone oxidoreductase subunit PSST
  misc_feature (1)..(200): Homolog of NCBI NO: 15239782 NR Description: NADH dehydrogenase (ubiquinone)
  misc_feature (1)..(200): Homolog of NCBI NO: 11277624 NR Description: NADH2 dehydrogenase (ubiquinone) (EC 1.6.5.3)
  misc_feature (1)..(200): Homolog of NCBI NO: 1171866 NR Description: NADH-ubiquinone oxidoreductase 20 kDa subunit,
  misc_feature (1)..(200): Homolog of NCBI NO: 34910678 NR Description: putative NADH dehydrogenase (ubiquinone) chain
MALLPRTARLAFLSTPRSYSAAAAAGASPTSPAPYGGAPPPAMSKTAEFVVSKVDDLMNWARKGSIWPMTFGLACCAVEMMHAGASRYDFDRFGVIFRPSPRQSDCMIVAGTLTNKMAPALRKVYDQMPEPRWVISMGSCANGGGYYHYSYSVVRGCDRIVPVDIYVPGCPPTAEALLYGVLQLQKKINRRKDFLHWWTK

SEQ ID NO: 2807 - protein, 158 aa, Zea mays subsp. mays
  peptide (1)..(158): Ceres Seq. ID no. 12455200
  misc_feature (36)..(143): Pfam Name: NADH ubiquinone oxidoreductase, 20 Kd subunit Pfam Description: NADH ubiquinone oxidoreductase, 20 Kd subunit
  misc_feature (2)..(158): Homolog of NCBI NO: 11466535 NR Description: NADH dehydrogenase, subunit 10 [Reclinomonas
  misc_feature (1)..(158): Homolog of NCBI NO: 34328788 NR Description: NADH:ubiquinone oxidoreductase subunit 10;
  misc_feature (1)..(158): Homolog of NCBI NO: 11466592 NR Description: NADH dehydrogenase subunit 10 [Rhodomonas salina]
  misc_feature (1)..(158): Homolog of NCBI NO: 2499328 NR Description: NADH-ubiquinone oxidoreductase 20 kDa subunit,
  misc_feature (1)..(158): Homolog of NCBI NO: 9652190 NR Description: NADH-ubiquinone oxidoreductase subunit PSST
  misc_feature (1)..(158): Homolog of NCBI NO: 9652180 NR Description: NADH-ubiquinone oxidoreductase subunit PSST
  misc_feature (1)..(158): Homolog of NCBI NO: 15239782 NR Description: NADH dehydrogenase (ubiquinone)
  misc_feature (1)..(158): Homolog of NCBI NO: 11277624 NR Description: NADH2 dehydrogenase (ubiquinone) (EC 1.6.5.3)
  misc_feature (1)..(158): Homolog of NCBI NO: 1171866 NR Description: NADH-ubiquinone oxidoreductase 20 kDa subunit,
  misc_feature (1)..(158): Homolog of NCBI NO: 34910678 NR Description: putative NADH dehydrogenase (ubiquinone) chain
MSKTAEFVVSKVDDLMNWARKGSIWPMTFGLACCAVEMMHAGASRYDFDRFGVIFRPSPRQSDCMIVAGTLTNKMAPALRKVYDQMPEPRWVISMGSCANGGGYYHYSYSVVRGCDRIVPVDIYVPGCPPTAEALLYGVLQLQKKINRRKDFLHWWTK

SEQ ID NO: 2808 - protein, 143 aa, Zea mays subsp. mays
  peptide (1)..(143): Ceres Seq. ID no. 12455201
  misc_feature (21)..(128): Pfam Name: NADH ubiquinone oxidoreductase, 20 Kd subunit Pfam Description: NADH ubiquinone oxidoreductase, 20 Kd subunit
  misc_feature (1)..(143): Homolog of NCBI NO: 11277624 NR Description: NADH2 dehydrogenase (ubiquinone) (EC 1.6.5.3)
  misc_feature (1)..(143): Homolog of NCBI NO: 1171866 NR Description: NADH-ubiquinone oxidoreductase 20 kDa subunit,
  misc_feature (1)..(143): Homolog of NCBI NO: 34328788 NR Description: NADH:ubiquinone oxidoreductase subunit 10;
  misc_feature (1)..(143): Homolog of NCBI NO: 2499328 NR Description: NADH-ubiquinone oxidoreductase 20 kDa subunit,
  misc_feature (1)..(143): Homolog of NCBI NO: 9652180 NR Description: NADH-ubiquinone oxidoreductase subunit PSST
  misc_feature (1)..(143): Homolog of NCBI NO: 15239782 NR Description: NADH dehydrogenase (ubiquinone)
  misc_feature (1)..(143): Homolog of NCBI NO: 9652190 NR Description: NADH-ubiquinone oxidoreductase subunit PSST
  misc_feature (1)..(143): Homolog of NCBI NO: 11466592 NR Description: NADH dehydrogenase subunit 10 [Rhodomonas salina]
  misc_feature (1)..(143): Homolog of NCBI NO: 11466535 NR Description: NADH dehydrogenase, subunit 10 [Reclinomonas
  misc_feature (1)..(143): Homolog of NCBI NO: 34910678 NR Description: putative NADH dehydrogenase (ubiquinone) chain
MNWARKGSIWPMTFGLACCAVEMMHAGASRYDFDRFGVIFRPSPRQSDCMIVAGTLTNKMAPALRKVYDQMPEPRWVISMGSCANGGGYYHYSYSVVRGCDRIVPVDIYVPGCPPTAEALLYGVLQLQKKINRRKDFLHWWTK

SEQ ID NO: 2809 - DNA, 1669 bp, Zea mays subsp. mays
  misc_feature (1)..(1669): Ceres Seq. ID no. 12410539
  misc_feature: MA Experiment ID: 108535 Result: Up-regulated in Transcription
  misc_feature: MA Experiment 108535 PARAMETER Experiment Name: Zm_Meristem_P Parameter: Age (day) Value: 8
  misc_feature: MA Experiment 108535 PARAMETER Experiment Name: Zm_Meristem_P Parameter: Organism Value: Zea mays
  misc_feature: MA Experiment 108535 PARAMETER Experiment Name: Zm_Meristem_P Parameter: Plant Line Value: 35A19
  misc_feature: MA Experiment 108535 PARAMETER Experiment Name: Zm_Meristem_P Parameter: Tissue Value: Root Meristem vs. Above Root Meristem
  misc_feature: MA Experiment ID: 108536 Result: Down-regulated in Transcription
  misc_feature: MA Experiment 108536 PARAMETER Experiment Name: Zm_Meristem_P Parameter: Age (day) Value: 8
  misc_feature: MA Experiment 108536 PARAMETER Experiment Name: Zm_Meristem_P Parameter: Organism Value: Zea mays
  misc_feature: MA Experiment 108536 PARAMETER Experiment Name: Zm_Meristem_P Parameter: Plant Line Value: 35A19
  misc_feature: MA Experiment 108536 PARAMETER Experiment Name: Zm_Meristem_P Parameter: Tissue Value: Shoot Meristem vs. Above Shoot Meristem
  misc_feature: MA Experiment ID: 20000478 Result: Up-regulated in Transcription
  misc_feature: MA Experiment 20000478 PARAMETER Experiment Name: Zm_5mM_SA_P Parameter: Age (day) Value: 11
  misc_feature: MA Experiment 20000478 PARAMETER Experiment Name: Zm_5mM_SA_P Parameter: Organism Value: Zea mays
  misc_feature: MA Experiment 20000478 PARAMETER Experiment Name: Zm_5mM_SA_P Parameter: Plant Line Value: 35A19
  misc_feature: MA Experiment 20000478 PARAMETER Experiment Name: Zm_5mM_SA_P Parameter: Timepoint (hr) Value: 72
  misc_feature: MA Experiment 20000478 PARAMETER Experiment Name: Zm_5mM_SA_P Parameter: Tissue Value: Aerial
  misc_feature: MA Experiment 20000478 PARAMETER Experiment Name: Zm_5mM_SA_P Parameter: Treatment Value: 5mM SA vs. No Treatment
gtctgcgtcatctcatttccgtttccgtctctccctctcctcgcccacacgtccaaaaccgaagggagcaaacgaacaaaacccggccgagtaacgcaggagacgaagctgcggaaggcgagcaagcacgatggaggcggcagcgtcagccgagtacgggtactacggcggaggcgcgggcccacacgagacgaagaccgccgggtgcggggaccacttcgtcgtggacgacctcctcgcgctgccgccgtacgacgaggaggaggagggggcgacaggcgagaccccgctgtgcctgcagcctgtcaaggaggagggcggcctcgggaatttctcggccgactcttccatcgtcacagcaatcgacagctgcagcaactccttctgtaggctagccgatgacgacttcccgggggaattctacgagccgtacgaccaactggtggagctagaatggttatcaaactacatgggcgagggcgaggaaactttcgcggcggaggacctggagaagctgaagctcatttccggtgggttctccccggcggctgtgaacgtgtcagcaccagctccagtgggcgtagcttcagccgcctctgcgacacagtccggtatgttcctgccggtcccggcaaaggcccgtagcaagcggtcccgcgcagctccgggcaactggtcgtcacggttggtcgtgctcccgccgaccccggcctcaccaccggcccctgcagcgtccatggccatttcgccctcggagtccggcatctcggcgcagcaggcgttccgcgccaagaagccgccgccgtcgaagaagaaagacgcggcggcaccggcagaagggcgacggtgcgtgcactgcgacacggacaagacgccgcagtggaggacggggcccatgggccccaagacgctgtgcaacgcgtgcggggtgcggtacaagtcggggcggctggtgccggagtacaggcccgcggcgagccccaccttcgtgatgtccaagcactccaactcccaccgaaaggtgctggagctgcgccgccagaaggaggtggtggtgcagcagccgccgcacgtgatggccggcgccggcggtcctgcaggcgggctgatgcgcatgcagagcgcgatgctgttggacgggccggtggcggcggtgtcgtcgtcgtcccccatcgtcggcggcgacgagtttttgatccaccagcacttagggacggcagactaccggcagcgcatctaactagatgagtttttgatcagttagcctactagcccagtaataatcaatatgcgcaccagcttaaatccaagtaccctccttaaaaacatgaaagaactaataatcttgccttaattaattaattaggagttatttttcctcttcactatattttgtttattaattagttgctgtgttccggttcagatccttggaaattttttcgtggcgactttcgtatggttttgtatctctctttttttttattttttgctagactctcctaattaacatgcctatgagaactctacgagagagagagagagagagagagttttcctatctattttcttcctttgtttcttagcattatatatgtaatttaaggggctagctctcgttctgcttccggtccggagcacgcatgaaaagaagactggaaattttggt

SEQ ID NO: 2810 - protein, 369 aa, Zea mays subsp. mays
  peptide (1)..(369): Ceres Seq. ID no. 12410540
  misc_feature (238)..(321): Homolog of NCBI NO: 37572447 NR Description: AG-motif binding protein-3 [Nicotiana tabacum]
  misc_feature (197)..(306): Homolog of NCBI NO: 15232355 NR Description: GATA zinc finger protein
  misc_feature (146)..(315): Homolog of NCBI NO: 15225399 NR Description: GATA zinc finger protein; protein id: At2g45050.1
  misc_feature (28)..(306): Homolog of NCBI NO: 15239343 NR Description: GATA zinc finger protein; protein id: At5g66320.1
  misc_feature (28)..(306): Homolog of NCBI NO: 37572449 NR Description: AG-motif binding protein-4 [Nicotiana tabacum]
  misc_feature (3)..(323): Homolog of NCBI NO: 37536778 NR Description: putative transcription factor
  misc_feature (62)..(307): Homolog of NCBI NO: 15233971 NR Description: GATA zinc finger protein; protein id: At4g32890.1
  misc_feature (70)..(307): Homolog of NCBI NO: 15239503 NR Description: GATA zinc finger protein; protein id: At5g25830.1
  misc_feature (122)..(369): Homolog of NCBI NO: 34909448 NR Description: OSJNBa0014K08.18 [Oryza sativa (japonica
  misc_feature (6)..(234): Homolog of NCBI NO: 34909448 NR Description: OSJNBa0014K08.18 [Oryza sativa (japonica
MEAAASAEYGYYGGGAGPHETKTAGCGDHFVVDDLLALPPYDEEEEGATGETPLCLQPVKEEGGLGNFSADSSIVTAIDSCSNSFCRLADDDFPGEFYEPYDQLVELEWLSNYMGEGEETFAAEDLEKLKLISGGFSPAAVNVSAPAPVGVASAASATQSGMFLPVPAKARSKRSRAAPGNWSSRLVVLPPTPASPPAPAASMAISPSESGISAQQAFRAKKPPPSKKKDAAAPAEGRRCVHCDTDKTPQWRTGPMGPKTLCNACGVRYKSGRLVPEYRPAASPTFVMSKHSNSHRKVLELRRQKEVVVQQPPHVMAGAGGPAGGLMRMQSAMLLDGPVAAVSSSSPIVGGDEFLIHQHLGTADYRQRI

SEQ ID NO: 2811 - protein, 256 aa, Zea mays subsp. mays
  peptide (1)..(256): Ceres Seq. ID no. 12410541
  misc_feature (125)..(208): Homolog of NCBI NO: 37572447 NR Description: AG-motif binding protein-3 [Nicotiana tabacum]
  misc_feature (84)..(193): Homolog of NCBI NO: 15232355 NR Description: GATA zinc finger protein
  misc_feature (33)..(202): Homolog of NCBI NO: 15225399 NR Description: GATA zinc finger protein; protein id: At2g45050.1
  misc_feature (1)..(193): Homolog of NCBI NO: 15239343 NR Description: GATA zinc finger protein; protein id: At5g66320.1
  misc_feature (1)..(193): Homolog of NCBI NO: 37572449 NR Description: AG-motif binding protein-4 [Nicotiana tabacum]
  misc_feature (1)..(210): Homolog of NCBI NO: 37536778 NR Description: putative transcription factor
  misc_feature (1)..(194): Homolog of NCBI NO: 15233971 NR Description: GATA zinc finger protein; protein id: At4g32890.1
  misc_feature (1)..(194): Homolog of NCBI NO: 15239503 NR Description: GATA zinc finger protein; protein id: At5g25830.1
  misc_feature (9)..(256): Homolog of NCBI NO: 34909448 NR Description: OSJNBa0014K08.18 [Oryza sativa (japonica
  misc_feature (1)..(121): Homolog of NCBI NO: 34909448 NR Description: OSJNBa0014K08.18 [Oryza sativa (japonica
MGEGEETFAAEDLEKLKLISGGFSPAAVNVSAPAPVGVASAASATQSGMFLPVPAKARSKRSRAAPGNWSSRLVVLPPTPASPPAPAASMAISPSESGISAQQAFRAKKPPPSKKKDAAAPAEGRRCVHCDTDKTPQWRTGPMGPKTLCNACGVRYKSGRLVPEYRPAASPTFVMSKHSNSHRKVLELRRQKEVVVQQPPHVMAGAGGPAGGLMRMQSAMLLDGPVAAVSSSSPIVGGDEFLIHQHLGTADYRQRI

SEQ ID NO: 2812 - protein, 208 aa, Zea mays subsp. mays
  peptide (1)..(208): Ceres Seq. ID no. 12410542
  misc_feature (77)..(160): Homolog of NCBI NO: 37572447 NR Description: AG-motif binding protein-3 [Nicotiana tabacum]
  misc_feature (36)..(145): Homolog of NCBI NO: 15232355 NR Description: GATA zinc finger protein
  misc_feature (1)..(154): Homolog of NCBI NO: 15225399 NR Description: GATA zinc finger protein; protein id: At2g45050.1
  misc_feature (1)..(145): Homolog of NCBI NO: 15239343 NR Description: GATA zinc finger protein; protein id: At5g66320.1
  misc_feature (1)..(145): Homolog of NCBI NO: 37572449 NR Description: AG-motif binding protein-4 [Nicotiana tabacum]
  misc_feature (1)..(162): Homolog of NCBI NO: 37536778 NR Description: putative transcription factor
  misc_feature (1)..(146): Homolog of NCBI NO: 15233971 NR Description: GATA zinc finger protein; protein id: At4g32890.1
  misc_feature (1)..(146): Homolog of NCBI NO: 15239503 NR Description: GATA zinc finger protein; protein id: At5g25830.1
  misc_feature (1)..(208): Homolog of NCBI NO: 34909448 NR Description: OSJNBa0014K08.18 [Oryza sativa (japonica
  misc_feature (1)..(73): Homolog of NCBI NO: 34909448 NR Description: OSJNBa0014K08.18 [Oryza sativa (japonica
MFLPVPAKARSKRSRAAPGNWSSRLVVLPPTPASPPAPAASMAISPSESGISAQQAFRAKKPPPSKKKDAAAPAEGRRCVHCDTDKTPQWRTGPMGPKTLCNACGVRYKSGRLVPEYRPAASPTFVMSKHSNSHRKVLELRRQKEVVVQQPPHVMAGAGGPAGGLMRMQSAMLLDGPVAAVSSSSPIVGGDEFLIHQHLGTADYRQRI

SEQ ID NO: 2813 - DNA, 1591 bp, Zea mays subsp. mays
  misc_feature (1)..(1591): Ceres Seq. ID no. 12344661
  misc_feature: MA Experiment ID: 108544 Result: Up-regulated in Transcription
  misc_feature: MA Experiment ID: 108689 Result: Up-regulated in Transcription
  misc_feature: MA Experiment 108689 PARAMETER Experiment Name: Zm_Drought_Roots_P Parameter: Age (day) Value: 9
  misc_feature: MA Experiment 108689 PARAMETER Experiment Name: Zm_Drought_Roots_P Parameter: Organism Value: Zea mays
  misc_feature: MA Experiment 108689 PARAMETER Experiment Name: Zm_Drought_Roots_P Parameter: Plant Line Value: 35A19
  misc_feature: MA Experiment 108689 PARAMETER Experiment Name: Zm_Drought_Roots_P Parameter: Timepoint (hr) Value: 24
  misc_feature: MA Experiment 108689 PARAMETER Experiment Name: Zm_Drought_Roots_P Parameter: Tissue Value: Roots
  misc_feature: MA Experiment 108689 PARAMETER Experiment Name: Zm_Drought_Roots_P Parameter: Treatment Value: Drought vs. No Drought
  misc_feature: MA Experiment ID: 20000535 Result: Up-regulated in Transcription
  misc_feature: MA Experiment 20000535 PARAMETER Experiment Name: Zm_Hybrid_Seed_Dev_P Parameter: DAP Value: 30 vs. 12
  misc_feature: MA Experiment 20000535 PARAMETER Experiment Name: Zm_Hybrid_Seed_Dev_P Parameter: Organism Value: Zea mays
  misc_feature: MA Experiment 20000535 PARAMETER Experiment Name: Zm_Hybrid_Seed_Dev_P Parameter: Plant Line Value: 35A19
  misc_feature: MA Experiment 20000535 PARAMETER Experiment Name: Zm_Hybrid_Seed_Dev_P Parameter: Tissue Value: Embryo vs. Unfert Floret
gtctacgatgccgttgcgcacctcttctctctcgccgccccgagacccccacgcttccctctccgcccccgaactgtggcgcctccccccgccgccgcagcgatgccactcgcggcagagcccgacgacgctcatgaggaaagggagaatcagcagctgctaattacgacgaagggagggcccgggcttgagggactggtggtggggagctactgccacgatgtgctaatccggggcgggcgcatagtgggggagacgctcggcggggctgcggccttcgtgtccaacgtgctcgacgccgcttcgccccagggcgccgcgctcaacgagacatccccctttgtcgttgtggccaaggtgggtcacgacttcatctacgcccgcgcgccggcgtccgcgcggcatccgcctctgctctgctcgtccccaaccacctccttccacgcccagttctcggagaccgccgcctcggcgcacgcccccgaccgggagctccggcgcatgcgcgcctgcgacccgatctaccccgccgaccttcccgaccgccgcttcgcctacggcctcgctgtcggcgtcgccggggaggtgctaccggagacgctcgagcagatgatcaggctctgccgcacggtgctcgtggacgcgcaggcgctgatccgggcgttcgacggtgacggcgccgtcggtcacgtggcgcttggcgataccccgtacgcgcggcttctgccccgagtggcgttcgttaaggcgtcgtcggaggaggcgccatacgttggggtggaaacgacgaggcggcagtgctgtgtgatcgtcacggaggggagggacggctgccggctgtactgggacggtggggaggcgcacgttgcgccgttccccgccgtacaggtggaccctactggcgccggagacagttttctcgcgggctttgcagccggattgctgtgggggttgtcggcgacggacgccgcgctgctggggaacttctttggcgccgctgctgtatcgcaggtcggcgtgcccaccttccatcccaagatgttgcaggcagttaaagaaatacttgaagagaagacaaggaaacgatctagtccatgtatgaacggcgctagttttaccttggagaagtcaaatatgcacaacgagttacacgcagctctccaagaagctgcggtgctgatgtctgaacagcagcaggctgatccggcgaacggcagtggcggtgatatttgctcggcataggtacctcacagtgaagctgaagcagtcgaacgccaaactgaagtttgtggcaaaataaccagcactgcagtcctgaactcctgatctcacattgagatctgtaaacatggtgccaacaagtggaggaagtttgtacatacgctctctccggcctttacactactattctgctggcaaggccgtcagggatcgtttctaccttgctatcgctgacgaggaaatgaagacaactgaacagttgagctgtggcgcttgcacgcaccatgttttctccgctgaacaagtgcgcatttttgagctttcgggcattcgtgctgttaactttttaccattctatatgtcgacttct

SEQ ID NO: 2814 - protein, 413 aa, Zea mays subsp. mays
  peptide (1)..(413): Ceres Seq. ID no. 12344662
  misc_feature (66)..(348): Pfam Name: pfkB family carbohydrate kinase Pfam Description: pfkB family carbohydrate kinase
  misc_feature (232)..(360): Homolog of NCBI NO: 11498013 NR Description: carbohydrate kinase, pfkB family [Archaeoglobus
  misc_feature (50)..(349): Homolog of NCBI NO: 8843793 NR Description: gene_id:MZN1.17~pir||T01971~similar to unknown
  misc_feature (50)..(409): Homolog of NCBI NO: 15237741 NR Description: putative protein
  misc_feature (14)..(349): Homolog of NCBI NO: 31126792 NR Description: unknown protein [Oryza sativa (japonica
  misc_feature (26)..(412): Homolog of NCBI NO: 29788872 NR Description: unknown protein [Oryza sativa (japonica
VYDAVAHLFSLAAPRPPRFPLRPRTVAPPPAAAAMPLAAEPDDAHEERENQQLLITTKGGPGLEGLVVGSYCHDVLIRGGRIVGETLGGAAAFVSNVLDAASPQGAALNETSPFVVVAKVGHDFIYARAPASARHPPLLCSSPTTSFHAQFSETAASAHAPDRELRRMRACDPIYPADLPDRRFAYGLAVGVAGEVLPETLEQMIRLCRTVLVDAQALIRAFDGDGAVGHVALGDTPYARLLPRVAFVKASSEEAPYVGVETTRRQCCVIVTEGRDGCRLYWDGGEAHVAPFPAVQVDPTGAGDSFLAGFAAGLLWGLSATDAALLGNFFGAAAVSQVGVPTFHPKMLQAVKEILEEKTRKRSSPCMNGASFTLEKSNMHNELHAALQEAAVLMSEQQQADPANGSGGDICSA

SEQ ID NO: 2815 - protein, 379 aa, Zea mays subsp. mays
  peptide (1)..(379): Ceres Seq. ID no. 12344663
  misc_feature (32)..(314): Pfam Name: pfkB family carbohydrate kinase Pfam Description: pfkB family carbohydrate kinase
  misc_feature (198)..(326): Homolog of NCBI NO: 11498013 NR Description: carbohydrate kinase, pfkB family [Archaeoglobus
  misc_feature (16)..(315): Homolog of NCBI NO: 8843793 NR Description: gene_id:MZN1.17~pir||T01971~similar to unknown
  misc_feature (16)..(375): Homolog of NCBI NO: 15237741 NR Description: putative protein
  misc_feature (1)..(315): Homolog of NCBI NO: 31126792 NR Description: unknown protein [Oryza sativa (japonica
  misc_feature (1)..(378): Homolog of NCBI NO: 29788872 NR Description: unknown protein [Oryza sativa (japonica
MPLAAEPDDAHEERENQQLLITTKGGPGLEGLVVGSYCHDVLIRGGRIVGETLGGAAAFVSNVLDAASPQGAALNETSPFVVVAKVGHDFIYARAPASARHPPLLCSSPTTSFHAQFSETAASAHAPDRELRRMRACDPIYPADLPDRRFAYGLAVGVAGEVLPETLEQMIRLCRTVLVDAQALIRAFDGDGAVGHVALGDTPYARLLPRVAFVKASSEEAPYVGVETTRRQCCVIVTEGRDGCRLYWDGGEAHVAPFPAVQVDPTGAGDSFLAGFAAGLLWGLSATDAALLGNFFGAAAVSQVGVPTFHPKMLQAVKEILEEKTRKRSSPCMNGASFTLEKSNMHNELHAALQEAAVLMSEQQQADPANGSGGDICSA

SEQ ID NO: 2816 - protein, 246 aa, Zea mays subsp. mays
  peptide (1)..(246): Ceres Seq. ID no. 12344664
  misc_feature (1)..(181): Pfam Name: pfkB family carbohydrate kinase Pfam Description: pfkB family carbohydrate kinase
  misc_feature (65)..(193): Homolog of NCBI NO: 11498013 NR Description: carbohydrate kinase, pfkB family [Archaeoglobus
  misc_feature (1)..(182): Homolog of NCBI NO: 8843793 NR Description: gene_id:MZN1.17~pir||T01971~similar to unknown
  misc_feature (1)..(242): Homolog of NCBI NO: 15237741 NR Description: putative protein
  misc_feature (1)..(182): Homolog of NCBI NO: 31126792 NR Description: unknown protein [Oryza sativa (japonica
  misc_feature (1)..(245): Homolog of NCBI NO: 29788872 NR Description: unknown protein [Oryza sativa (japonica
MRACDPIYPADLPDRRFAYGLAVGVAGEVLPETLEQMIRLCRTVLVDAQALIRAFDGDGAVGHVALGDTPYARLLPRVAFVKASSEEAPYVGVETTRRQCCVIVTEGRDGCRLYWDGGEAHVAPFPAVQVDPTGAGDSFLAGFAAGLLWGLSATDAALLGNFFGAAAVSQVGVPTFHPKMLQAVKEILEEKTRKRSSPCMNGASFTLEKSNMHNELHAALQEAAVLMSEQQQADPANGSGGDICSA

SEQ ID NO: 2817 - DNA, 1444 bp, Zea mays subsp. mays
  misc_feature (1)..(1444): Ceres Seq. ID no. 13498822
  misc_feature: MA Experiment ID: 108522 Result: Down-regulated in Transcription
  misc_feature: MA Experiment 108522 PARAMETER Experiment Name: Zm_42deg_Heat_P Parameter: Age (day) Value: 8
  misc_feature: MA Experiment 108522 PARAMETER Experiment Name: Zm_42deg_Heat_P Parameter: Organism Value: Zea mays
  misc_feature: MA Experiment 108522 PARAMETER Experiment Name: Zm_42deg_Heat_P Parameter: Plant Line Value: 35A19
  misc_feature: MA Experiment 108522 PARAMETER Experiment Name: Zm_42deg_Heat_P Parameter: Temperature (deg C) Value: 42 vs. 22
  misc_feature: MA Experiment 108522 PARAMETER Experiment Name: Zm_42deg_Heat_P Parameter: Timepoint (hr) Value: 1
  misc_feature: MA Experiment 108522 PARAMETER Experiment Name: Zm_42deg_Heat_P Parameter: Tissue Value: Aerial
  misc_feature: MA Experiment ID: 20000480 Result: Down-regulated in Transcription
  misc_feature: MA Experiment 20000480 PARAMETER Experiment Name: Zm_Drought_P Parameter: Age (day) Value: 11
  misc_feature: MA Experiment 20000480 PARAMETER Experiment Name: Zm_Drought_P Parameter: Organism Value: Zea mays
  misc_feature: MA Experiment 20000480 PARAMETER Experiment Name: Zm_Drought_P Parameter: Plant Line Value: 35A19
  misc_feature: MA Experiment 20000480 PARAMETER Experiment Name: Zm_Drought_P Parameter: Timepoint (hr) Value: 72
  misc_feature: MA Experiment 20000480 PARAMETER Experiment Name: Zm_Drought_P Parameter: Tissue Value: Aerial
  misc_feature: MA Experiment 20000480 PARAMETER Experiment Name: Zm_Drought_P Parameter: Treatment Value: Drought vs. No Drought
aaccacaccactcgagcgcgcgcgcggcccaccgctccgccgctgcccgcccgccgccatgcgagggatcctctcctcttcctccgctctcctccggcgagccggcgcccagctctcgcgcacggactgcagtagcccctcagcgtccgcgacctctcctctccgccgctcccctcttcagaatgggaaaagagacacattttgttcgctttggttcaaaggtcgttcggtatcaaccacagttgatatgcagttagactatgagagtgatccccctcttgacgatacaaaagctattgagaaggagtcatcacttaatgttgctgtttctcaactcgcaattgacttcgatagagactctaatttatgtttggagcgattttcccgtgcaaggaaagcatctgtagtctctactggttctcttaagcttgacctcgctctcggcgttggaggattaccgaagggtagaatggtggagatatatgggaaagaagcatctgggaagacaacactcgcgcttcatgttattaaggaagctcaaaagaatggaggttattgtgcttatattgatgcagaaaatgccttcaacccttcatttgctgaatctattggcgtagacagtgaaaggctcttgatagcccaacctgattctgctgaaaattctctaagcattgtaaacactcttgttggtggttctgttgctgttgttgttgtggacagtgtggcagcacttattcccaaatgtgaaattgaaggtgaaatatacacaaattgtggagacatccaatcccatttgatgactcgggcccttagaaaaattcagtacactttatgtcgatctgaaacacttattatttttgtgaatcaggttagaacaaagaggacatcaagtaatcctgggatctacaaggaggtgccttgcggtggtaatgcactaggattctatgctgcagtcagaatgaggacttcaaggagagaactgcgctatagtgaagatgaggctaccggcgtaggtatatcagtgcagatcatcaagaacaaattggctccagcgaacctgaagaaggaagccggcatcgacatcacattcggtaaggggatctgccacgagtcggagatcctggagacggcttcctccgtcggagtgatcctgaaagacgggtgtgggtattggatcaacaacgagttcctggcaggcaaggtggaagcggagaagttcctgcgtgaaaacgctgcagtggcagatgagatctgcaataccgtgaggaacgagttcttgcaaaggtgacatagggcgaccgattagagaggctaatgcattgttagtcggaaatgttgtaccgtcatgtattcatagaagaagatttatgtaggatgttgctgtgcctgtcgtgtaactttgactcgcaacagttcattgagtttaccagggccattccctcgc

SEQ ID NO: 2818 - protein, 428 aa, Zea mays subsp. mays
  peptide (1)..(428): Ceres Seq. ID no. 13498823
  misc_feature (103)..(427): Pfam Name: recA bacterial DNA recombination protein Pfam Description: recA bacterial DNA recombination protein
  misc_feature (93)..(422): Homolog of NCBI NO: 22966246 NR Description: hypothetical protein [Rhodospirillum rubrum]
  misc_feature (93)..(422): Homolog of NCBI NO: 23502079 NR Description: recA protein [Brucella suis 1330]
  misc_feature (93)..(422): Homolog of NCBI NO: 17987070 NR Description: RECA PROTEIN [Brucella melitensis]
  misc_feature (124)..(422): Homolog of NCBI NO: 34907710 NR Description: putative RecA protein [Oryza sativa (japonica
  misc_feature (100)..(426): Homolog of NCBI NO: 15224783 NR Description: recA protein -related [Arabidopsis thaliana]
  misc_feature (157)..(241): Homolog of NCBI NO: 34906584 NR Description: hypothetical protein~similar to Arabidopsis
  misc_feature (284)..(393): Homolog of NCBI NO: 34906584 NR Description: hypothetical protein~similar to Arabidopsis
  misc_feature (61)..(427): Homolog of NCBI NO: 6143863 NR Description: putative RecA protein [Arabidopsis thaliana]
  misc_feature (61)..(427): Homolog of NCBI NO: 22330951 NR Description: RecA protein -related [Arabidopsis thaliana]
  misc_feature (157)..(428): Homolog of NCBI NO: 24636781 NR Description: P0614D08.19 [Oryza sativa (japonica
TTPLERARGPPLRRCPPAAMRGILSSSSALLRRAGAQLSRTDCSSPSASATSPLRRSPLQNGKRDTFCSLWFKGRSVSTTVDMQLDYESDPPLDDTKAIEKESSLNVAVSQLAIDFDRDSNLCLERFSRARKASVVSTGSLKLDLALGVGGLPKGRMVEIYGKEASGKTTLALHVIKEAQKNGGYCAYIDAENAFNPSFAESIGVDSERLLIAQPDSAENSLSIVNTLVGGSVAVVVVDSVAALIPKCEIEGEIYTNCGDIQSHLMTRALRKIQYTLCRSETLIIFVNQVRTKRTSSNPGIYKEVPCGGNALGFYAAVRMRTSRRELRYSEDEATGVGISVQIIKNKLAPANLKKEAGIDITFGKGICHESEILETASSVGVILKDGCGYWINNEFLAGKVEAEKFLRENAAVADEICNTVRNEFLQR

SEQ ID NO: 2819 - protein, 409 aa, Zea mays subsp. mays
  peptide (1)..(409): Ceres Seq. ID no. 13498824
  misc_feature (84)..(408): Pfam Name: recA bacterial DNA recombination protein Pfam Description: recA bacterial DNA recombination protein
  misc_feature (74)..(403): Homolog of NCBI NO: 23502079 NR Description: recA protein [Brucella suis 1330]
  misc_feature (74)..(403): Homolog of NCBI NO: 22966246 NR Description: hypothetical protein [Rhodospirillum rubrum]
  misc_feature (74)..(403): Homolog of NCBI NO: 17987070 NR Description: RECA PROTEIN [Brucella melitensis]
  misc_feature (105)..(403): Homolog of NCBI NO: 34907710 NR Description: putative RecA protein [Oryza sativa (japonica
  misc_feature (81)..(407): Homolog of NCBI NO: 15224783 NR Description: recA protein -related [Arabidopsis thaliana]
  misc_feature (138)..(222): Homolog of NCBI NO: 34906584 NR Description: hypothetical protein~similar to Arabidopsis
  misc_feature (265)..(374): Homolog of NCBI NO: 34906584 NR Description: hypothetical protein~similar to Arabidopsis
  misc_feature (42)..(408): Homolog of NCBI NO: 6143863 NR Description: putative RecA protein [Arabidopsis thaliana]
  misc_feature (42)..(408): Homolog of NCBI NO: 22330951 NR Description: RecA protein -related [Arabidopsis thaliana]
  misc_feature (138)..(409): Homolog of NCBI NO: 24636781 NR Description: P0614D08.19 [Oryza sativa (japonica
MRGILSSSSALLRRAGAQLSRTDCSSPSASATSPLRRSPLQNGKRDTFCSLWFKGRSVSTTVDMQLDYESDPPLDDTKAIEKESSLNVAVSQLAIDFDRDSNLCLERFSRARKASVVSTGSLKLDLALGVGGLPKGRMVEIYGKEASGKTTLALHVIKEAQKNGGYCAYIDAENAFNPSFAESIGVDSERLLIAQPDSAENSLSIVNTLVGGSVAVVVVDSVAALIPKCEIEGEIYTNCGDIQSHLMTRALRKIQYTLCRSETLIIFVNQVRTKRTSSNPGIYKEVPCGGNALGFYAAVRMRTSRRELRYSEDEATGVGISVQIIKNKLAPANLKKEAGIDITFGKGICHESEILETASSVGVILKDGCGYWINNEFLAGKVEAEKFLRENAAVADEICNTVRNEFLQR

SEQ ID NO: 2820 - protein, 346 aa, Zea mays subsp. mays; identical to SEQ ID NO: 1573
  peptide (1)..(346): Ceres Seq. ID no. 13498825
  misc_feature (21)..(345): Pfam Name: recA bacterial DNA recombination protein Pfam Description: recA bacterial DNA recombination protein
  misc_feature (75)..(346): Homolog of NCBI NO: 24636781 NR Description: P0614D08.19 [Oryza sativa (japonica
  misc_feature (11)..(340): Homolog of NCBI NO: 23502079 NR Description: recA protein [Brucella suis 1330]
  misc_feature (11)..(340): Homolog of NCBI NO: 22966246 NR Description: hypothetical protein [Rhodospirillum rubrum]
  misc_feature (11)..(340): Homolog of NCBI NO: 17987070 NR Description: RECA PROTEIN [Brucella melitensis]
  misc_feature (42)..(340): Homolog of NCBI NO: 34907710 NR Description: putative RecA protein [Oryza sativa (japonica
  misc_feature (18)..(344): Homolog of NCBI NO: 15224783 NR Description: recA protein -related [Arabidopsis thaliana]
  misc_feature (75)..(159): Homolog of NCBI NO: 34906584 NR Description: hypothetical protein~similar to Arabidopsis
  misc_feature (202)..(311): Homolog of NCBI NO: 34906584 NR Description: hypothetical protein~similar to Arabidopsis
  misc_feature (1)..(345): Homolog of NCBI NO: 6143863 NR Description: putative RecA protein [Arabidopsis thaliana]
  misc_feature (1)..(345): Homolog of NCBI NO: 22330951 NR Description: RecA protein -related [Arabidopsis thaliana]

SEQ ID NO: 2821 - DNA, 750 bp, Zea mays subsp. mays
  misc_feature (1)..(750): Ceres Seq. ID no. 12414205
  misc_feature: MA Experiment ID: 108504 Result: Down-regulated in Transcription
  misc_feature: MA Experiment 108504 PARAMETER Experiment Name: Zm_Drought_P Parameter: Age (day) Value: 8
  misc_feature: MA Experiment 108504 PARAMETER Experiment Name: Zm_Drought_P Parameter: Organism Value: Zea mays
  misc_feature: MA Experiment 108504 PARAMETER Experiment Name: Zm_Drought_P Parameter: Plant Line Value: 35A19
  misc_feature: MA Experiment 108504 PARAMETER Experiment Name: Zm_Drought_P Parameter: Timepoint (hr) Value: 12
  misc_feature: MA Experiment 108504 PARAMETER Experiment Name: Zm_Drought_P Parameter: Tissue Value: Aerial
  misc_feature: MA Experiment 108504 PARAMETER Experiment Name: Zm_Drought_P Parameter: Treatment Value: Drought vs. No Drought
  misc_feature: MA Experiment ID: 108527 Result: Down-regulated in Transcription
  misc_feature: MA Experiment 108527 PARAMETER Experiment Name: Zm_5mM_NO_P Parameter: Age (day) Value: 8
  misc_feature: MA Experiment 108527 PARAMETER Experiment Name: Zm_5mM_NO_P Parameter: Organism Value: Zea mays
  misc_feature: MA Experiment 108527 PARAMETER Experiment Name: Zm_5mM_NO_P Parameter: Plant Line Value: 35A19
  misc_feature: MA Experiment 108527 PARAMETER Experiment Name: Zm_5mM_NO_P Parameter: Timepoint (hr) Value: 6
  misc_feature: MA Experiment 108527 PARAMETER Experiment Name: Zm_5mM_NO_P Parameter: Tissue Value: Aerial
  misc_feature: MA Experiment 108527 PARAMETER Experiment Name: Zm_5mM_NO_P Parameter: Treatment Value: 5mM NO vs. No Treatment
  misc_feature: MA Experiment ID: 108528 Result: Up-regulated in Transcription
  misc_feature: MA Experiment 108528 PARAMETER Experiment Name: Zm_Imbibed_Seeds_P Parameter: Age (day) Value: 5 vs. 2
  misc_feature: MA Experiment 108528 PARAMETER Experiment Name: Zm_Imbibed_Seeds_P Parameter: Organism Value: Zea mays
  misc_feature: MA Experiment 108528 PARAMETER Experiment Name: Zm_Imbibed_Seeds_P Parameter: Plant Line Value: 35A19
  misc_feature: MA Experiment 108528 PARAMETER Experiment Name: Zm_Imbibed_Seeds_P Parameter: Tissue Value: Aerial vs. Embryo
  misc_feature: MA Experiment ID: 108529 Result: Down-regulated in Transcription
  misc_feature: MA Experiment 108529 PARAMETER Experiment Name: Zm_Imbibed_Seeds_P Parameter: Age (day) Value: 5 vs. 2
  misc_feature: MA Experiment 108529 PARAMETER Experiment Name: Zm_Imbibed_Seeds_P Parameter: Organism Value: Zea mays
  misc_feature: MA Experiment 108529 PARAMETER Experiment Name: Zm_Imbibed_Seeds_P Parameter: Plant Line Value: 35A19
  misc_feature: MA Experiment 108529 PARAMETER Experiment Name: Zm_Imbibed_Seeds_P Parameter: Tissue Value: Roots vs. Embryo
  misc_feature: MA Experiment ID: 108530 Result: Up-regulated in Transcription
  misc_feature: MA Experiment 108530 PARAMETER Experiment Name: Zm_Imbibed_Seeds_P Parameter: Age (day) Value: 6 vs. 2
  misc_feature: MA Experiment 108530 PARAMETER Experiment Name: Zm_Imbibed_Seeds_P Parameter: Organism Value: Zea mays
  misc_feature: MA Experiment 108530 PARAMETER Experiment Name: Zm_Imbibed_Seeds_P Parameter: Plant Line Value: 35A19
  misc_feature: MA Experiment 108530 PARAMETER Experiment Name: Zm_Imbibed_Seeds_P Parameter: Tissue Value: Aerial vs. Embryo
  misc_feature: MA Experiment ID: 108536 Result: Down-regulated in Transcription
  misc_feature: MA Experiment 108536 PARAMETER Experiment Name: Zm_Meristem_P Parameter: Age (day) Value: 8
  misc_feature: MA Experiment 108536 PARAMETER Experiment Name: Zm_Meristem_P Parameter: Organism Value: Zea mays
  misc_feature: MA Experiment 108536 PARAMETER Experiment Name: Zm_Meristem_P Parameter: Plant Line Value: 35A19
  misc_feature: MA Experiment 108536 PARAMETER Experiment Name: Zm_Meristem_P Parameter: Tissue Value: Shoot Meristem vs. Above Shoot Meristem
  misc_feature: MA Experiment ID: 108544 Result: Down-regulated in Transcription
  misc_feature: MA Experiment ID: 108545 Result: Up-regulated in Transcription
  misc_feature: MA Experiment 108545 PARAMETER Experiment Name: Zm_Imbibed_Seeds_P Parameter: Age (day) Value: 3 vs. 2
  misc_feature: MA Experiment 108545 PARAMETER Experiment Name: Zm_Imbibed_Seeds_P Parameter: Organism Value: Zea mays
  misc_feature: MA Experiment 108545 PARAMETER Experiment Name: Zm_Imbibed_Seeds_P Parameter: Plant Line Value: 35A19
  misc_feature: MA Experiment 108545 PARAMETER Experiment Name: Zm_Imbibed_Seeds_P Parameter: Tissue Value: Aerial vs. Embryo
  misc_feature: MA Experiment ID: 108546 Result: Down-regulated in Transcription
  misc_feature: MA Experiment 108546 PARAMETER Experiment Name: Zm_Imbibed_Seeds_P Parameter: Age (day) Value: 3 vs. 2
  misc_feature: MA Experiment 108546 PARAMETER Experiment Name: Zm_Imbibed_Seeds_P Parameter: Organism Value: Zea mays
  misc_feature: MA Experiment 108546 PARAMETER Experiment Name: Zm_Imbibed_Seeds_P Parameter: Plant Line Value: 35A19
  misc_feature: MA Experiment 108546 PARAMETER Experiment Name: Zm_Imbibed_Seeds_P Parameter: Tissue Value: Roots vs. Embryo
  misc_feature: MA Experiment ID: 108547 Result: Up-regulated in Transcription
  misc_feature: MA Experiment 108547 PARAMETER Experiment Name: Zm_Imbibed_Seeds_P Parameter: Age (day) Value: 4 vs. 2
  misc_feature: MA Experiment 108547 PARAMETER Experiment Name: Zm_Imbibed_Seeds_P Parameter: Organism Value: Zea mays
  misc_feature: MA Experiment 108547 PARAMETER Experiment Name: Zm_Imbibed_Seeds_P Parameter: Plant Line Value: 35A19
  misc_feature: MA Experiment 108547 PARAMETER Experiment Name: Zm_Imbibed_Seeds_P Parameter: Tissue Value: Aerial vs. Embryo
  misc_feature: MA Experiment ID: 108556 Result: Down-regulated in Transcription
  misc_feature: MA Experiment 108556 PARAMETER Experiment Name: Zm_Drought_P Parameter: Age (day) Value: 9
  misc_feature: MA Experiment 108556 PARAMETER Experiment Name: Zm_Drought_P Parameter: Organism Value: Zea mays
  misc_feature: MA Experiment 108556 PARAMETER Experiment Name: Zm_Drought_P Parameter: Plant Line Value: 35A19
  misc_feature: MA Experiment 108556 PARAMETER Experiment Name: Zm_Drought_P Parameter: Timepoint (hr) Value: 24
  misc_feature: MA Experiment 108556 PARAMETER Experiment Name: Zm_Drought_P Parameter: Tissue Value: Aerial
  misc_feature: MA Experiment 108556 PARAMETER Experiment Name: Zm_Drought_P Parameter: Treatment Value: Drought vs. No Drought
  misc_feature: MA Experiment ID: 108597 Result: Down-regulated in Transcription
  misc_feature: MA Experiment 108597 PARAMETER Experiment Name: Zm_100uM_ABA_P Parameter: Age (day) Value: 9
  misc_feature: MA Experiment 108597 PARAMETER Experiment Name: Zm_100uM_ABA_P Parameter: Organism Value: Zea mays
  misc_feature: MA Experiment 108597 PARAMETER Experiment Name: Zm_100uM_ABA_P Parameter: Plant Line Value: 35A19
  misc_feature: MA Experiment 108597 PARAMETER Experiment Name: Zm_100uM_ABA_P Parameter: Timepoint (hr) Value: 24
  misc_feature: MA Experiment 108597 PARAMETER Experiment Name: Zm_100uM_ABA_P Parameter: Tissue Value: Aerial
  misc_feature: MA Experiment 108597 PARAMETER Experiment Name: Zm_100uM_ABA_P Parameter: Treatment Value: 100uM ABA vs. No Treatment
  misc_feature: MA Experiment ID: 108689 Result: Down-regulated in Transcription
  misc_feature: MA Experiment 108689 PARAMETER Experiment Name: Zm_Drought_Roots_P Parameter: Age (day) Value: 9
  misc_feature: MA Experiment 108689 PARAMETER Experiment Name: Zm_Drought_Roots_P Parameter: Organism Value: Zea mays
  misc_feature: MA Experiment 108689 PARAMETER Experiment Name: Zm_Drought_Roots_P Parameter: Plant Line Value: 35A19
  misc_feature: MA Experiment 108689 PARAMETER Experiment Name: Zm_Drought_Roots_P Parameter: Timepoint (hr) Value: 24
  misc_feature: MA Experiment 108689 PARAMETER Experiment Name: Zm_Drought_Roots_P Parameter: Tissue Value: Roots
  misc_feature: MA Experiment 108689 PARAMETER Experiment Name: Zm_Drought_Roots_P Parameter: Treatment Value: Drought vs. No Drought
  misc_feature: MA Experiment ID: 20000535 Result: Down-regulated in Transcription
  misc_feature: MA Experiment 20000535 PARAMETER Experiment Name: Zm_Hybrid_Seed_Dev_P Parameter: DAP Value: 30 vs. 12
  misc_feature: MA Experiment 20000535 PARAMETER Experiment Name: Zm_Hybrid_Seed_Dev_P Parameter: Organism Value: Zea mays
  misc_feature: MA Experiment 20000535 PARAMETER Experiment Name: Zm_Hybrid_Seed_Dev_P Parameter: Plant Line Value: 35A19
  misc_feature: MA Experiment 20000535 PARAMETER Experiment Name: Zm_Hybrid_Seed_Dev_P Parameter: Tissue Value: Embryo vs. Unfert Floret
agccgactgggactgagaagaaacctccaaacacctacctctctacgaactacctgccgccggaaaaccctagagcgctcgaccatggatccgcagcagccggagcctgtcagttacctctgcggagattgcggacgtgagaacaccctgaagcccggagatgtcatccagtgccgtgaatgtggctaccgcatcctctacaagaagcggtagccacattcacggcactggaagacctctgagggtgaactgcgggccaccgccacctagagatggatccgcaccaagagcaccaaggggtggtggtggtggcggcggcggcagcagctttgtcgattcagggaacaaggtatacgtggggaaccttgcatggggcgttgacaactcgactctggagaacctattcagtgagcaaggacaggtgctggatgctaaggtcatctacgacagggatagcggcaggtcaagggggtttggtttcgtcacctatggctctgccgaggaggtcaacaatgccatatcaaaccttgatggcatagacttggatggtagacagatccgagtcacggttgcagaatcaaagcccaggcgtgaattttgagattttgttaaggtggtttagaggtcaatagcgtgtgttcacaagttctagtttgtagcgtctattctttcttccgtatgagtaacaagaagatgctgataatgagagactggaagtgaaactgctgtccacaggaagatatttttccc

SEQ ID NO: 2822 - protein, 146 aa, Zea mays subsp. mays
  peptide (1)..(146): Ceres Seq. ID no. 12414206
  misc_feature (64)..(135): Pfam Name: RNA recognition motif. (a.k.a. RRM, RBD, or RNP domain) Pfam Description: RNA recognition motif. (a.k.a. RRM, RBD, or RNP
  misc_feature (39)..(144): Homolog of NCBI NO: 681904 NR Description: cp29 [Arabidopsis thaliana]
  misc_feature (3)..(146): Homolog of NCBI NO: 12230585 NR Description: 29 kDa ribonucleoprotein B, chloroplast precursor
  misc_feature (3)..(146): Homolog of NCBI NO: 17432522 NR Description: single-stranded DNA binding protein precursor
  misc_feature (3)..(146): Homolog of NCBI NO: 1350821 NR Description: 31 kDa ribonucleoprotein, chloroplast precursor
  misc_feature (3)..(146): Homolog of NCBI NO: 12230584 NR Description: 29 kDa ribonucleoprotein A, chloroplast precursor
  misc_feature (3)..(146): Homolog of NCBI NO: 1350820 NR Description: 30 kDa ribonucleoprotein, chloroplast precursor
  misc_feature (1)..(146): Homolog of NCBI NO: 18921322 NR Description: putative ribonucleoprotein [Oryza sativa]
  misc_feature (3)..(146): Homolog of NCBI NO: 21617920 NR Description: putative RNA-binding protein [Arabidopsis
  misc_feature (3)..(146): Homolog of NCBI NO: 15228102 NR Description: chloroplast RNA-binding protein cp29, putative
  misc_feature (24)..(146): Homolog of NCBI NO: 34913270 NR Description: putative ribonucleoprotein
MSSSAVNVATASSTRSGSHIHGTGRPLRVNCGPPPPRDGSAPRAPRGGGGGGGGSSFVDSGNKVYVGNLAWGVDNSTLENLFSEQGQVLDAKVIYDRDSGRSRGFGFVTYGSAEEVNNAISNLDGIDLDGRQIRVTVAESKPRREF

SEQ ID NO: 2823 - protein, 88 aa, Zea mays subsp. mays
  peptide (1)..(88): Ceres Seq. ID no. 12414207
MDPHQEHQGVVVVAAAAAALSIQGTRYTWGTLHGALTTRLWRTYSVSKDRCWMLRSSTTGIAAGQGGLVSSPMALPRRSTMPYQTLMA

SEQ ID NO: 2824 - DNA, 1170 bp, Zea mays subsp. mays
  misc_feature (1)..(1170): Ceres Seq. ID no. 12407328
  misc_feature: MA Experiment ID: 20000534 Result: Down-regulated in Transcription
  misc_feature: MA Experiment 20000534 PARAMETER Experiment Name: Zm_Hybrid_Pollen_P Parameter: Age (day) Value: 8
  misc_feature: MA Experiment 20000534 PARAMETER Experiment Name: Zm_Hybrid_Pollen_P Parameter: Organism Value: Zea mays
  misc_feature: MA Experiment 20000534 PARAMETER Experiment Name: Zm_Hybrid_Pollen_P Parameter: Plant Line Value: 35A19
  misc_feature: MA Experiment 20000534 PARAMETER Experiment Name: Zm_Hybrid_Pollen_P Parameter: Tissue Value: Pollen vs. Aerial
gtgtttaggtgtttagagactaaaagagactgaaaaataaggattaaaaattactccataaaaccaaataccctaactttttcctttccgcatgtaacgacgcaatcgacatcccctcgcctaccccagctctacccgcgacgaagcatcaccagtaaggatgacgggctcaatggatctcccggccaagggcgggttcagcttcgacctgtgccgccgcaacagcatgctggagaagaacgggctcaaactcccgggattcaggaagaccggaacaaccatcgtcggcctcgtctttcaggatggggttgttcttggggcagacacaagagcaactgaggggcctatagttgctgataagaattgtgagaagatccactttatggcgccaaacatttattgttgtggagcaggaactgctgctgacactgaggctgttacagacatggtcagctcacagctacagctgcaccgttatgcaacgggtcgcgaatctagagtcgtaactgctcttacactgctgaagtcacatctctttaggtatcaaggccatgtcagtgctgcccttgttcttggtggagtggattgtactggaccacatcttcacactgcttatccacacggctccactgatactcttccttttgccacgatgggttctggatcccttgctgcaatgtcagtgtttgaatcgaagtataaagaaggcctcactagggaagagggaatacaactggtgtcagaagcaatatgtgcaggtatcttcaatgacttgggtagtggaagcaatgtggatgtctgcgtgataaccaaggggaagacagaatacttgagaaatcaccagttgccgaatcccagaacttatgttagttcaaagggatatagcttcaccaaggggcagactgaggtgctgtccgcaaagatcacacatctcaagcagaaggttgaggtcactgagggcggtgatgctatggaggagtgatcctgtatgcttgcattcaggtaaaacagtcatactcttttttatattattttacttagtgtaggagctaggacaagacagaatggagatctttgttgtactttcttgactgaatccggactttcatgtgaaaggtgtttccaattaaatgcttgtttctgaatgtttaaactgcaatggtatgttac

SEQ ID NO: 2825 - protein, 273 aa, Zea mays subsp. mays
  peptide (1)..(273): Ceres Seq. ID no. 12407329
  misc_feature (36)..(216): Pfam Name: Proteasome A-type and B-type Pfam Description: Proteasome A-type and B-type
  misc_feature (4)..(266): Homolog of NCBI NO: 12653475 NR Description: proteasome (prosome, macropain) subunit, beta
  misc_feature (4)..(266): Homolog of NCBI NO: 4506203 NR Description: proteasome beta 7 subunit proprotein
  misc_feature (56)..(273): Homolog of NCBI NO: 2511576 NR Description: multicatalytic endopeptidase [Arabidopsis
  misc_feature (4)..(245): Homolog of NCBI NO: 30688785 NR Description: 20S proteasome beta subunit B (PBB1) [Arabidopsis
  misc_feature (4)..(273): Homolog of NCBI NO: 21593337 NR Description: 20S proteasome beta subunit PBB2 [Arabidopsis
  misc_feature (4)..(273): Homolog of NCBI NO: 20260224 NR Description: 20S proteasome beta subunit PBB2 [Arabidopsis
  misc_feature (4)..(273): Homolog of NCBI NO: 15237451 NR Description: 20S proteasome beta subunit B (PBB2)
  misc_feature (4)..(273): Homolog of NCBI NO: 2511578 NR Description: multicatalytic endopeptidase [Arabidopsis
  misc_feature (4)..(273): Homolog of NCBI NO: 18405364 NR Description: 20S proteasome beta subunit B (PBB1)
  misc_feature (1)..(273): Homolog of NCBI NO: 8671504 NR Description: beta 2 subunit of 20S proteasome
MTGSMDLPAKGGFSFDLCRRNSMLEKNGLKLPGFRKTGTTIVGLVFQDGVVLGADTRATEGPIVADKNCEKIHFMAPNIYCCGAGTAADTEAVTDMVSSQLQLHRYATGRESRVVTALTLLKSHLFRYQGHVSAALVLGGVDCTGPHLHTAYPHGSTDTLPFATMGSGSLAAMSVFESKYKEGLTREEGIQLVSEAICAGIFNDLGSGSNVDVCVITKGKTEYLRNHQLPNPRTYVSSKGYSFTKGQTEVLSAKITHLKQKVEVTEGGDAMEE

SEQ ID NO: 2826 - protein, 269 aa, Zea mays subsp. mays
  peptide (1)..(269): Ceres Seq. ID no. 12407330
  misc_feature (32)..(212): Pfam Name: Proteasome A-type and B-type Pfam Description: Proteasome A-type and B-type
  misc_feature (1)..(262): Homolog of NCBI NO: 12653475 NR Description: proteasome (prosome, macropain) subunit, beta
  misc_feature (1)..(262): Homolog of NCBI NO: 4506203 NR Description: proteasome beta 7 subunit proprotein
  misc_feature (52)..(269): Homolog of NCBI NO: 2511576 NR Description: multicatalytic endopeptidase [Arabidopsis
  misc_feature (1)..(241): Homolog of NCBI NO: 30688785 NR Description: 20S proteasome beta subunit B (PBB1) [Arabidopsis
  misc_feature (1)..(269): Homolog of NCBI NO: 21593337 NR Description: 20S proteasome beta subunit PBB2 [Arabidopsis
  misc_feature (1)..(269): Homolog of NCBI NO: 20260224 NR Description: 20S proteasome beta subunit PBB2 [Arabidopsis
  misc_feature (1)..(269): Homolog of NCBI NO: 15237451 NR Description: 20S proteasome beta subunit B (PBB2)
  misc_feature (1)..(269): Homolog of NCBI NO: 2511578 NR Description: multicatalytic endopeptidase [Arabidopsis
  misc_feature (1)..(269): Homolog of NCBI NO: 18405364 NR Description: 20S proteasome beta subunit B (PBB1)
  misc_feature (1)..(269): Homolog of NCBI NO: 8671504 NR Description: beta 2 subunit of 20S proteasome
MDLPAKGGFSFDLCRRNSMLEKNGLKLPGFRKTGTTIVGLVFQDGVVLGADTRATEGPIVADKNCEKIHFMAPNIYCCGAGTAADTEAVTDMVSSQLQLHRYATGRESRVVTALTLLKSHLFRYQGHVSAALVLGGVDCTGPHLHTAYPHGSTDTLPFATMGSGSLAAMSVFESKYKEGLTREEGIQLVSEAICAGIFNDLGSGSNVDVCVITKGKTEYLRNHQLPNPRTYVSSKGYSFTKGQTEVLSAKITHLKQKVEVTEGGDAMEE

SEQ ID NO: 2827 - protein, 251 aa, Zea mays subsp. mays
  peptide (1)..(251): Ceres Seq. ID no. 12407331
  misc_feature (14)..(194): Pfam Name: Proteasome A-type and B-type Pfam Description: Proteasome A-type and B-type
  misc_feature (1)..(244): Homolog of NCBI NO: 12653475 NR Description: proteasome (prosome, macropain) subunit, beta
  misc_feature (1)..(244): Homolog of NCBI NO: 4506203 NR Description: proteasome beta 7 subunit proprotein
  misc_feature (34)..(251): Homolog of NCBI NO: 2511576 NR Description: multicatalytic endopeptidase [Arabidopsis
  misc_feature (1)..(223): Homolog of NCBI NO: 30688785 NR Description: 20S proteasome beta subunit B (PBB1) [Arabidopsis
  misc_feature (1)..(251): Homolog of NCBI NO: 21593337 NR Description: 20S proteasome beta subunit PBB2 [Arabidopsis
  misc_feature (1)..(251): Homolog of NCBI NO: 20260224 NR Description: 20S proteasome beta subunit PBB2 [Arabidopsis
  misc_feature (1)..(251): Homolog of NCBI NO: 15237451 NR Description: 20S proteasome beta subunit B (PBB2)
  misc_feature (1)..(251): Homolog of NCBI NO: 2511578 NR Description: multicatalytic endopeptidase [Arabidopsis
  misc_feature (1)..(251): Homolog of NCBI NO: 18405364 NR Description: 20S proteasome beta subunit B (PBB1)
  misc_feature (1)..(251): Homolog of NCBI NO: 8671504 NR Description: beta 2 subunit of 20S proteasome
MLEKNGLKLPGFRKTGTTIVGLVFQDGVVLGADTRATEGPIVADKNCEKIHFMAPNIYCCGAGTAADTEAVTDMVSSQLQLHRYATGRESRVVTALTLLKSHLFRYQGHVSAALVLGGVDCTGPHLHTAYPHGSTDTLPFATMGSGSLAAMSVFESKYKEGLTREEGIQLVSEAICAGIFNDLGSGSNVDVCVITKGKTEYLRNHQLPNPRTYVSSKGYSFTKGQTEVLSAKITHLKQKVEVTEGGDAMEE

SEQ ID NO: 2828 - DNA, 1520 bp, Zea mays subsp. mays
  misc_feature (1)..(1520): Ceres Seq. ID no. 12373839
  misc_feature: MA Experiment ID: 108504 Result: Down-regulated in Transcription
  misc_feature: MA Experiment 108504 PARAMETER Experiment Name: Zm_Drought_P Parameter: Age (day) Value: 8
  misc_feature: MA Experiment 108504 PARAMETER Experiment Name: Zm_Drought_P Parameter: Organism Value: Zea mays
  misc_feature: MA Experiment 108504 PARAMETER Experiment Name: Zm_Drought_P Parameter: Plant Line Value: 35A19
  misc_feature: MA Experiment 108504 PARAMETER Experiment Name: Zm_Drought_P Parameter: Timepoint (hr) Value: 12
  misc_feature: MA Experiment 108504 PARAMETER Experiment Name: Zm_Drought_P Parameter: Tissue Value: Aerial
  misc_feature: MA Experiment 108504 PARAMETER Experiment Name: Zm_Drought_P Parameter: Treatment Value: Drought vs. No Drought
  misc_feature: MA Experiment ID: 108515 Result: Up-regulated in Transcription
  misc_feature: MA Experiment 108515 PARAMETER Experiment Name: Zm_2mM_SA_P Parameter: Age (day) Value: 8
  misc_feature: MA Experiment 108515 PARAMETER Experiment Name: Zm_2mM_SA_P Parameter: Organism Value: Zea mays
  misc_feature: MA Experiment 108515 PARAMETER Experiment Name: Zm_2mM_SA_P Parameter: Plant Line Value: 35A19
  misc_feature: MA Experiment 108515 PARAMETER Experiment Name: Zm_2mM_SA_P Parameter: Timepoint (hr) Value: 12
  misc_feature: MA Experiment 108515 PARAMETER Experiment Name: Zm_2mM_SA_P Parameter: Tissue Value: Aerial
  misc_feature: MA Experiment 108515 PARAMETER Experiment Name: Zm_2mM_SA_P Parameter: Treatment Value: 2mM SA vs. No Treatment
  misc_feature: MA Experiment ID: 108526 Result: Up-regulated in Transcription
  misc_feature: MA Experiment 108526 PARAMETER Experiment Name: Zm_5mM_NO_P Parameter: Age (day) Value: 8
  misc_feature: MA Experiment 108526 PARAMETER Experiment Name: Zm_5mM_NO_P Parameter: Organism Value: Zea mays
  misc_feature: MA Experiment 108526 PARAMETER Experiment Name: Zm_5mM_NO_P Parameter: Plant Line Value: 35A19
  misc_feature: MA Experiment 108526 PARAMETER Experiment Name: Zm_5mM_NO_P Parameter: Timepoint (hr) Value: 1
  misc_feature: MA Experiment 108526 PARAMETER Experiment Name: Zm_5mM_NO_P Parameter: Tissue Value: Aerial
  misc_feature: MA Experiment 108526 PARAMETER Experiment Name: Zm_5mM_NO_P Parameter: Treatment Value: 5mM NO vs. No Treatment
  misc_feature: MA Experiment ID: 108528 Result: Down-regulated in Transcription
  misc_feature: MA Experiment 108528 PARAMETER Experiment Name: Zm_Imbibed_Seeds_P Parameter: Age (day) Value: 5 vs. 2
  misc_feature: MA Experiment 108528 PARAMETER Experiment Name: Zm_Imbibed_Seeds_P Parameter: Organism Value: Zea mays
  misc_feature: MA Experiment 108528 PARAMETER Experiment Name: Zm_Imbibed_Seeds_P Parameter: Plant Line Value: 35A19
  misc_feature: MA Experiment 108528 PARAMETER Experiment Name: Zm_Imbibed_Seeds_P Parameter: Tissue Value: Aerial vs. Embryo
  misc_feature: MA Experiment ID: 108530 Result: Down-regulated in Transcription
  misc_feature: MA Experiment 108530 PARAMETER Experiment Name: Zm_Imbibed_Seeds_P Parameter: Age (day) Value: 6 vs. 2
  misc_feature: MA Experiment 108530 PARAMETER Experiment Name: Zm_Imbibed_Seeds_P Parameter: Organism Value: Zea mays
  misc_feature: MA Experiment 108530 PARAMETER Experiment Name: Zm_Imbibed_Seeds_P Parameter: Plant Line Value: 35A19
  misc_feature: MA Experiment 108530 PARAMETER Experiment Name: Zm_Imbibed_Seeds_P Parameter: Tissue Value: Aerial vs. Embryo
  misc_feature: MA Experiment ID: 108535 Result: Up-regulated in Transcription
  misc_feature: MA Experiment 108535 PARAMETER Experiment Name: Zm_Meristem_P Parameter: Age (day) Value: 8
  misc_feature: MA Experiment 108535 PARAMETER Experiment Name: Zm_Meristem_P Parameter: Organism Value: Zea mays
  misc_feature: MA Experiment 108535 PARAMETER Experiment Name: Zm_Meristem_P Parameter: Plant Line Value: 35A19
  misc_feature: MA Experiment 108535 PARAMETER Experiment Name: Zm_Meristem_P Parameter: Tissue Value: Root Meristem vs. Above Root Meristem
  misc_feature: MA Experiment ID: 108542 Result: Down-regulated in Transcription
  misc_feature: MA Experiment 108542 PARAMETER Experiment Name: Zm_150mM_NaCl_P Parameter: Age (day) Value: 8
  misc_feature: MA Experiment 108542 PARAMETER Experiment Name: Zm_150mM_NaCl_P Parameter: Organism Value: Zea mays
  misc_feature: MA Experiment 108542 PARAMETER Experiment Name: Zm_150mM_NaCl_P Parameter: Plant Line Value: 35A19
  misc_feature: MA Experiment 108542 PARAMETER Experiment Name: Zm_150mM_NaCl_P Parameter: Timepoint (hr) Value: 6
  misc_feature: MA Experiment 108542 PARAMETER Experiment Name: Zm_150mM_NaCl_P Parameter: Tissue Value: Aerial
  misc_feature: MA Experiment 108542 PARAMETER Experiment Name: Zm_150mM_NaCl_P Parameter: Treatment Value: 150mM NaCl vs. No Treatment
  misc_feature: MA Experiment ID: 108556 Result: Down-regulated in Transcription
  misc_feature: MA Experiment 108556 PARAMETER Experiment Name: Zm_Drought_P Parameter: Age (day) Value: 9
  misc_feature: MA Experiment 108556 PARAMETER Experiment Name: Zm_Drought_P Parameter: Organism Value: Zea mays
  misc_feature: MA Experiment 108556 PARAMETER Experiment Name: Zm_Drought_P Parameter: Plant Line Value: 35A19
  misc_feature: MA Experiment 108556 PARAMETER Experiment Name: Zm_Drought_P Parameter: Timepoint (hr) Value: 24
  misc_feature: MA Experiment 108556 PARAMETER Experiment Name: Zm_Drought_P Parameter: Tissue Value: Aerial
  misc_feature: MA Experiment 108556 PARAMETER Experiment Name: Zm_Drought_P Parameter: Treatment Value: Drought vs. No Drought
  misc_feature: MA Experiment ID: 108597 Result: Down-regulated in Transcription
  misc_feature: MA Experiment 108597 PARAMETER Experiment Name: Zm_100uM_ABA_P Parameter: Age (day) Value: 9
  misc_feature: MA Experiment 108597 PARAMETER Experiment Name: Zm_100uM_ABA_P Parameter: Organism Value: Zea mays
  misc_feature: MA Experiment 108597 PARAMETER Experiment Name: Zm_100uM_ABA_P Parameter: Plant Line Value: 35A19
  misc_feature: MA Experiment 108597 PARAMETER Experiment Name: Zm_100uM_ABA_P Parameter: Timepoint (hr) Value: 24
  misc_feature: MA Experiment 108597 PARAMETER Experiment Name: Zm_100uM_ABA_P Parameter: Tissue Value: Aerial
  misc_feature: MA Experiment 108597 PARAMETER Experiment Name: Zm_100uM_ABA_P Parameter: Treatment Value: 100uM ABA vs. No Treatment
  misc_feature: MA Experiment ID: 108687 Result: Down-regulated in Transcription
  misc_feature: MA Experiment 108687 PARAMETER Experiment Name: Zm_Embryos-Flowers__P Parameter: Tissue Value: Embryo vs. Aerial+
  misc_feature: MA Experiment ID: 108689 Result: Down-regulated in Transcription
  misc_feature: MA Experiment 108689 PARAMETER Experiment Name: Zm_Drought_Roots_P Parameter: Age (day) Value: 9
  misc_feature: MA Experiment 108689 PARAMETER Experiment Name: Zm_Drought_Roots_P Parameter: Organism Value: Zea mays
  misc_feature: MA Experiment 108689 PARAMETER Experiment Name: Zm_Drought_Roots_P Parameter: Plant Line Value: 35A19
  misc_feature: MA Experiment 108689 PARAMETER Experiment Name: Zm_Drought_Roots_P Parameter: Timepoint (hr) Value: 24
  misc_feature: MA Experiment 108689 PARAMETER Experiment Name: Zm_Drought_Roots_P Parameter: Tissue Value: Roots
  misc_feature: MA Experiment 108689 PARAMETER Experiment Name: Zm_Drought_Roots_P Parameter: Treatment Value: Drought vs. No Drought
  misc_feature: MA Experiment ID: 20000480 Result: Down-regulated in Transcription
  misc_feature: MA Experiment 20000480 PARAMETER Experiment Name: Zm_Drought_P Parameter: Age (day) Value: 11
  misc_feature: MA Experiment 20000480 PARAMETER Experiment Name: Zm_Drought_P Parameter: Organism Value: Zea mays
  misc_feature: MA Experiment 20000480 PARAMETER Experiment Name: Zm_Drought_P Parameter: Plant Line Value: 35A19
  misc_feature: MA Experiment 20000480 PARAMETER Experiment Name: Zm_Drought_P Parameter: Timepoint (hr) Value: 72
  misc_feature: MA Experiment 20000480 PARAMETER Experiment Name: Zm_Drought_P Parameter: Tissue Value: Aerial
  misc_feature: MA Experiment 20000480 PARAMETER Experiment Name: Zm_Drought_P Parameter: Treatment Value: Drought vs. No Drought
  misc_feature: MA Experiment ID: 20000535 Result: Down-regulated in Transcription
  misc_feature: MA Experiment 20000535 PARAMETER Experiment Name: Zm_Hybrid_Seed_Dev_P Parameter: DAP Value: 30 vs. 12
  misc_feature: MA Experiment 20000535 PARAMETER Experiment Name: Zm_Hybrid_Seed_Dev_P Parameter: Organism Value: Zea mays
  misc_feature: MA Experiment 20000535 PARAMETER Experiment Name: Zm_Hybrid_Seed_Dev_P Parameter: Plant Line Value: 35A19
  misc_feature: MA Experiment 20000535 PARAMETER Experiment Name: Zm_Hybrid_Seed_Dev_P Parameter: Tissue Value: Embryo vs. Unfert Floret
  misc_feature: MA Experiment ID: 20000633 Result: Up-regulated in Transcription
  misc_feature: MA Experiment 20000633 PARAMETER Experiment Name: Zm_Herbicide-Treatments_P Parameter: Timepoint (hr) Value: 4
  misc_feature: MA Experiment 20000633 PARAMETER Experiment Name: Zm_Herbicide-Treatments_P Parameter: Tissue Value: Aerial
  misc_feature: MA Experiment 20000633 PARAMETER Experiment Name: Zm_Herbicide-Treatments_P Parameter: Treatment Value: Trimec vs. No Treatment
attttcgtagtgcactctctagtctctccacacaccacagtcgagcgagcactcctctccatggcccacggcgagggacgacgccagcatttcctggtggtggccctcggcgtccaaagccacgtcaacccggggcgcgccctcgcccaccgcctcgcacggctacgcgccgacggctccatcacggccacgctctccgtgccggtaaccacctaccggcgcatgttccctcggtcggcggattccgccccagcgacggcggagaccagcgacggggtcatctcgtacgtggcgcactcagacggcctcgacgacggctcgtcgtcgtcctgggccgcggacgccgaggacagggcgcgcaggcgccgcgcgagcgccgacagcctctccgccgtggccgcccgcctggccggccgcggccgcccggtgacgtgcatcgcgtgcacgatggtgtcgcctccggcgctcgacgtcgcgcgggagcacgccatccctctcgccgtcttctggctccagccggccaccgtcctcgccctctgctaccactacttccacggccacggcgcgagcgtggccgcccacgccgcggacccggcgcacgaggtgcgcgtgcccgggctgcgccgccccctccgcatgcgctgcctcccgtcgttcctcaccgacacgtcgggcagcgacagggccacggccctcaccgacgtgttccgagagctgttcgagttcttggaccgctggcggcccacggtgctggtcaacacgttcgacgagctggagccggacccgctcgcggaggtgaggcgccacctggacgtggtcgccgttggccccatggtcgggcccgccacggacgccccgcatccacctgttcgaccacgacgacgacgccggcaagaagaggtacacggagtggcttcacgctcacccggacggctcggtggtgtacgcgtcgttcgggagcgtcacgaagctcgccaagcggcagatgcaggagatcgccggagggttgcgccagtgcgggcggccgtacttgctggtcgtgcgcagggacggggtcgacgacgacgaaggcggcatccatggcctggagaacgacaccgagatgcaggggatggtcgtggactggtgcgaccagctggaggtgctgtcgcacccggcggtcggctgcttcgtctcgcattgcgggtggaactcggcgacggaggccatggcgtccggcgtgcccatcgtcggtgtgcccaacatgttcgaccagccgacgaacatgtacttggtcgaggaagagtggggggtcggcgtcagaggagagcgagacgccgatggcgtgctgacaggggcggagctggcaaggtgcattgagctggtcatgggtgatggcgcaggagcagtggtgatcagggaaagggcaaaggccttgcaagagacagcgcaggcggcggccagtgcagcaggcgggcccgccgagagaaacctttgtcacctcgtcaagacgatgtcaaaataattatcaaagctgtcgt

SEQ ID NO: 2829 - protein, 452 aa, Zea mays subsp. mays
  peptide (1)..(452): Ceres Seq. ID no. 12373840
  misc_feature (49)..(279): Pfam Name: UDP-glucoronosyl and UDP-glucosyl transferase Pfam Description: UDP-glucoronosyl and UDP-glucosyl transferase
  misc_feature (30)..(284): Homolog of NCBI NO: 18414478 NR Description: glucosyltransferase like protein
  misc_feature (30)..(284): Homolog of NCBI NO: 2149127 NR Description: UDP-glucose:indole-3-acetate
  misc_feature (28)..(291): Homolog of NCBI NO: 4115563 NR Description: UDP-glucose:anthocyanin 5-O-glucosyltransferase
  misc_feature (28)..(288): Homolog of NCBI NO: 4115561 NR Description: UDP-glucose:anthocyanin 5-O-glucosyltransferase
  misc_feature (28)..(282): Homolog of NCBI NO: 4115559 NR Description: UDP-glucose:anthocysnin 5-O-glucosyltransferase
  misc_feature (30)..(282): Homolog of NCBI NO: 6683052 NR Description: anthocyanin 5-O-glucosyltransferase [Petunia x
  misc_feature (30)..(279): Homolog of NCBI NO: 14192682 NR Description: cold-induced glucosyl transferase [Solanum
  misc_feature (30)..(283): Homolog of NCBI NO: 20146093 NR Description: glucosyltransferase NTGT2 [Nicotiana tabacum]
  misc_feature (28)..(282): Homolog of NCBI NO: 40714353 NR Description: anthocyanin 5-O-glucosyltransferase [Iris
  misc_feature (5)..(279): Homolog of NCBI NO: 34906162 NR Description: putative anthocyanin 5-O-glucosyltransferase
IFVVHSLVSPHTTVERALLSMAHGEGRRQHFLVVALGVQSHVNPGRALAHRLARLRADGSITATLSVPVTTYRRMFPRSADSAPATAETSDGVISYVAHSDGLDDGSSSSWAADAEDRARRRRASADSLSAVAARLAGRGRPVTCIACTMVSPPALDVAREHAIPLAVFWLQPATVLALCYHYFHGHGASVAAHAADPAHEVRVPGLRRPLRMRCLPSFLTDTSGSDRATALTDVFRELFEFLDRWRPTVLVNTFDELEPDPLAEVRRHLDVVAVGPMVGPATDAPHPPVRPRRRRRQEEVHGVASRSPGRLGGVRVVRERHEARQAADAGDRRRVAPVRAAVLAGRAQGRGRRRRRRHPWPGERHRDAGDGRGLVRPAGGAVAPGGRLLRLALRVELGDGGHGVRRAHRRCAQHVRPADEHVLGRGRVGGRRQRRARRRWRADRGGAGKVH

SEQ ID NO: 2830 - protein, 442 aa, Zea mays subsp. mays
  peptide (1)..(442): Ceres Seq. ID no. 12373841
  misc_feature (285)..(442): Pfam Name: Equine herpesvirus glycoprotein gp2 Pfam Description: Equine herpesvirus glycoprotein gp2
  misc_feature (17)..(276): Homolog of NCBI NO: 30984486 NR Description: immediate early protein ICP0 [Cercopithecine
  misc_feature (257)..(439): Homolog of NCBI NO: 30313663 NR Description: sublingual apomucin [Mus musculus]
  misc_feature (257)..(439): Homolog of NCBI NO: 30313663 NR Description: sublingual apomucin [Mus musculus]
FRSALSSLSTHHSRASTPLHGPRRGTTPAFPGGGPRRPKPRQPGARPRPPPRTATRRRLHHGHALRAGNHLPAHVPSVGGFRPSDGGDQRRGHLVRGALRRPRRRLVVVLGRGRRGQGAQAPRERRQPLRRGRPPGRPRPPGDVHRVHDGVASGARRRAGARHPSRRLLAPAGHRPRPLLPLLPRPRRERGRPRRGPGARGARARAAPPPPHALPPVVPHRHVGQRQGHGPHRRVPRAVRVLGPLAAHGAGQHVRRAGAGPARGGEAPPGRGRRWPHGRARHGRPASTCSTTTTTPARRGTRSGFTLTRTARWCTRRSGASRSSPSGRCRRSPEGCASAGGRTCWSCAGTGSTTTKAASMAWRTTPRCRGWSWTGATSWRCCRTRRSAASSRIAGGTRRRRPWRPACPSSVCPTCSTSRRTCTWSRKSGGSASEESETPMAC

SEQ ID NO: 2831 - protein, 432 aa, Zea mays subsp. mays
  peptide (1)..(432): Ceres Seq. ID no. 12373842
  misc_feature (29)..(259): Pfam Name: UDP-glucoronosyl and UDP-glucosyl transferase Pfam Description: UDP-glucoronosyl and UDP-glucosyl transferase
  misc_feature (10)..(264): Homolog of NCBI NO: 18414478 NR Description: glucosyltransferase like protein
  misc_feature (10)..(264): Homolog of NCBI NO: 2149127 NR Description: UDP-glucose:indole-3-acetate
  misc_feature (8)..(271): Homolog of NCBI NO: 4115563 NR Description: UDP-glucose:anthocyanin 5-O-glucosyltransferase
  misc_feature (8)..(268): Homolog of NCBI NO: 4115561 NR Description: UDP-glucose:anthocyanin 5-O-glucosyltransferase
  misc_feature (8)..(262): Homolog of NCBI NO: 4115559 NR Description: UDP-glucose:anthocysnin 5-O-glucosyltransferase
  misc_feature (10)..(262): Homolog of NCBI NO: 6683052 NR Description: anthocyanin 5-O-glucosyltransferase [Petunia x
  misc_feature (10)..(259): Homolog of NCBI NO: 14192682 NR Description: cold-induced glucosyl transferase [Solanum
  misc_feature (10)..(263): Homolog of NCBI NO: 20146093 NR Description: glucosyltransferase NTGT2 [Nicotiana tabacum]
  misc_feature (8)..(262): Homolog of NCBI NO: 40714353 NR Description: anthocyanin 5-O-glucosyltransferase [Iris
  misc_feature (1)..(259): Homolog of NCBI NO: 34906162 NR Description: putative anthocyanin 5-O-glucosyltransferase
MAHGEGRRQHFLVVALGVQSHVNPGRALAHRLARLRADGSITATLSVPVTTYRRMFPRSADSAPATAETSDGVISYVAHSDGLDDGSSSSWAADAEDRARRRRASADSLSAVAARLAGRGRPVTCIACTMVSPPALDVAREHAIPLAVFWLQPATVLALCYHYFHGHGASVAAHAADPAHEVRVPGLRRPLRMRCLPSFLTDTSGSDRATALTDVFRELFEFLDRWRPTVLVNTFDELEPDPLAEVRRHLDVVAVGPMVGPATDAPHPPVRPRRRRRQEEVHGVASRSPGRLGGVRVVRERHEARQAADAGDRRRVAPVRAAVLAGRAQGRGRRRRRRHPWPGERHRDAGDGRGLVRPAGGAVAPGGRLLRLALRVELGDGGHGVRRAHRRCAQHVRPADEHVLGRGRVGGRRQRRARRRWRADRGGAGKVH

SEQ ID NO: 2832 - DNA, 1620 bp, Zea mays subsp. mays
  misc_feature (1)..(1620): Ceres Seq. ID no. 12372917
  misc_feature: MA Experiment ID: 108527 Result: Down-regulated in Transcription
  misc_feature: MA Experiment 108527 PARAMETER Experiment Name: Zm_5mM_NO_P Parameter: Age (day) Value: 8
  misc_feature: MA Experiment 108527 PARAMETER Experiment Name: Zm_5mM_NO_P Parameter: Organism Value: Zea mays
  misc_feature: MA Experiment 108527 PARAMETER Experiment Name: Zm_5mM_NO_P Parameter: Plant Line Value: 35A19
  misc_feature: MA Experiment 108527 PARAMETER Experiment Name: Zm_5mM_NO_P Parameter: Timepoint (hr) Value: 6
  misc_feature: MA Experiment 108527 PARAMETER Experiment Name: Zm_5mM_NO_P Parameter: Tissue Value: Aerial
  misc_feature: MA Experiment 108527 PARAMETER Experiment Name: Zm_5mM_NO_P Parameter: Treatment Value: 5mM NO vs. No Treatment
  misc_feature: MA Experiment ID: 108528 Result: Up-regulated in Transcription
  misc_feature: MA Experiment 108528 PARAMETER Experiment Name: Zm_Imbibed_Seeds_P Parameter: Age (day) Value: 5 vs. 2
  misc_feature: MA Experiment 108528 PARAMETER Experiment Name: Zm_Imbibed_Seeds_P Parameter: Organism Value: Zea mays
  misc_feature: MA Experiment 108528 PARAMETER Experiment Name: Zm_Imbibed_Seeds_P Parameter: Plant Line Value: 35A19
  misc_feature: MA Experiment 108528 PARAMETER Experiment Name: Zm_Imbibed_Seeds_P Parameter: Tissue Value: Aerial vs. Embryo
  misc_feature: MA Experiment ID: 108529 Result: Down-regulated in Transcription
  misc_feature: MA Experiment 108529 PARAMETER Experiment Name: Zm_Imbibed_Seeds_P Parameter: Age (day) Value: 5 vs. 2
  misc_feature: MA Experiment 108529 PARAMETER Experiment Name: Zm_Imbibed_Seeds_P Parameter: Organism Value: Zea mays
  misc_feature: MA Experiment 108529 PARAMETER Experiment Name: Zm_Imbibed_Seeds_P Parameter: Plant Line Value: 35A19
  misc_feature: MA Experiment 108529 PARAMETER Experiment Name: Zm_Imbibed_Seeds_P Parameter: Tissue Value: Roots vs. Embryo
  misc_feature: MA Experiment ID: 108530 Result: Up-regulated in Transcription
  misc_feature: MA Experiment 108530 PARAMETER Experiment Name: Zm_Imbibed_Seeds_P Parameter: Age (day) Value: 6 vs. 2
  misc_feature: MA Experiment 108530 PARAMETER Experiment Name: Zm_Imbibed_Seeds_P Parameter: Organism Value: Zea mays
  misc_feature: MA Experiment 108530 PARAMETER Experiment Name: Zm_Imbibed_Seeds_P Parameter: Plant Line Value: 35A19
  misc_feature: MA Experiment 108530 PARAMETER Experiment Name: Zm_Imbibed_Seeds_P Parameter: Tissue Value: Aerial vs. Embryo
  misc_feature: MA Experiment ID: 108536 Result: Down-regulated in Transcription
  misc_feature: MA Experiment 108536 PARAMETER Experiment Name: Zm_Meristem_P Parameter: Age (day) Value: 8
  misc_feature: MA Experiment 108536 PARAMETER Experiment Name: Zm_Meristem_P Parameter: Organism Value: Zea mays
  misc_feature: MA Experiment 108536 PARAMETER Experiment Name: Zm_Meristem_P Parameter: Plant Line Value: 35A19
  misc_feature: MA Experiment 108536 PARAMETER Experiment Name: Zm_Meristem_P Parameter: Tissue Value: Shoot Meristem vs. Above Shoot Meristem
  misc_feature: MA Experiment ID: 108543 Result: Up-regulated in Transcription
  misc_feature: MA Experiment ID: 108544 Result: Up-regulated in Transcription
  misc_feature: MA Experiment ID: 108545 Result: Up-regulated in Transcription
  misc_feature: MA Experiment 108545 PARAMETER Experiment Name: Zm_Imbibed_Seeds_P Parameter: Age (day) Value: 3 vs. 2
  misc_feature: MA Experiment 108545 PARAMETER Experiment Name: Zm_Imbibed_Seeds_P Parameter: Organism Value: Zea mays
  misc_feature: MA Experiment 108545 PARAMETER Experiment Name: Zm_Imbibed_Seeds_P Parameter: Plant Line Value: 35A19
  misc_feature: MA Experiment 108545 PARAMETER Experiment Name: Zm_Imbibed_Seeds_P Parameter: Tissue Value: Aerial vs. Embryo
  misc_feature: MA Experiment ID: 108546 Result: Down-regulated in Transcription
  misc_feature: MA Experiment 108546 PARAMETER Experiment Name: Zm_Imbibed_Seeds_P Parameter: Age (day) Value: 3 vs. 2
  misc_feature: MA Experiment 108546 PARAMETER Experiment Name: Zm_Imbibed_Seeds_P Parameter: Organism Value: Zea mays
  misc_feature: MA Experiment 108546 PARAMETER Experiment Name: Zm_Imbibed_Seeds_P Parameter: Plant Line Value: 35A19
  misc_feature: MA Experiment 108546 PARAMETER Experiment Name: Zm_Imbibed_Seeds_P Parameter: Tissue Value: Roots vs. Embryo
  misc_feature: MA Experiment ID: 108547 Result: Up-regulated in Transcription
  misc_feature: MA Experiment 108547 PARAMETER Experiment Name: Zm_Imbibed_Seeds_P Parameter: Age (day) Value: 4 vs. 2
  misc_feature: MA Experiment 108547 PARAMETER Experiment Name: Zm_Imbibed_Seeds_P Parameter: Organism Value: Zea mays
  misc_feature: MA Experiment 108547 PARAMETER Experiment Name: Zm_Imbibed_Seeds_P Parameter: Plant Line Value: 35A19
  misc_feature: MA Experiment 108547 PARAMETER Experiment Name: Zm_Imbibed_Seeds_P Parameter: Tissue Value: Aerial vs. Embryo
  misc_feature: MA Experiment ID: 108689 Result: Down-regulated in Transcription
  misc_feature: MA Experiment 108689 PARAMETER Experiment Name: Zm_Drought_Roots_P Parameter: Age (day) Value: 9
  misc_feature: MA Experiment 108689 PARAMETER Experiment Name: Zm_Drought_Roots_P Parameter: Organism Value: Zea mays
  misc_feature: MA Experiment 108689 PARAMETER Experiment Name: Zm_Drought_Roots_P Parameter: Plant Line Value: 35A19
  misc_feature: MA Experiment 108689 PARAMETER Experiment Name: Zm_Drought_Roots_P Parameter: Timepoint (hr) Value: 24
  misc_feature: MA Experiment 108689 PARAMETER Experiment Name: Zm_Drought_Roots_P Parameter: Tissue Value: Roots
  misc_feature: MA Experiment 108689 PARAMETER Experiment Name: Zm_Drought_Roots_P Parameter: Treatment Value: Drought vs. No Drought
  misc_feature: MA Experiment ID: 20000492 Result: Down-regulated in Transcription
  misc_feature: MA Experiment 20000492 PARAMETER Experiment Name: Zm_Hybrid_Seed_Dev_P Parameter: DAP Value: 12
  misc_feature: MA Experiment 20000492 PARAMETER Experiment Name: Zm_Hybrid_Seed_Dev_P Parameter: Organism Value: Zea mays
  misc_feature: MA Experiment 20000492 PARAMETER Experiment Name: Zm_Hybrid_Seed_Dev_P Parameter: Plant Line Value: 35A19
  misc_feature: MA Experiment 20000492 PARAMETER Experiment Name: Zm_Hybrid_Seed_Dev_P Parameter: Tissue Value: Fert Kernel vs. Unfert Floret
  misc_feature: MA Experiment ID: 20000535 Result: Down-regulated in Transcription
  misc_feature: MA Experiment 20000535 PARAMETER Experiment Name: Zm_Hybrid_Seed_Dev_P Parameter: DAP Value: 30 vs. 12
  misc_feature: MA Experiment 20000535 PARAMETER Experiment Name: Zm_Hybrid_Seed_Dev_P Parameter: Organism Value: Zea mays
  misc_feature: MA Experiment 20000535 PARAMETER Experiment Name: Zm_Hybrid_Seed_Dev_P Parameter: Plant Line Value: 35A19
  misc_feature: MA Experiment 20000535 PARAMETER Experiment Name: Zm_Hybrid_Seed_Dev_P Parameter: Tissue Value: Embryo vs. Unfert Floret
  misc_feature: MA Experiment ID: 20000626 Result: Down-regulated in Transcription
  misc_feature: MA Experiment 20000626 PARAMETER Experiment Name: Zm_Herbicide-Treatments_P Parameter: Timepoint (hr) Value: 12
  misc_feature: MA Experiment 20000626 PARAMETER Experiment Name: Zm_Herbicide-Treatments_P Parameter: Tissue Value: Aerial
  misc_feature: MA Experiment 20000626 PARAMETER Experiment Name: Zm_Herbicide-Treatments_P Parameter: Treatment Value: Roundup vs. No Treatment
  misc_feature: MA Experiment ID: 20001608 Result: Up-regulated in Transcription
  misc_feature: MA Experiment 20001608 PARAMETER Experiment Name: Zm_50ppm_KNO3_L-to-H_P Parameter: Age (day) Value: 21
  misc_feature: MA Experiment 20001608 PARAMETER Experiment Name: Zm_50ppm_KNO3_L-to-H_P Parameter: Organism Value: Zea mays
  misc_feature: MA Experiment 20001608 PARAMETER Experiment Name: Zm_50ppm_KNO3_L-to-H_P Parameter: Plant Line Value: 35A19
  misc_feature: MA Experiment 20001608 PARAMETER Experiment Name: Zm_50ppm_KNO3_L-to-H_P Parameter: Timepoint (hr) Value: 48
  misc_feature: MA Experiment 20001608 PARAMETER Experiment Name: Zm_50ppm_KNO3_L-to-H_P Parameter: Tissue Value: Shoots
  misc_feature: MA Experiment 20001608 PARAMETER Experiment Name: Zm_50ppm_KNO3_L-to-H_P Parameter: Treatment Value: 50ppm KNO3 vs. 50ppm KCl
aaactcccgcggtgccgcgcctcgctttcgcatccccccgcggagaggagaggaagaagaacccagccaaatcctcagtcctcaggcagtcaggctgctcgcagctcgtgccgtccactctcccccgaggcagtctcttgcgttcgctgctcgacatggcgctccaggcggcgacgtccttcctcccctctgccctctccgcgcgcaaggaggggtcggtgaaggactcggcgtcgttcttgggtgttcgtctcgcggcggatggcctcaagctggacaccaccgctctgggcctacgcaccgtgagggtgagcaggtcggcggacatccgcgcgcagacggcagcggtgtcctccccgtcagtgacccccgcgtcgccgtctggcaagaagaccctccgcaagggcacggcggtcatcaccggcgcgtcgtccggcctcggcctcgccacggcgaaggccctggcggagacaggcaagtggcacgtcatcatggcctgccgcgacttcctcaaggcgtcgcgcgcggccaaggcggccggcatggacaaggacagcttcaccgtcgtgcacctggacctcgcctccctggacagcgtccgccagttcgtcaggaacgtgcgccagctggagatgcccatcgacgtggtggtctgcaacgccgccgtgtaccagcccaccgccaaggagccgtcctacaccgccgacggcttcgagatgagcgtcggcgtcaaccacctcggccacttcctcctcgcgcgcgagctcctcagcgacctccagtcctccgactacccctctaagcgcctcatcatcgtcggctccatcaccgggaacacgaacacgctggcggggaacgtgcccccgaaggcgaacctgggcgacctgcgcggcctcgccggcggcctcaacggcgttggcagctcggtgatgatcgacggcggggagttcgacggcgccaaggcatacaaggacagcaaggtgtggcaacatgctgacgatgcaggagttccaccgccggtaccacgaggagacgggcgtgaccttcgcgtcgctctacccgggctgcatcgccaccacgggcctgttccgcgagcacatcccgctgttccgcctgctcttccccccgttccagaagtacatcaccaaggggtacgtctccgaggaggaggccgggaagcggctggcgcaggtggtgagcgaccccagcctgaccaagtccggcgtgtactggagctggaacaagaactccgcgtccttcgagaaccagctctctgaggaggccagcgacgccgacaaggccaagaagctctgggagatcagcgagaagctcgtcggcttggcgtgatgcccaccgtggccggcgtcggcagccggcgacagtttttcctacctaggacatgctcattagttggtctcagtcgagtagtcgacgtgtggtgcgcccgtgtcagagtgccaagccaagacagaaagtgagtacaaacgtgtaaaatatgtgctactgcgacgtgatggtttgggcagtggactgtatgtatctctactctctaggcttctgctttgctttgcatatttaattttctgctaataagaggacagcaaatgcctttcgagcttc

SEQ ID NO: 2833 - protein, 424 aa, Zea mays subsp. mays
  peptide (1)..(424): Ceres Seq. ID no. 12372918
  misc_feature (17)..(327): Homolog of NCBI NO: 10720231 NR Description: Protochlorophyllide reductase, chloroplast
  misc_feature (52)..(327): Homolog of NCBI NO: 15234129 NR Description: protochlorophyllide reductase precursor
  misc_feature (52)..(327): Homolog of NCBI NO: 21068893 NR Description: NADPH:protochlorophyllide oxidoreductase
  misc_feature (52)..(327): Homolog of NCBI NO: 968975 NR Description: NADPH:protochlorophyllide oxidoreductase A
  misc_feature (52)..(327): Homolog of NCBI NO: 15239574 NR Description: NADPH:protochlorophyllide oxidoreductase A
  misc_feature (52)..(327): Homolog of NCBI NO: 10720220 NR Description: Protochlorophyllide reductase, chloroplast
  misc_feature (52)..(327): Homolog of NCBI NO: 266742 NR Description: Protochlorophyllide reductase, chloroplast
  misc_feature (52)..(327): Homolog of NCBI NO: 81946 NR Description: protochlorophyllide reductase (EC 1.3.1.33)
  misc_feature (52)..(327): Homolog of NCBI NO: 10720233 NR Description: Protochlorophyllide reductase, chloroplast
  misc_feature (52)..(327): Homolog of NCBI NO: 10720236 NR Description: Protochlorophyllide reductase B, chloroplast
TPAVPRLAFASPRGEERKKNPAKSSVLRQSGCSQLVPSTLPRGSLLRSLLDMALQAATSFLPSALSARKEGSVKDSASFLGVRLAADGLKLDTTALGLRTVRVSRSADIRAQTAAVSSPSVTPASPSGKKTLRKGTAVITGASSGLGLATAKALAETGKWHVIMACRDFLKASRAAKAAGMDKDSFTVVHLDLASLDSVRQFVRNVRQLEMPIDVVVCNAAVYQPTAKEPSYTADGFEMSVGVNHLGHFLLARELLSDLQSSDYPSKRLIIVGSITGNTNTLAGNVPPKANLGDLRGLAGGLNGVGSSVMIDGGEFDGAKAYKDSKVWQHADDAGVPPPVPRGDGRDLRVALPGLHRHHGPVPRAHPAVPPALPPVPEVHHQGVRLRGGGREAAGAGGERPQPDQVRRVLELEQELRVLREPAL

SEQ ID NO: 2834 - protein, 373 aa, Zea mays subsp. mays
  peptide (1)..(373): Ceres Seq. ID no. 12372919
  misc_feature (1)..(276): Homolog of NCBI NO: 81946 NR Description: protochlorophyllide reductase (EC 1.3.1.33)
  misc_feature (1)..(276): Homolog of NCBI NO: 10720233 NR Description: Protochlorophyllide reductase, chloroplast
  misc_feature (1)..(276): Homolog of NCBI NO: 10720236 NR Description: Protochlorophyllide reductase B, chloroplast
  misc_feature (1)..(276): Homolog of NCBI NO: 10720220 NR Description: Protochlorophyllide reductase, chloroplast
  misc_feature (1)..(276): Homolog of NCBI NO: 266742 NR Description: Protochlorophyllide reductase, chloroplast
  misc_feature (1)..(276): Homolog of NCBI NO: 10720231 NR Description: Protochlorophyllide reductase, chloroplast
  misc_feature (1)..(276): Homolog of NCBI NO: 15234129 NR Description: protochlorophyllide reductase precursor
  misc_feature (1)..(276): Homolog of NCBI NO: 21068893 NR Description: NADPH:protochlorophyllide oxidoreductase
  misc_feature (1)..(276): Homolog of NCBI NO: 968975 NR Description: NADPH:protochlorophyllide oxidoreductase A
  misc_feature (1)..(276): Homolog of NCBI NO: 15239574 NR Description: NADPH:protochlorophyllide oxidoreductase A
MALQAATSFLPSALSARKEGSVKDSASFLGVRLAADGLKLDTTALGLRTVRVSRSADIRAQTAAVSSPSVTPASPSGKKTLRKGTAVITGASSGLGLATAKALAETGKWHVIMACRDFLKASRAAKAAGMDKDSFTVVHLDLASLDSVRQFVRNVRQLEMPIDVVVCNAAVYQPTAKEPSYTADGFEMSVGVNHLGHFLLARELLSDLQSSDYPSKRLIIVGSITGNTNTLAGNVPPKANLGDLRGLAGGLNGVGSSVMIDGGEFDGAKAYKDSKVWQHADDAGVPPPVPRGDGRDLRVALPGLHRHHGPVPRAHPAVPPALPPVPEVHHQGVRLRGGGREAAGAGGERPQPDQVRRVLELEQELRVLREPAL

SEQ ID NO: 2835 - protein, 266 aa, Zea mays subsp. mays
  peptide (1)..(266): Ceres Seq. ID no. 12372920
NSRGAAPRFRIPPRRGEEEEPSQILSPQAVRLLAARAVHSPPRQSLAFAARHGAPGGDVLPPLCPLRAQGGVGEGLGVVLGCSSRGGWPQAGHHRSGPTHREGEQVGGHPRADGSGVLPVSDPRVAVWQEDPPQGHGGHHRRVVRPRPRHGEGPGGDRQVARHHGLPRLPQGVARGQGGRHGQGQLHRRAPGPRLPGQRPPVRQERAPAGDAHRRGGLQRRRVPAHRQGAVLHRRRLRDERRRQPPRPLPPRARAPQRPPVLRLPL

SEQ ID NO: 2836 - DNA, 1574 bp, Zea mays subsp. mays
  misc_feature (1)..(1574): Ceres Seq. ID no. 12362111
  misc_feature: MA Experiment ID: 108535 Result: Down-regulated in Transcription
  misc_feature: MA Experiment 108535 PARAMETER Experiment Name: Zm_Meristem_P Parameter: Age (day) Value: 8
  misc_feature: MA Experiment 108535 PARAMETER Experiment Name: Zm_Meristem_P Parameter: Organism Value: Zea mays
  misc_feature: MA Experiment 108535 PARAMETER Experiment Name: Zm_Meristem_P Parameter: Plant Line Value: 35A19
  misc_feature: MA Experiment 108535 PARAMETER Experiment Name: Zm_Meristem_P Parameter: Tissue Value: Root Meristem vs. Above Root Meristem
  misc_feature: MA Experiment ID: 108689 Result: Down-regulated in Transcription
  misc_feature: MA Experiment 108689 PARAMETER Experiment Name: Zm_Drought_Roots_P Parameter: Age (day) Value: 9
  misc_feature: MA Experiment 108689 PARAMETER Experiment Name: Zm_Drought_Roots_P Parameter: Organism Value: Zea mays
  misc_feature: MA Experiment 108689 PARAMETER Experiment Name: Zm_Drought_Roots_P Parameter: Plant Line Value: 35A19
  misc_feature: MA Experiment 108689 PARAMETER Experiment Name: Zm_Drought_Roots_P Parameter: Timepoint (hr) Value: 24
  misc_feature: MA Experiment 108689 PARAMETER Experiment Name: Zm_Drought_Roots_P Parameter: Tissue Value: Roots
  misc_feature: MA Experiment 108689 PARAMETER Experiment Name: Zm_Drought_Roots_P Parameter: Treatment Value: Drought vs. No Drought
gtcgatggaggaacaacacatggctgggccgccgtaccgctaccggcttcggcatctccggctgatggacatagcacccgcaagcgcgagcaacgacgattcagggcatcacggctccaacgggatggccatcatggtgtcgatcctggtggtggtcatcgtctgcaccctcttctactgcgtctactgctggagatggaggaagcgcaacgctgtcaggagagcgcagatagagaggctgaggccgatgtccagctcggacctgccgctcatggacctgtcctccatccacgaggccaccaacagcttctccaaggagaacaagctcggcgaaggcggtttcgggcccgtctatcggggcgtgatgggcggcggcgcggagatcgccgtgaagcggctgtcggctcggtcgcggcagggcgcggcggagttccgcaacgaggtggagctgatcgccaagctgcagcaccggaacctggtccgcctgctgggatgctgcgtcgagagggacgagaagatgctcgtctacgagtacctccccaaccgaagcctcgactccttcctcttcgatagcaggaagagcgggcagctggactggaagacgaggcagagcatcgtcctggggatcgcccgcggcatgctgtacctgcacgaggactcgtgcctcaaggtcatccacagggacctcaaggccagcaacgtgctcctggacaacaggatgaaccctaagatctccgacttcggcatggccaagatcttcgaggaggagggcaacgagcctaacacgggccccgtggtcggcacctacgggtacatggctccggagtacgccatggagggcgtcttctcggtgaagtcagacgtcttcagcttcggggtgctggtgctagagatcctcagcgggcagcggaacggctccatgtacctccaggagcaccagcacaccctgattcaagatgcctggaagctgtggaacgaggacagggcggcggagttcatggacgcggcgctggcggggtcgtacccgcgggacgaggcgtggcggtgcttccacgtggggctgctgtgcgtgcaggagagcccggacctccggcccaccatgtccagcgtggtgctcatgctcatcagcgaccagacggcgcagcagatgccggcgccggcgcagccgccgctgttcgccagcaggctcggcaggaaggcgtccgcgtcggacttgtcgctggccatgaagacggagacgaccaagacgcagtccgtcaacgaggtgtccatctccatgatggagccacggtgagacgaggggggccttgcttgatcgtcaaccaacaagtgtccgtctccgtcccatccgcatgagaaacccttactcggggagccgtcgtgatttgcttggttctttgatcagcaacgggatacgctgtgcgtcgtcgtagtcggtgcgcgcgtgtatgtgtgtgatggttacggatgtcttgcgagccgtaatcgcgctgggaaagtcccaggccccagcctttgtcgcgggaaaaatcttgtagccgtgacatgtgcagcgagaaaaacgctttgagact

SEQ ID NO: 2837 - protein, 430 aa, Zea mays subsp. mays
  peptide (1)..(430): Ceres Seq. ID no. 12362112
  misc_feature (83)..(430): Homolog of NCBI NO: 7488195 NR Description: probable serine/threonine-specific protein kinase
  misc_feature (25)..(430): Homolog of NCBI NO: 34898856 NR Description: OJ1058_A12.26 [Oryza sativa (japonica
  misc_feature (41)..(430): Homolog of NCBI NO: 15237047 NR Description: putative receptor protein kinase; protein id:
  misc_feature (81)..(427): Homolog of NCBI NO: 7434416 NR Description: serine/threonine kinase (EC 2.7.1.-) BRLK - wild
  misc_feature (81)..(427): Homolog of NCBI NO: 15234429 NR Description: serine/threonine kinase - like protein; protein
  misc_feature (74)..(430): Homolog of NCBI NO: 34898618 NR Description: putative S-receptor kinase
  misc_feature (40)..(430): Homolog of NCBI NO: 13506745 NR Description: receptor-like protein kinase 4 [Arabidopsis
  misc_feature (32)..(430): Homolog of NCBI NO: 38344785 NR Description: OSJNBa0043L09.5 [Oryza sativa (japonica
  misc_feature (26)..(430): Homolog of NCBI NO: 30686087 NR Description: serine/threonine kinase -related protein
  misc_feature (26)..(430): Homolog of NCBI NO: 24417476 NR Description: unknown [Arabidopsis thaliana]
SMEEQHMAGPPYRYRLRHLRLMDIAPASASNDDSGHHGSNGMAIMVSILVVVIVCTLFYCVYCWRWRKRNAVRRAQIERLRPMSSSDLPLMDLSSIHEATNSFSKENKLGEGGFGPVYRGVMGGGAEIAVKRLSARSRQGAAEFRNEVELIAKLQHRNLVRLLGCCVERDEKMLVYEYLPNRSLDSFLFDSRKSGQLDWKTRQSIVLGIARGMLYLHEDSCLKVIHRDLKASNVLLDNRMNPKISDFGMAKIFEEEGNEPNTGPVVGTYGYMAPEYAMEGVFSVKSDVFSFGVLVLEILSGQRNGSMYLQEHQHTLIQDAWKLWNEDRAAEFMDAALAGSYPRDEAWRCFHVGLLCVQESPDLRPTMSSVVLMLISDQTAQQMPAPAQPPLFASRLGRKASASDLSLAMKTETTKTQSVNEVSISMMEPR

SEQ ID NO: 2838 - protein, 429 aa, Zea mays subsp. mays
  peptide (1)..(429): Ceres Seq. ID no. 12362113
  misc_feature (82)..(429): Homolog of NCBI NO: 7488195 NR Description: probable serine/threonine-specific protein kinase
  misc_feature (24)..(429): Homolog of NCBI NO: 34898856 NR Description: OJ1058_A12.26 [Oryza sativa (japonica
  misc_feature (40)..(429): Homolog of NCBI NO: 15237047 NR Description: putative receptor protein kinase; protein id:
  misc_feature (80)..(426): Homolog of NCBI NO: 7434416 NR Description: serine/threonine kinase (EC 2.7.1.-) BRLK - wild
  misc_feature (80)..(426): Homolog of NCBI NO: 15234429 NR Description: serine/threonine kinase - like protein; protein
  misc_feature (73)..(429): Homolog of NCBI NO: 34898618 NR Description: putative S-receptor kinase
  misc_feature (39)..(429): Homolog of NCBI NO: 13506745 NR Description: receptor-like protein kinase 4 [Arabidopsis
  misc_feature (31)..(429): Homolog of NCBI NO: 38344785 NR Description: OSJNBa0043L09.5 [Oryza sativa (japonica
  misc_feature (25)..(429): Homolog of NCBI NO: 30686087 NR Description: serine/threonine kinase -related protein
  misc_feature (25)..(429): Homolog of NCBI NO: 24417476 NR Description: unknown [Arabidopsis thaliana]
MEEQHMAGPPYRYRLRHLRLMDIAPASASNDDSGHHGSNGMAIMVSILVVVIVCTLFYCVYCWRWRKRNAVRRAQIERLRPMSSSDLPLMDLSSIHEATNSFSKENKLGEGGFGPVYRGVMGGGAEIAVKRLSARSRQGAAEFRNEVELIAKLQHRNLVRLLGCCVERDEKMLVYEYLPNRSLDSFLFDSRKSGQLDWKTRQSIVLGIARGMLYLHEDSCLKVIHRDLKASNVLLDNRMNPKISDFGMAKIFEEEGNEPNTGPVVGTYGYMAPEYAMEGVFSVKSDVFSFGVLVLEILSGQRNGSMYLQEHQHTLIQDAWKLWNEDRAAEFMDAALAGSYPRDEAWRCFHVGLLCVQESPDLRPTMSSVVLMLISDQTAQQMPAPAQPPLFASRLGRKASASDLSLAMKTETTKTQSVNEVSISMMEPR

SEQ ID NO: 2839 - protein, 424 aa, Zea mays subsp. mays
  peptide (1)..(424): Ceres Seq. ID no. 12362114
  misc_feature (77)..(424): Homolog of NCBI NO: 7488195 NR Description: probable serine/threonine-specific protein kinase
  misc_feature (19)..(424): Homolog of NCBI NO: 34898856 NR Description: OJ1058_A12.26 [Oryza sativa (japonica
  misc_feature (35)..(424): Homolog of NCBI NO: 15237047 NR Description: putative receptor protein kinase; protein id:
  misc_feature (75)..(421): Homolog of NCBI NO: 7434416 NR Description: serine/threonine kinase (EC 2.7.1.-) BRLK - wild
  misc_feature (75)..(421): Homolog of NCBI NO: 15234429 NR Description: serine/threonine kinase - like protein; protein
  misc_feature (68)..(424): Homolog of NCBI NO: 34898618 NR Description: putative S-receptor kinase
  misc_feature (34)..(424): Homolog of NCBI NO: 13506745 NR Description: receptor-like protein kinase 4 [Arabidopsis
  misc_feature (26)..(424): Homolog of NCBI NO: 38344785 NR Description: OSJNBa0043L09.5 [Oryza sativa (japonica
  misc_feature (20)..(424): Homolog of NCBI NO: 30686087 NR Description: serine/threonine kinase -related protein
  misc_feature (20)..(424): Homolog of NCBI NO: 24417476 NR Description: unknown [Arabidopsis thaliana]
MAGPPYRYRLRHLRLMDIAPASASNDDSGHHGSNGMAIMVSILVVVIVCTLFYCVYCWRWRKRNAVRRAQIERLRPMSSSDLPLMDLSSIHEATNSFSKENKLGEGGFGPVYRGVMGGGAEIAVKRLSARSRQGAAEFRNEVELIAKLQHRNLVRLLGCCVERDEKMLVYEYLPNRSLDSFLFDSRKSGQLDWKTRQSIVLGIARGMLYLHEDSCLKVIHRDLKASNVLLDNRMNPKISDFGMAKIFEEEGNEPNTGPVVGTYGYMAPEYAMEGVFSVKSDVFSFGVLVLEILSGQRNGSMYLQEHQHTLIQDAWKLWNEDRAAEFMDAALAGSYPRDEAWRCFHVGLLCVQESPDLRPTMSSVVLMLISDQTAQQMPAPAQPPLFASRLGRKASASDLSLAMKTETTKTQSVNEVSISMMEPR

SEQ ID NO: 2840 - DNA, 1432 bp, Zea mays subsp. mays
  misc_feature (1)..(1432): Ceres Seq. ID no. 12387277
  misc_feature: MA Experiment ID: 108523 Result: Down-regulated in Transcription
  misc_feature: MA Experiment 108523 PARAMETER Experiment Name: Zm_42deg_Heat_P Parameter: Age (day) Value: 8
  misc_feature: MA Experiment 108523 PARAMETER Experiment Name: Zm_42deg_Heat_P Parameter: Organism Value: Zea mays
  misc_feature: MA Experiment 108523 PARAMETER Experiment Name: Zm_42deg_Heat_P Parameter: Plant Line Value: 35A19
  misc_feature: MA Experiment 108523 PARAMETER Experiment Name: Zm_42deg_Heat_P Parameter: Temperature (deg C) Value: 42 vs. 22
  misc_feature: MA Experiment 108523 PARAMETER Experiment Name: Zm_42deg_Heat_P Parameter: Timepoint (hr) Value: 6
  misc_feature: MA Experiment 108523 PARAMETER Experiment Name: Zm_42deg_Heat_P Parameter: Tissue Value: Aerial
  misc_feature: MA Experiment ID: 108529 Result: Down-regulated in Transcription
  misc_feature: MA Experiment 108529 PARAMETER Experiment Name: Zm_Imbibed_Seeds_P Parameter: Age (day) Value: 5 vs. 2
  misc_feature: MA Experiment 108529 PARAMETER Experiment Name: Zm_Imbibed_Seeds_P Parameter: Organism Value: Zea mays
  misc_feature: MA Experiment 108529 PARAMETER Experiment Name: Zm_Imbibed_Seeds_P Parameter: Plant Line Value: 35A19
  misc_feature: MA Experiment 108529 PARAMETER Experiment Name: Zm_Imbibed_Seeds_P Parameter: Tissue Value: Roots vs. Embryo
  misc_feature: MA Experiment ID: 108543 Result: Up-regulated in Transcription
  misc_feature: MA Experiment ID: 108546 Result: Down-regulated in Transcription
  misc_feature: MA Experiment 108546 PARAMETER Experiment Name: Zm_Imbibed_Seeds_P Parameter: Age (day) Value: 3 vs. 2
  misc_feature: MA Experiment 108546 PARAMETER Experiment Name: Zm_Imbibed_Seeds_P Parameter: Organism Value: Zea mays
  misc_feature: MA Experiment 108546 PARAMETER Experiment Name: Zm_Imbibed_Seeds_P Parameter: Plant Line Value: 35A19
  misc_feature: MA Experiment 108546 PARAMETER Experiment Name: Zm_Imbibed_Seeds_P Parameter: Tissue Value: Roots vs. Embryo
  misc_feature: MA Experiment ID: 108687 Result: Down-regulated in Transcription
  misc_feature: MA Experiment 108687 PARAMETER Experiment Name: Zm_Embryos-Flowers__P Parameter: Tissue Value: Embryo vs. Aerial+
  misc_feature: MA Experiment ID: 20000477 Result: Down-regulated in Transcription
  misc_feature: MA Experiment 20000477 PARAMETER Experiment Name: Zm_5mM_SA_P Parameter: Age (day) Value: 10
  misc_feature: MA Experiment 20000477 PARAMETER Experiment Name: Zm_5mM_SA_P Parameter: Organism Value: Zea mays
  misc_feature: MA Experiment 20000477 PARAMETER Experiment Name: Zm_5mM_SA_P Parameter: Plant Line Value: 35A19
  misc_feature: MA Experiment 20000477 PARAMETER Experiment Name: Zm_5mM_SA_P Parameter: Timepoint (hr) Value: 48
  misc_feature: MA Experiment 20000477 PARAMETER Experiment Name: Zm_5mM_SA_P Parameter: Tissue Value: Aerial
  misc_feature: MA Experiment 20000477 PARAMETER Experiment Name: Zm_5mM_SA_P Parameter: Treatment Value: 5mM SA vs. No Treatment
  misc_feature: MA Experiment ID: 20000478 Result: Down-regulated in Transcription
  misc_feature: MA Experiment 20000478 PARAMETER Experiment Name: Zm_5mM_SA_P Parameter: Age (day) Value: 11
  misc_feature: MA Experiment 20000478 PARAMETER Experiment Name: Zm_5mM_SA_P Parameter: Organism Value: Zea mays
  misc_feature: MA Experiment 20000478 PARAMETER Experiment Name: Zm_5mM_SA_P Parameter: Plant Line Value: 35A19
  misc_feature: MA Experiment 20000478 PARAMETER Experiment Name: Zm_5mM_SA_P Parameter: Timepoint (hr) Value: 72
  misc_feature: MA Experiment 20000478 PARAMETER Experiment Name: Zm_5mM_SA_P Parameter: Tissue Value: Aerial
  misc_feature: MA Experiment 20000478 PARAMETER Experiment Name: Zm_5mM_SA_P Parameter: Treatment Value: 5mM SA vs. No Treatment
  misc_feature: MA Experiment ID: 20000479 Result: Down-regulated in Transcription
  misc_feature: MA Experiment 20000479 PARAMETER Experiment Name: Zm_Drought_P Parameter: Age (day) Value: 10
  misc_feature: MA Experiment 20000479 PARAMETER Experiment Name: Zm_Drought_P Parameter: Organism Value: Zea mays
  misc_feature: MA Experiment 20000479 PARAMETER Experiment Name: Zm_Drought_P Parameter: Plant Line Value: 35A19
  misc_feature: MA Experiment 20000479 PARAMETER Experiment Name: Zm_Drought_P Parameter: Timepoint (hr) Value: 48
  misc_feature: MA Experiment 20000479 PARAMETER Experiment Name: Zm_Drought_P Parameter: Tissue Value: Aerial
  misc_feature: MA Experiment 20000479 PARAMETER Experiment Name: Zm_Drought_P Parameter: Treatment Value: Drought vs. No Drought
  misc_feature: MA Experiment ID: 20000480 Result: Down-regulated in Transcription
  misc_feature: MA Experiment 20000480 PARAMETER Experiment Name: Zm_Drought_P Parameter: Age (day) Value: 11
  misc_feature: MA Experiment 20000480 PARAMETER Experiment Name: Zm_Drought_P Parameter: Organism Value: Zea mays
  misc_feature: MA Experiment 20000480 PARAMETER Experiment Name: Zm_Drought_P Parameter: Plant Line Value: 35A19
  misc_feature: MA Experiment 20000480 PARAMETER Experiment Name: Zm_Drought_P Parameter: Timepoint (hr) Value: 72
  misc_feature: MA Experiment 20000480 PARAMETER Experiment Name: Zm_Drought_P Parameter: Tissue Value: Aerial
  misc_feature: MA Experiment 20000480 PARAMETER Experiment Name: Zm_Drought_P Parameter: Treatment Value: Drought vs. No Drought
  misc_feature: MA Experiment ID: 20000533 Result: Down-regulated in Transcription
  misc_feature: MA Experiment 20000533 PARAMETER Experiment Name: Zm_0.001percent_MeJA_P Parameter: Age (day) Value: 11
  misc_feature: MA Experiment 20000533 PARAMETER Experiment Name: Zm_0.001percent_MeJA_P Parameter: Organism Value: Zea mays
  misc_feature: MA Experiment 20000533 PARAMETER Experiment Name: Zm_0.001percent_MeJA_P Parameter: Plant Line Value: 35A19
  misc_feature: MA Experiment 20000533 PARAMETER Experiment Name: Zm_0.001percent_MeJA_P Parameter: Timepoint (hr) Value: 72
  misc_feature: MA Experiment 20000533 PARAMETER Experiment Name: Zm_0.001percent_MeJA_P Parameter: Tissue Value: Aerial
  misc_feature: MA Experiment 20000533 PARAMETER Experiment Name: Zm_0.001percent_MeJA_P Parameter: Treatment Value: 0.001percent MeJA vs. No Treatment
  misc_feature: MA Experiment ID: 20000535 Result: Down-regulated in Transcription
  misc_feature: MA Experiment 20000535 PARAMETER Experiment Name: Zm_Hybrid_Seed_Dev_P Parameter: DAP Value: 30 vs. 12
  misc_feature: MA Experiment 20000535 PARAMETER Experiment Name: Zm_Hybrid_Seed_Dev_P Parameter: Organism Value: Zea mays
  misc_feature: MA Experiment 20000535 PARAMETER Experiment Name: Zm_Hybrid_Seed_Dev_P Parameter: Plant Line Value: 35A19
  misc_feature: MA Experiment 20000535 PARAMETER Experiment Name: Zm_Hybrid_Seed_Dev_P Parameter: Tissue Value: Embryo vs. Unfert Floret
  misc_feature: MA Experiment ID: 20000626 Result: Down-regulated in Transcription
  misc_feature: MA Experiment 20000626 PARAMETER Experiment Name: Zm_Herbicide-Treatments_P Parameter: Timepoint (hr) Value: 12
  misc_feature: MA Experiment 20000626 PARAMETER Experiment Name: Zm_Herbicide-Treatments_P Parameter: Tissue Value: Aerial
  misc_feature: MA Experiment 20000626 PARAMETER Experiment Name: Zm_Herbicide-Treatments_P Parameter: Treatment Value: Roundup vs. No Treatment
actctcacagccacgccacgccacgagagaagaatgccgccgacgctgggcctgctcctcgcggcggcggcggcggtcctgctgctgctgctgccgccgccaccatcgacgggggcgcaggagacgtgctggtcggggccggcgccgcggcgcggggcgtggatgtccgtggccagcttcggggcgcgcggggacgggcagacgctcaacacgggcgcgttcgcgcgcgccgtggcgcgcatcgcgcgtcgccggggcgcgcggggcggcacgctgctgtacgtgccgcccggggtgtggctcacgggccccttcaacctcacctcccacatgacgctcttcctcgcccgcggcgccatcgtccgcgccacccaggacacgtcgagctggccgctcatcgacccgctgccgtcgtacgggagagggcgcgagctgcctggcgggagatacatgagcttgatccacggccacggtctgcaggacgtcttcatcacaggtgagaacggcaccatcgacggccaaggcggcgtgtggtgggacatgtggaagaagcgcacgctgcccttcacgaggccgcacctgctggagctcatgtactccaccgacgtcgtcgtctccaacctcgtcttccaggactcgccgttctggaacatccacccggtttactgcagcaacgtagtgatagcaaacctgactgtgttggcgccgcacgactcccccaacaccgacgggatcgatctagattcaagcagcaacgtgtgcgtcgaggactgctacatctccgccggcgacgacctgatttccatcaagagcgggtgggacgagtacggcgtggccttcggccgcccaagctccggcatcacggtccggaggataaccgggtcgggcccgttcgccggcttcgcggtcgggagcgagacctcgggcggcgtggaggacgtcgtggccgagcacctgagcttctccggcgtgggcgtcggggtccacgtgaagaccaactcgggcaggggcggcttcatccggaacgtcaccgtctcccaggtgaccctggacggcgcccgctacggcctgaggatcgccggcgacgtcgggggccaccccggcgcgtcctacaacgcgagcctgctccccgtcgtcgacggcgtggcggtcaggaacgtctggggccggaacgtccggcaggccgggctcatacggggcatcagggactcggtcttcagtaacatttgcctctccaacgtgaagctctatggcattggcagcgactccatcgggccgtggagatgccgagccgtcagtggcagcgcactcgacgtgcaaccgtcgccatgtgcggagctggctagtacgtccgggacaggtttctgtacctgaatcagtttttccgcctcctatagcagcaataaagacgtcagcatttctcaaaaaacag

SEQ ID NO: 2841 - protein, 457 aa, Zea mays subsp. mays
  peptide (1)..(457): Ceres Seq. ID no. 12387278
  misc_feature (169)..(444): Pfam Name: Glycosyl hydrolases family 28 Pfam Description: Glycosyl hydrolases family 28
  misc_feature (56)..(453): Homolog of NCBI NO: 30692538 NR Description: polygalacturonase-like protein [Fragaria x
  misc_feature (18)..(456): Homolog of NCBI NO: 34897760 NR Description: ESTs AU029388(E30287),D49277(S16474) correspond a region of the predicted gene.~Similar to Arabidopsis thaliana
  misc_feature (55)..(447): Homolog of NCBI NO: 11263971 NR Description: hypothetical protein T17J13.70 - Arabidopsis
  misc_feature (88)..(454): Homolog of NCBI NO: 34393209 NR Description: putative polygalacturonase
  misc_feature (47)..(453): Homolog of NCBI NO: 22329119 NR Description: polygalacturonase, putative; protein id:
  misc_feature (55)..(447): Homolog of NCBI NO: 18412253 NR Description: polygalacturonase, putative
  misc_feature (55)..(456): Homolog of NCBI NO: 40714685 NR Description: putative polygalacturonase
  misc_feature (26)..(454): Homolog of NCBI NO: 15238207 NR Description: polygalacturonase, putative; protein id:
  misc_feature (36)..(457): Homolog of NCBI NO: 15236625 NR Description: polygalacturonase, putative
  misc_feature (18)..(457): Homolog of NCBI NO: 34912726 NR Description: putative polygalacturonase
TLTATPRHERRMPPTLGLLLAAAAAVLLLLLPPPPSTGAQETCWSGPAPRRGAWMSVASFGARGDGQTLNTGAFARAVARIARRRGARGGTLLYVPPGVWLTGPFNLTSHMTLFLARGAIVRATQDTSSWPLIDPLPSYGRGRELPGGRYMSLIHGHGLQDVFITGENGTIDGQGGVWWDMWKKRTLPFTRPHLLELMYSTDVVVSNLVFQDSPFWNIHPVYCSNVVIANLTVLAPHDSPNTDGIDLDSSSNVCVEDCYISAGDDLISIKSGWDEYGVAFGRPSSGITVRRITGSGPFAGFAVGSETSGGVEDVVAEHLSFSGVGVGVHVKTNSGRGGFIRNVTVSQVTLDGARYGLRIAGDVGGHPGASYNASLLPVVDGVAVRNVWGRNVRQAGLIRGIRDSVFSNICLSNVKLYGIGSDSIGPWRCRAVSGSALDVQPSPCAELASTSGTGFCT

SEQ ID NO: 2842 - protein, 446 aa, Zea mays subsp. mays
  peptide (1)..(446): Ceres Seq. ID no. 12387279
  misc_feature (158)..(433): Pfam Name: Glycosyl hydrolases family 28 Pfam Description: Glycosyl hydrolases family 28
  misc_feature (45)..(442): Homolog of NCBI NO: 30692538 NR Description: polygalacturonase-like protein [Fragaria x
  misc_feature (7)..(445): Homolog of NCBI NO: 34897760 NR Description: ESTs AU029388(E30287),D49277(S16474) correspond a region of the predicted gene.~Similar to Arabidopsis thaliana
  misc_feature (44)..(436): Homolog of NCBI NO: 11263971 NR Description: hypothetical protein T17J13.70 - Arabidopsis
  misc_feature (77)..(443): Homolog of NCBI NO: 34393209 NR Description: putative polygalacturonase
  misc_feature (36)..(442): Homolog of NCBI NO: 22329119 NR Description: polygalacturonase, putative; protein id:
  misc_feature (44)..(436): Homolog of NCBI NO: 18412253 NR Description: polygalacturonase, putative
  misc_feature (44)..(445): Homolog of NCBI NO: 40714685 NR Description: putative polygalacturonase
  misc_feature (15)..(443): Homolog of NCBI NO: 15238207 NR Description: polygalacturonase, putative; protein id:
  misc_feature (25)..(446): Homolog of NCBI NO: 15236625 NR Description: polygalacturonase, putative
  misc_feature (7)..(446): Homolog of NCBI NO: 34912726 NR Description: putative polygalacturonase
MPPTLGLLLAAAAAVLLLLLPPPPSTGAQETCWSGPAPRRGAWMSVASFGARGDGQTLNTGAFARAVARIARRRGARGGTLLYVPPGVWLTGPFNLTSHMTLFLARGAIVRATQDTSSWPLIDPLPSYGRGRELPGGRYMSLIHGHGLQDVFITGENGTIDGQGGVWWDMWKKRTLPFTRPHLLELMYSTDVVVSNLVFQDSPFWNIHPVYCSNVVIANLTVLAPHDSPNTDGIDLDSSSNVCVEDCYISAGDDLISIKSGWDEYGVAFGRPSSGITVRRITGSGPFAGFAVGSETSGGVEDVVAEHLSFSGVGVGVHVKTNSGRGGFIRNVTVSQVTLDGARYGLRIAGDVGGHPGASYNASLLPVVDGVAVRNVWGRNVRQAGLIRGIRDSVFSNICLSNVKLYGIGSDSIGPWRCRAVSGSALDVQPSPCAELASTSGTGFCT

SEQ ID NO: 2843 - protein, 403 aa, Zea mays subsp. mays
  peptide (1)..(403): Ceres Seq. ID no. 12387280
  misc_feature (115)..(390): Pfam Name: Glycosyl hydrolases family 28 Pfam Description: Glycosyl hydrolases family 28
  misc_feature (2)..(399): Homolog of NCBI NO: 30692538 NR Description: polygalacturonase-like protein [Fragaria x
  misc_feature (1)..(402): Homolog of NCBI NO: 34897760 NR Description: ESTs AU029388(E30287),D49277(S16474) correspond a region of the predicted gene.~Similar to Arabidopsis thaliana
  misc_feature (1)..(393): Homolog of NCBI NO: 11263971 NR Description: hypothetical protein T17J13.70 - Arabidopsis
  misc_feature (34)..(400): Homolog of NCBI NO: 34393209 NR Description: putative polygalacturonase
  misc_feature (1)..(399): Homolog of NCBI NO: 22329119 NR Description: polygalacturonase, putative; protein id:
  misc_feature (1)..(393): Homolog of NCBI NO: 18412253 NR Description: polygalacturonase, putative
  misc_feature (1)..(402): Homolog of NCBI NO: 40714685 NR Description: putative polygalacturonase
  misc_feature (1)..(400): Homolog of NCBI NO: 15238207 NR Description: polygalacturonase, putative; protein id:
  misc_feature (1)..(403): Homolog of NCBI NO: 15236625 NR Description: polygalacturonase, putative
  misc_feature (1)..(403): Homolog of NCBI NO: 34912726 NR Description: putative polygalacturonase
MSVASFGARGDGQTLNTGAFARAVARIARRRGARGGTLLYVPPGVWLTGPFNLTSHMTLFLARGAIVRATQDTSSWPLIDPLPSYGRGRELPGGRYMSLIHGHGLQDVFITGENGTIDGQGGVWWDMWKKRTLPFTRPHLLELMYSTDVVVSNLVFQDSPFWNIHPVYCSNVVIANLTVLAPHDSPNTDGIDLDSSSNVCVEDCYISAGDDLISIKSGWDEYGVAFGRPSSGITVRRITGSGPFAGFAVGSETSGGVEDVVAEHLSFSGVGVGVHVKTNSGRGGFIRNVTVSQVTLDGARYGLRIAGDVGGHPGASYNASLLPVVDGVAVRNVWGRNVRQAGLIRGIRDSVFSNICLSNVKLYGIGSDSIGPWRCRAVSGSALDVQPSPCAELASTSGTGFCT

SEQ ID NO: 2844 - DNA, 1398 bp, Zea mays subsp. mays
  misc_feature (1)..(1398): Ceres Seq. ID no. 13498659
  misc_feature: MA Experiment ID: 20000480 Result: Up-regulated in Transcription
  misc_feature: MA Experiment 20000480 PARAMETER Experiment Name: Zm_Drought_P Parameter: Age (day) Value: 11
  misc_feature: MA Experiment 20000480 PARAMETER Experiment Name: Zm_Drought_P Parameter: Organism Value: Zea mays
  misc_feature: MA Experiment 20000480 PARAMETER Experiment Name: Zm_Drought_P Parameter: Plant Line Value: 35A19
  misc_feature: MA Experiment 20000480 PARAMETER Experiment Name: Zm_Drought_P Parameter: Timepoint (hr) Value: 72
  misc_feature: MA Experiment 20000480 PARAMETER Experiment Name: Zm_Drought_P Parameter: Tissue Value: Aerial
  misc_feature: MA Experiment 20000480 PARAMETER Experiment Name: Zm_Drought_P Parameter: Treatment Value: Drought vs. No Drought
  misc_feature: MA Experiment ID: 20000534 Result: Down-regulated in Transcription
  misc_feature: MA Experiment 20000534 PARAMETER Experiment Name: Zm_Hybrid_Pollen_P Parameter: Age (day) Value: 8
  misc_feature: MA Experiment 20000534 PARAMETER Experiment Name: Zm_Hybrid_Pollen_P Parameter: Organism Value: Zea mays
  misc_feature: MA Experiment 20000534 PARAMETER Experiment Name: Zm_Hybrid_Pollen_P Parameter: Plant Line Value: 35A19
  misc_feature: MA Experiment 20000534 PARAMETER Experiment Name: Zm_Hybrid_Pollen_P Parameter: Tissue Value: Pollen vs. Aerial
actttcgcccatttcatttcaaaccaaaaccctctctccccttgccttccacggttccaccacaccccggatcaaatcgccacagaaaattcccagaaaaataacaagcacttgttcatcatcaaagtaaacgcggcagaaccctagcgagccgttcctccaacgactcacctcccacccactcacccaccccatggcgaccaacccctccaacggcgccggcgccgacgtccctgcaagccccggcggcggtgcggctctcggttgcggcgcaggcggccgcgatccagccctcgtccccgcgcttcttcttctcctcgcttgccgggaccaacccggcctccccgcaccgtcgcatcgccatcgccgttgatctctccgacgagtccgccttcgcagtcaagtgggccgtgcagaactacgtccgccccggggacgccgtcgtgctgctccacgtgcgccccacctccgtcctctacggcgccgactgggggttccatcccggtctccgtcgctgacgaggacgacgctgccgaggacgccgccgccgccgccgagggcgatccctcggaggaggagctgcagaagaaacgggaggaggactacgacgccttcacctccaccaaggcgcaggacctcgcgcaaccgctggtcgacgcccagatccccttcaagatccacgtcgtcaaggaccacgacatgaaggagcgcctctgcctcgaggctgagcgccttggcctctccgccatgatcatggggagccgcggtttcggggcctcccggaaaggcagcaaggggcggcttgggagtgttagtgattactgcgtacaccactgtgtatgccctgttgtggttgttcgctaccctgatgatgctgcagatgcccggtggagatgcatcaggggtgacagatgagttgcacactgtaccagaggacgaacctgtttatcacgatgcacctgaggtgcagaaagaaaactgaggcaacggccacatgcagctgaagaacgaaggaaaacacgaggcttatagtgaggcaatcctgtgtatctggaagatgggaccggatgtttatctttgcttctatatatcaactgcgtatcatgatcagctgtctgcttcccgttgagtttcatatcggcgtcgtagatcatctgagttttttgttggtttgcttgtgagatgtagagtactcttcccgtgggtcgaaggtgtcttgcagatgcttgagctttatgttgtcgaacggtagttatctacacggtatcatctgctctgttaagcctgtttagtgtttactgtattggatactcgttaatagagaaccgctacttttcagtatttattatcacctgtatattggataaaattattgcttagcttatgcttgcatgctcc

SEQ ID NO: 2845 - protein, 71 aa, Zea mays subsp. mays
  peptide (1)..(71): Ceres Seq. ID no. 13498660
  misc_feature (1)..(54): Pfam Name: Universal stress protein family Pfam Description: Universal stress protein family
  misc_feature (1)..(54): Pfam Name: Universal stress protein family Pfam Description: Universal stress protein family
  misc_feature (1)..(58): Homolog of NCBI NO: 18416966 NR Description: expressed protein [Arabidopsis thaliana]
  misc_feature (1)..(58): Homolog of NCBI NO: 7486798 NR Description: hypothetical protein M4I22.130 - Arabidopsis
  misc_feature (1)..(58): Homolog of NCBI NO: 25402657 NR Description: protein T23J18.3 [imported] - Arabidopsis
  misc_feature (1)..(58): Homolog of NCBI NO: 30682187 NR Description: expressed protein [Arabidopsis thaliana]
  misc_feature (1)..(58): Homolog of NCBI NO: 8885586 NR Description: gene_id:F24B18.5~pir||T05756~similar to unknown
  misc_feature (1)..(57): Homolog of NCBI NO: 15232490 NR Description: CHP-rich zinc finger protein, putative
  misc_feature (1)..(58): Homolog of NCBI NO: 8885586 NR Description: gene_id:F24B18.5~pir||T05756~similar to unknown
  misc_feature (1)..(58): Homolog of NCBI NO: 7486798 NR Description: hypothetical protein M4I22.130 - Arabidopsis
  misc_feature (1)..(62): Homolog of NCBI NO: 34910112 NR Description: B1100D10.31 [Oryza sativa (japonica
  misc_feature (1)..(58): Homolog of NCBI NO: 28971968 NR Description: OSJNBb0041B22.10 [Oryza sativa (japonica
  misc_feature (1)..(58): Homolog of NCBI NO: 33146953 NR Description: CHP-rich zinc finger protein-like
  misc_feature (1)..(58): Homolog of NCBI NO: 30682187 NR Description: expressed protein [Arabidopsis thaliana]
  misc_feature (1)..(58): Homolog of NCBI NO: 25402657 NR Description: protein T23J18.3 [imported] - Arabidopsis
  misc_feature (1)..(58): Homolog of NCBI NO: 18416966 NR Description: expressed protein [Arabidopsis thaliana]
  misc_feature (1)..(58): Homolog of NCBI NO: 18423628 NR Description: expressed protein [Arabidopsis thaliana]
  misc_feature (1)..(57): Homolog of NCBI NO: 15232490 NR Description: CHP-rich zinc finger protein, putative
  misc_feature (1)..(58): Homolog of NCBI NO: 18423628 NR Description: expressed protein [Arabidopsis thaliana]
  misc_feature (1)..(58): Homolog of NCBI NO: 33146953 NR Description: CHP-rich zinc finger protein-like
  misc_feature (1)..(58): Homolog of NCBI NO: 28971968 NR Description: OSJNBb0041B22.10 [Oryza sativa (japonica
  misc_feature (1)..(62): Homolog of NCBI NO: 34910112 NR Description: B1100D10.31 [Oryza sativa (japonica
MKERLCLEAERLGLSAMIMGSRGFGASRKGSKGRLGSVSDYCVHHCVCPVVVVRYPDDAADARWRCIRGDR

SEQ ID NO: 2846 - protein, 59 aa, Zea mays subsp. mays
  peptide (1)..(59): Ceres Seq. ID no. 13498661
MATNPSNGAGADVPASPGGGAALGCGAGGRDPALVPALLLLLACRDQPGLPAPSHRHRR

SEQ ID NO: 2847 - protein, 55 aa, Zea mays subsp. mays
  peptide (1)..(55): Ceres Seq. ID no. 13498662
  misc_feature (1)..(41): Homolog of NCBI NO: 15232490 NR Description: CHP-rich zinc finger protein, putative
  misc_feature (1)..(42): Homolog of NCBI NO: 18423628 NR Description: expressed protein [Arabidopsis thaliana]
  misc_feature (1)..(42): Homolog of NCBI NO: 8885586 NR Description: gene_id:F24B18.5~pir||T05756~similar to unknown
  misc_feature (1)..(42): Homolog of NCBI NO: 18416966 NR Description: expressed protein [Arabidopsis thaliana]
  misc_feature (1)..(42): Homolog of NCBI NO: 7486798 NR Description: hypothetical protein M4I22.130 - Arabidopsis
  misc_feature (1)..(42): Homolog of NCBI NO: 25402657 NR Description: protein T23J18.3 [imported] - Arabidopsis
  misc_feature (1)..(42): Homolog of NCBI NO: 30682187 NR Description: expressed protein [Arabidopsis thaliana]
  misc_feature (1)..(42): Homolog of NCBI NO: 33146953 NR Description: CHP-rich zinc finger protein-like
  misc_feature (1)..(42): Homolog of NCBI NO: 28971968 NR Description: OSJNBb0041B22.10 [Oryza sativa (japonica
  misc_feature (1)..(46): Homolog of NCBI NO: 34910112 NR Description: B1100D10.31 [Oryza sativa (japonica
  misc_feature (1)..(41): Homolog of NCBI NO: 15232490 NR Description: CHP-rich zinc finger protein, putative
  misc_feature (1)..(42): Homolog of NCBI NO: 18423628 NR Description: expressed protein [Arabidopsis thaliana]
  misc_feature (1)..(42): Homolog of NCBI NO: 8885586 NR Description: gene_id:F24B18.5~pir||T05756~similar to unknown
  misc_feature (1)..(42): Homolog of NCBI NO: 18416966 NR Description: expressed protein [Arabidopsis thaliana]
  misc_feature (1)..(42): Homolog of NCBI NO: 7486798 NR Description: hypothetical protein M4I22.130 - Arabidopsis
  misc_feature (1)..(42): Homolog of NCBI NO: 25402657 NR Description: protein T23J18.3 [imported] - Arabidopsis
  misc_feature (1)..(42): Homolog of NCBI NO: 30682187 NR Description: expressed protein [Arabidopsis thaliana]
  misc_feature (1)..(42): Homolog of NCBI NO: 33146953 NR Description: CHP-rich zinc finger protein-like
  misc_feature (1)..(42): Homolog of NCBI NO: 28971968 NR Description: OSJNBb0041B22.10 [Oryza sativa (japonica
  misc_feature (1)..(46): Homolog of NCBI NO: 34910112 NR Description: B1100D10.31 [Oryza sativa (japonica
MIMGSRGFGASRKGSKGRLGSVSDYCVHHCVCPVVVVRYPDDAADARWRCIRGDR

SEQ ID NO: 2848 - DNA, 886 bp, Zea mays subsp. mays
  misc_feature (1)..(886): Ceres Seq. ID no. 12386765
  misc_feature: MA Experiment ID: 108523 Result: Down-regulated in Transcription
  misc_feature: MA Experiment 108523 PARAMETER Experiment Name: Zm_42deg_Heat_P Parameter: Age (day) Value: 8
  misc_feature: MA Experiment 108523 PARAMETER Experiment Name: Zm_42deg_Heat_P Parameter: Organism Value: Zea mays
  misc_feature: MA Experiment 108523 PARAMETER Experiment Name: Zm_42deg_Heat_P Parameter: Plant Line Value: 35A19
  misc_feature: MA Experiment 108523 PARAMETER Experiment Name: Zm_42deg_Heat_P Parameter: Temperature (deg C) Value: 42 vs. 22
  misc_feature: MA Experiment 108523 PARAMETER Experiment Name: Zm_42deg_Heat_P Parameter: Timepoint (hr) Value: 6
  misc_feature: MA Experiment 108523 PARAMETER Experiment Name: Zm_42deg_Heat_P Parameter: Tissue Value: Aerial
  misc_feature: MA Experiment ID: 108527 Result: Up-regulated in Transcription
  misc_feature: MA Experiment 108527 PARAMETER Experiment Name: Zm_5mM_NO_P Parameter: Age (day) Value: 8
  misc_feature: MA Experiment 108527 PARAMETER Experiment Name: Zm_5mM_NO_P Parameter: Organism Value: Zea mays
  misc_feature: MA Experiment 108527 PARAMETER Experiment Name: Zm_5mM_NO_P Parameter: Plant Line Value: 35A19
  misc_feature: MA Experiment 108527 PARAMETER Experiment Name: Zm_5mM_NO_P Parameter: Timepoint (hr) Value: 6
  misc_feature: MA Experiment 108527 PARAMETER Experiment Name: Zm_5mM_NO_P Parameter: Tissue Value: Aerial
  misc_feature: MA Experiment 108527 PARAMETER Experiment Name: Zm_5mM_NO_P Parameter: Treatment Value: 5mM NO vs. No Treatment
  misc_feature: MA Experiment ID: 108534 Result: Up-regulated in Transcription
  misc_feature: MA Experiment 108534 PARAMETER Experiment Name: Zm_4deg_Cold_P Parameter: Age (hr) Value: 8
  misc_feature: MA Experiment 108534 PARAMETER Experiment Name: Zm_4deg_Cold_P Parameter: Organism Value: Zea mays
  misc_feature: MA Experiment 108534 PARAMETER Experiment Name: Zm_4deg_Cold_P Parameter: Plant Line Value: 35A19
  misc_feature: MA Experiment 108534 PARAMETER Experiment Name: Zm_4deg_Cold_P Parameter: Temperature (deg C) Value: 4 vs. 22
  misc_feature: MA Experiment 108534 PARAMETER Experiment Name: Zm_4deg_Cold_P Parameter: Timepoint (hr) Value: 6
  misc_feature: MA Experiment 108534 PARAMETER Experiment Name: Zm_4deg_Cold_P Parameter: Tissue Value: Aerial
  misc_feature: MA Experiment ID: 108535 Result: Up-regulated in Transcription
  misc_feature: MA Experiment 108535 PARAMETER Experiment Name: Zm_Meristem_P Parameter: Age (day) Value: 8
  misc_feature: MA Experiment 108535 PARAMETER Experiment Name: Zm_Meristem_P Parameter: Organism Value: Zea mays
  misc_feature: MA Experiment 108535 PARAMETER Experiment Name: Zm_Meristem_P Parameter: Plant Line Value: 35A19
  misc_feature: MA Experiment 108535 PARAMETER Experiment Name: Zm_Meristem_P Parameter: Tissue Value: Root Meristem vs. Above Root Meristem
  misc_feature: MA Experiment ID: 108543 Result: Up-regulated in Transcription
  misc_feature: MA Experiment ID: 108559 Result: Up-regulated in Transcription
  misc_feature: MA Experiment 108559 PARAMETER Experiment Name: Zm_5mM_NO_P Parameter: Age (day) Value: 8
  misc_feature: MA Experiment 108559 PARAMETER Experiment Name: Zm_5mM_NO_P Parameter: Organism Value: Zea mays
  misc_feature: MA Experiment 108559 PARAMETER Experiment Name: Zm_5mM_NO_P Parameter: Plant Line Value: 35A19
  misc_feature: MA Experiment 108559 PARAMETER Experiment Name: Zm_5mM_NO_P Parameter: Timepoint (hr) Value: 12
  misc_feature: MA Experiment 108559 PARAMETER Experiment Name: Zm_5mM_NO_P Parameter: Tissue Value: Aerial
  misc_feature: MA Experiment 108559 PARAMETER Experiment Name: Zm_5mM_NO_P Parameter: Treatment Value: 5mM NO vs. No Treatment
  misc_feature: MA Experiment ID: 108689 Result: Up-regulated in Transcription
  misc_feature: MA Experiment 108689 PARAMETER Experiment Name: Zm_Drought_Roots_P Parameter: Age (day) Value: 9
  misc_feature: MA Experiment 108689 PARAMETER Experiment Name: Zm_Drought_Roots_P Parameter: Organism Value: Zea mays
  misc_feature: MA Experiment 108689 PARAMETER Experiment Name: Zm_Drought_Roots_P Parameter: Plant Line Value: 35A19
  misc_feature: MA Experiment 108689 PARAMETER Experiment Name: Zm_Drought_Roots_P Parameter: Timepoint (hr) Value: 24
  misc_feature: MA Experiment 108689 PARAMETER Experiment Name: Zm_Drought_Roots_P Parameter: Tissue Value: Roots
  misc_feature: MA Experiment 108689 PARAMETER Experiment Name: Zm_Drought_Roots_P Parameter: Treatment Value: Drought vs. No Drought
  misc_feature: MA Experiment ID: 20000488 Result: Down-regulated in Transcription
  misc_feature: MA Experiment 20000488 PARAMETER Experiment Name: Zm_50mM_NH4NO3_L_to_H_P Parameter: Organism Value: Zea mays
  misc_feature: MA Experiment 20000488 PARAMETER Experiment Name: Zm_50mM_NH4NO3_L_to_H_P Parameter: Timepoint (hr) Value: 8
  misc_feature: MA Experiment 20000488 PARAMETER Experiment Name: Zm_50mM_NH4NO3_L_to_H_P Parameter: Tissue Value: Leaves
  misc_feature: MA Experiment 20000488 PARAMETER Experiment Name: Zm_50mM_NH4NO3_L_to_H_P Parameter: Treatment Value: 50mM NH4NO3 vs. 100mM Mannitol
tttctatggaggaacaagaggatctctggtggggtgctcgcaggcgcaactgccttctggctgctgtttgaggtcatggattaccacctcctcaccctgctatgccactgcctcatcctcaccctggccatcctgttcctctggtccaatgccacgactttcatcaacaagtctcctcctaacatccccgaggtgaagatcccagatgacctggctgtgaatgttgcacgttccctgagatatgagatcaacaggggttttgctaccttgagggagattggccaaggccatgacctcaagaaatttctgattgtgattgcaggactgtggatcctttctgttcttgggagctgctgcaatttcctcaccttgtcttacatagtttttatggtactgtacactgtaccggtcctgtatgagaaacatgaggataaggttgatgcttttggtgagaaggccatggtcgagctgaagaagtactacgccatcttcgacgagaaatgtctatcaaagattccgaagggcccattaaaagacaagaagcaacattagaagcgtagaatcagataagggtctgcggtgatttatcatctcttttgaccattactcgtcggttttggaggatggatgtgattccatgtctaaatacctggacgtgctctagtgttttagtgtggtcagtatcaatgttctaaattatctgagattacgctgaatcatgttctgaagtccacgtttaactttgctctccctatcctttggaagtggcaatttcctaaatgtctgtaatatatctagtctagtgctatttcttaatctgacctagcgtcatgatgaaccttcttggatatttatttatatgtgccaccggacatggtaactatag

SEQ ID NO: 2849 - protein, 183 aa, Zea mays subsp. mays
  peptide (1)..(183): Ceres Seq. ID no. 12386766
  misc_feature (2)..(181): Homolog of NCBI NO: 34899590 NR Description: hypothetical protein~similar to Oryza sativa
  misc_feature (2)..(182): Homolog of NCBI NO: 30681227 NR Description: expressed protein [Arabidopsis thaliana]
  misc_feature (2)..(182): Homolog of NCBI NO: 18398810 NR Description: expressed protein
  misc_feature (1)..(180): Homolog of NCBI NO: 18406991 NR Description: expressed protein
  misc_feature (1)..(175): Homolog of NCBI NO: 15222616 NR Description: hypothetical protein
  misc_feature (1)..(181): Homolog of NCBI NO: 15238125 NR Description: putative protein
  misc_feature (1)..(182): Homolog of NCBI NO: 15237093 NR Description: putative protein
  misc_feature (1)..(182): Homolog of NCBI NO: 15236556 NR Description: putative protein
  misc_feature (1)..(181): Homolog of NCBI NO: 34904202 NR Description: P0492F05.25 [Oryza sativa (japonica
  misc_feature (2)..(181): Homolog of NCBI NO: 34909318 NR Description: OSJNBb0021A09.5 [Oryza sativa (japonica
FLWRNKRISGGVLAGATAFWLLFEVMDYHLLTLLCHCLILTLAILFLWSNATTFINKSPPNIPEVKIPDDLAVNVARSLRYEINRGFATLREIGQGHDLKKFLIVIAGLWILSVLGSCCNFLTLSYIVFMVLYTVPVLYEKHEDKVDAFGEKAMVELKKYYAIFDEKCLSKIPKGPLKDKKQH

SEQ ID NO: 2850 - protein, 158 aa, Zea mays subsp. mays
  peptide (1)..(158): Ceres Seq. ID no. 12386767
  misc_feature (1)..(156): Homolog of NCBI NO: 34899590 NR Description: hypothetical protein~similar to Oryza sativa
  misc_feature (1)..(157): Homolog of NCBI NO: 30681227 NR Description: expressed protein [Arabidopsis thaliana]
  misc_feature (1)..(157): Homolog of NCBI NO: 18398810 NR Description: expressed protein
  misc_feature (1)..(155): Homolog of NCBI NO: 18406991 NR Description: expressed protein
  misc_feature (1)..(150): Homolog of NCBI NO: 15222616 NR Description: hypothetical protein
  misc_feature (1)..(156): Homolog of NCBI NO: 15238125 NR Description: putative protein
  misc_feature (1)..(157): Homolog of NCBI NO: 15237093 NR Description: putative protein
  misc_feature (1)..(157): Homolog of NCBI NO: 15236556 NR Description: putative protein
  misc_feature (1)..(156): Homolog of NCBI NO: 34904202 NR Description: P0492F05.25 [Oryza sativa (japonica
  misc_feature (1)..(156): Homolog of NCBI NO: 34909318 NR Description: OSJNBb0021A09.5 [Oryza sativa (japonica
MDYHLLTLLCHCLILTLAILFLWSNATTFINKSPPNIPEVKIPDDLAVNVARSLRYEINRGFATLREIGQGHDLKKFLIVIAGLWILSVLGSCCNFLTLSYIVFMVLYTVPVLYEKHEDKVDAFGEKAMVELKKYYAIFDEKCLSKIPKGPLKDKKQH

SEQ ID NO: 2851 - DNA, 1413 bp, Zea mays subsp. mays; identical to SEQ ID NO: 2169
  misc_feature (1)..(1413): Ceres Seq. ID no. 12410874
  misc_feature: MA Experiment ID: 108527 Result: Up-regulated in Transcription
  misc_feature: MA Experiment 108527 PARAMETER Experiment Name: Zm_5mM_NO_P Parameter: Age (day) Value: 8
  misc_feature: MA Experiment 108527 PARAMETER Experiment Name: Zm_5mM_NO_P Parameter: Organism Value: Zea mays
  misc_feature: MA Experiment 108527 PARAMETER Experiment Name: Zm_5mM_NO_P Parameter: Plant Line Value: 35A19
  misc_feature: MA Experiment 108527 PARAMETER Experiment Name: Zm_5mM_NO_P Parameter: Timepoint (hr) Value: 6
  misc_feature: MA Experiment 108527 PARAMETER Experiment Name: Zm_5mM_NO_P Parameter: Tissue Value: Aerial
  misc_feature: MA Experiment 108527 PARAMETER Experiment Name: Zm_5mM_NO_P Parameter: Treatment Value: 5mM NO vs. No Treatment
  misc_feature: MA Experiment ID: 108529 Result: Up-regulated in Transcription
  misc_feature: MA Experiment 108529 PARAMETER Experiment Name: Zm_Imbibed_Seeds_P Parameter: Age (day) Value: 5 vs. 2
  misc_feature: MA Experiment 108529 PARAMETER Experiment Name: Zm_Imbibed_Seeds_P Parameter: Organism Value: Zea mays
  misc_feature: MA Experiment 108529 PARAMETER Experiment Name: Zm_Imbibed_Seeds_P Parameter: Plant Line Value: 35A19
  misc_feature: MA Experiment 108529 PARAMETER Experiment Name: Zm_Imbibed_Seeds_P Parameter: Tissue Value: Roots vs. Embryo
  misc_feature: MA Experiment ID: 108536 Result: Up-regulated in Transcription
  misc_feature: MA Experiment 108536 PARAMETER Experiment Name: Zm_Meristem_P Parameter: Age (day) Value: 8
  misc_feature: MA Experiment 108536 PARAMETER Experiment Name: Zm_Meristem_P Parameter: Organism Value: Zea mays
  misc_feature: MA Experiment 108536 PARAMETER Experiment Name: Zm_Meristem_P Parameter: Plant Line Value: 35A19
  misc_feature: MA Experiment 108536 PARAMETER Experiment Name: Zm_Meristem_P Parameter: Tissue Value: Shoot Meristem vs. Above Shoot Meristem
  misc_feature: MA Experiment ID: 108544 Result: Up-regulated in Transcription
  misc_feature: MA Experiment ID: 108545 Result: Down-regulated in Transcription
  misc_feature: MA Experiment 108545 PARAMETER Experiment Name: Zm_Imbibed_Seeds_P Parameter: Age (day) Value: 3 vs. 2
  misc_feature: MA Experiment 108545 PARAMETER Experiment Name: Zm_Imbibed_Seeds_P Parameter: Organism Value: Zea mays
  misc_feature: MA Experiment 108545 PARAMETER Experiment Name: Zm_Imbibed_Seeds_P Parameter: Plant Line Value: 35A19
  misc_feature: MA Experiment 108545 PARAMETER Experiment Name: Zm_Imbibed_Seeds_P Parameter: Tissue Value: Aerial vs. Embryo
  misc_feature: MA Experiment ID: 108546 Result: Up-regulated in Transcription
  misc_feature: MA Experiment 108546 PARAMETER Experiment Name: Zm_Imbibed_Seeds_P Parameter: Age (day) Value: 3 vs. 2
  misc_feature: MA Experiment 108546 PARAMETER Experiment Name: Zm_Imbibed_Seeds_P Parameter: Organism Value: Zea mays
  misc_feature: MA Experiment 108546 PARAMETER Experiment Name: Zm_Imbibed_Seeds_P Parameter: Plant Line Value: 35A19
  misc_feature: MA Experiment 108546 PARAMETER Experiment Name: Zm_Imbibed_Seeds_P Parameter: Tissue Value: Roots vs. Embryo
  misc_feature: MA Experiment ID: 108547 Result: Down-regulated in Transcription
  misc_feature: MA Experiment 108547 PARAMETER Experiment Name: Zm_Imbibed_Seeds_P Parameter: Age (day) Value: 4 vs. 2
  misc_feature: MA Experiment 108547 PARAMETER Experiment Name: Zm_Imbibed_Seeds_P Parameter: Organism Value: Zea mays
  misc_feature: MA Experiment 108547 PARAMETER Experiment Name: Zm_Imbibed_Seeds_P Parameter: Plant Line Value: 35A19
  misc_feature: MA Experiment 108547 PARAMETER Experiment Name: Zm_Imbibed_Seeds_P Parameter: Tissue Value: Aerial vs. Embryo
  misc_feature: MA Experiment ID: 108559 Result: Up-regulated in Transcription
  misc_feature: MA Experiment 108559 PARAMETER Experiment Name: Zm_5mM_NO_P Parameter: Age (day) Value: 8
  misc_feature: MA Experiment 108559 PARAMETER Experiment Name: Zm_5mM_NO_P Parameter: Organism Value: Zea mays
  misc_feature: MA Experiment 108559 PARAMETER Experiment Name: Zm_5mM_NO_P Parameter: Plant Line Value: 35A19
  misc_feature: MA Experiment 108559 PARAMETER Experiment Name: Zm_5mM_NO_P Parameter: Timepoint (hr) Value: 12
  misc_feature: MA Experiment 108559 PARAMETER Experiment Name: Zm_5mM_NO_P Parameter: Tissue Value: Aerial
  misc_feature: MA Experiment 108559 PARAMETER Experiment Name: Zm_5mM_NO_P Parameter: Treatment Value: 5mM NO vs. No Treatment
  misc_feature: MA Experiment ID: 108688 Result: Down-regulated in Transcription
  misc_feature: MA Experiment 108688 PARAMETER Experiment Name: Zm_Embryos-Flowers__P Parameter: Tissue Value: Immature Flowers vs. Aerial+
  misc_feature: MA Experiment ID: 20000535 Result: Down-regulated in Transcription
  misc_feature: MA Experiment 20000535 PARAMETER Experiment Name: Zm_Hybrid_Seed_Dev_P Parameter: DAP Value: 30 vs. 12
  misc_feature: MA Experiment 20000535 PARAMETER Experiment Name: Zm_Hybrid_Seed_Dev_P Parameter: Organism Value: Zea mays
  misc_feature: MA Experiment 20000535 PARAMETER Experiment Name: Zm_Hybrid_Seed_Dev_P Parameter: Plant Line Value: 35A19
  misc_feature: MA Experiment 20000535 PARAMETER Experiment Name: Zm_Hybrid_Seed_Dev_P Parameter: Tissue Value: Embryo vs. Unfert Floret
  misc_feature: MA Experiment ID: 20001612 Result: Up-regulated in Transcription
  misc_feature: MA Experiment 20001612 PARAMETER Experiment Name: Zm_50ppm_KNO3_L-to-H_P Parameter: Age (day) Value: 19
  misc_feature: MA Experiment 20001612 PARAMETER Experiment Name: Zm_50ppm_KNO3_L-to-H_P Parameter: Organism Value: Zea mays
  misc_feature: MA Experiment 20001612 PARAMETER Experiment Name: Zm_50ppm_KNO3_L-to-H_P Parameter: Plant Line Value: 35A19
  misc_feature: MA Experiment 20001612 PARAMETER Experiment Name: Zm_50ppm_KNO3_L-to-H_P Parameter: Timepoint (hr) Value: 8
  misc_feature: MA Experiment 20001612 PARAMETER Experiment Name: Zm_50ppm_KNO3_L-to-H_P Parameter: Tissue Value: Roots
  misc_feature: MA Experiment 20001612 PARAMETER Experiment Name: Zm_50ppm_KNO3_L-to-H_P Parameter: Treatment Value: 50ppm KNO3 vs. 50ppm KCl

SEQ ID NO: 2852 - protein, 357 aa, Zea mays subsp. mays; identical to SEQ ID NO: 2170
  peptide (1)..(357): Ceres Seq. ID no. 12410875
  misc_feature (103)..(355): Pfam Name: Glutamine synthetase, catalytic domain Pfam Description: Glutamine synthetase, catalytic domain
  misc_feature (103)..(355): Pfam Name: Glutamine synthetase, catalytic domain Pfam Description: Glutamine synthetase, catalytic domain
  misc_feature (1)..(354): Homolog of NCBI NO: 121368 NR Description: Glutamine synthetase, cytosolic isozyme
  misc_feature (1)..(354): Homolog of NCBI NO: 13924490 NR Description: cytosolic glutamine synthetase [Populus x
  misc_feature (1)..(355): Homolog of NCBI NO: 1076474 NR Description: Gln 1.2 protein - radish
  misc_feature (1)..(357): Homolog of NCBI NO: 121332 NR Description: GLUTAMINE SYNTHETASE ROOT ISOZYME
  misc_feature (1)..(354): Homolog of NCBI NO: 121368 NR Description: Glutamine synthetase, cytosolic isozyme
  misc_feature (1)..(355): Homolog of NCBI NO: 1076474 NR Description: Gln 1.2 protein - radish
  misc_feature (1)..(357): Homolog of NCBI NO: 1169926 NR Description: GLUTAMINE SYNTHETASE ROOT ISOZYME 5
  misc_feature (1)..(357): Homolog of NCBI NO: 699623 NR Description: glutamine synthetase [Zea mays]
  misc_feature (1)..(357): Homolog of NCBI NO: 585201 NR Description: GLUTAMINE SYNTHETASE ROOT ISOZYME 1
  misc_feature (1)..(357): Homolog of NCBI NO: 699621 NR Description: glutamine synthetase [Zea mays]
  misc_feature (1)..(357): Homolog of NCBI NO: 121332 NR Description: GLUTAMINE SYNTHETASE ROOT ISOZYME
  misc_feature (1)..(354): Homolog of NCBI NO: 13924490 NR Description: cytosolic glutamine synthetase [Populus x
  misc_feature (1)..(357): Homolog of NCBI NO: 1169926 NR Description: GLUTAMINE SYNTHETASE ROOT ISOZYME 5
  misc_feature (1)..(357): Homolog of NCBI NO: 699621 NR Description: glutamine synthetase [Zea mays]
  misc_feature (1)..(357): Homolog of NCBI NO: 699623 NR Description: glutamine synthetase [Zea mays]
  misc_feature (1)..(357): Homolog of NCBI NO: 585201 NR Description: GLUTAMINE SYNTHETASE ROOT ISOZYME 1

SEQ ID NO: 2853 - protein, 267 aa, Zea mays subsp. mays; identical to SEQ ID NO: 2171
  peptide (1)..(267): Ceres Seq. ID no. 12410876
  misc_feature (13)..(265): Pfam Name: Glutamine synthetase, catalytic domain Pfam Description: Glutamine synthetase, catalytic domain
  misc_feature (13)..(265): Pfam Name: Glutamine synthetase, catalytic domain Pfam Description: Glutamine synthetase, catalytic domain
  misc_feature (1)..(264): Homolog of NCBI NO: 121368 NR Description: Glutamine synthetase, cytosolic isozyme
  misc_feature (1)..(264): Homolog of NCBI NO: 13924490 NR Description: cytosolic glutamine synthetase [Populus x
  misc_feature (1)..(265): Homolog of NCBI NO: 1076474 NR Description: Gln 1.2 protein - radish
  misc_feature (1)..(267): Homolog of NCBI NO: 121332 NR Description: GLUTAMINE SYNTHETASE ROOT ISOZYME
  misc_feature (1)..(264): Homolog of NCBI NO: 121368 NR Description: Glutamine synthetase, cytosolic isozyme
  misc_feature (1)..(265): Homolog of NCBI NO: 1076474 NR Description: Gln 1.2 protein - radish
  misc_feature (1)..(267): Homolog of NCBI NO: 1169926 NR Description: GLUTAMINE SYNTHETASE ROOT ISOZYME 5
  misc_feature (1)..(267): Homolog of NCBI NO: 699623 NR Description: glutamine synthetase [Zea mays]
  misc_feature (1)..(267): Homolog of NCBI NO: 585201 NR Description: GLUTAMINE SYNTHETASE ROOT ISOZYME 1
  misc_feature (1)..(267): Homolog of NCBI NO: 699621 NR Description: glutamine synthetase [Zea mays]
  misc_feature (1)..(267): Homolog of NCBI NO: 121332 NR Description: GLUTAMINE SYNTHETASE ROOT ISOZYME
  misc_feature (1)..(264): Homolog of NCBI NO: 13924490 NR Description: cytosolic glutamine synthetase [Populus x
  misc_feature (1)..(267): Homolog of NCBI NO: 1169926 NR Description: GLUTAMINE SYNTHETASE ROOT ISOZYME 5
  misc_feature (1)..(267): Homolog of NCBI NO: 699621 NR Description: glutamine synthetase [Zea mays]
  misc_feature (1)..(267): Homolog of NCBI NO: 699623 NR Description: glutamine synthetase [Zea mays]
  misc_feature (1)..(267): Homolog of NCBI NO: 585201 NR Description: GLUTAMINE SYNTHETASE ROOT ISOZYME 1

SEQ ID NO: 2854 - DNA, 1408 bp, Zea mays subsp. mays
  misc_feature (1)..(1408): Ceres Seq. ID no. 12406456
  misc_feature: MA Experiment ID: 108504 Result: Down-regulated in Transcription
  misc_feature: MA Experiment 108504 PARAMETER Experiment Name: Zm_Drought_P Parameter: Age (day) Value: 8
  misc_feature: MA Experiment 108504 PARAMETER Experiment Name: Zm_Drought_P Parameter: Organism Value: Zea mays
  misc_feature: MA Experiment 108504 PARAMETER Experiment Name: Zm_Drought_P Parameter: Plant Line Value: 35A19
  misc_feature: MA Experiment 108504 PARAMETER Experiment Name: Zm_Drought_P Parameter: Timepoint (hr) Value: 12
  misc_feature: MA Experiment 108504 PARAMETER Experiment Name: Zm_Drought_P Parameter: Tissue Value: Aerial
  misc_feature: MA Experiment 108504 PARAMETER Experiment Name: Zm_Drought_P Parameter: Treatment Value: Drought vs. No Drought
  misc_feature: MA Experiment ID: 108528 Result: Down-regulated in Transcription
  misc_feature: MA Experiment 108528 PARAMETER Experiment Name: Zm_Imbibed_Seeds_P Parameter: Age (day) Value: 5 vs. 2
  misc_feature: MA Experiment 108528 PARAMETER Experiment Name: Zm_Imbibed_Seeds_P Parameter: Organism Value: Zea mays
  misc_feature: MA Experiment 108528 PARAMETER Experiment Name: Zm_Imbibed_Seeds_P Parameter: Plant Line Value: 35A19
  misc_feature: MA Experiment 108528 PARAMETER Experiment Name: Zm_Imbibed_Seeds_P Parameter: Tissue Value: Aerial vs. Embryo
  misc_feature: MA Experiment ID: 108529 Result: Down-regulated in Transcription
  misc_feature: MA Experiment 108529 PARAMETER Experiment Name: Zm_Imbibed_Seeds_P Parameter: Age (day) Value: 5 vs. 2
  misc_feature: MA Experiment 108529 PARAMETER Experiment Name: Zm_Imbibed_Seeds_P Parameter: Organism Value: Zea mays
  misc_feature: MA Experiment 108529 PARAMETER Experiment Name: Zm_Imbibed_Seeds_P Parameter: Plant Line Value: 35A19
  misc_feature: MA Experiment 108529 PARAMETER Experiment Name: Zm_Imbibed_Seeds_P Parameter: Tissue Value: Roots vs. Embryo
  misc_feature: MA Experiment ID: 108530 Result: Down-regulated in Transcription
  misc_feature: MA Experiment 108530 PARAMETER Experiment Name: Zm_Imbibed_Seeds_P Parameter: Age (day) Value: 6 vs. 2
  misc_feature: MA Experiment 108530 PARAMETER Experiment Name: Zm_Imbibed_Seeds_P Parameter: Organism Value: Zea mays
  misc_feature: MA Experiment 108530 PARAMETER Experiment Name: Zm_Imbibed_Seeds_P Parameter: Plant Line Value: 35A19
  misc_feature: MA Experiment 108530 PARAMETER Experiment Name: Zm_Imbibed_Seeds_P Parameter: Tissue Value: Aerial vs. Embryo
  misc_feature: MA Experiment ID: 108545 Result: Down-regulated in Transcription
  misc_feature: MA Experiment 108545 PARAMETER Experiment Name: Zm_Imbibed_Seeds_P Parameter: Age (day) Value: 3 vs. 2
  misc_feature: MA Experiment 108545 PARAMETER Experiment Name: Zm_Imbibed_Seeds_P Parameter: Organism Value: Zea mays
  misc_feature: MA Experiment 108545 PARAMETER Experiment Name: Zm_Imbibed_Seeds_P Parameter: Plant Line Value: 35A19
  misc_feature: MA Experiment 108545 PARAMETER Experiment Name: Zm_Imbibed_Seeds_P Parameter: Tissue Value: Aerial vs. Embryo
  misc_feature: MA Experiment ID: 108547 Result: Down-regulated in Transcription
  misc_feature: MA Experiment 108547 PARAMETER Experiment Name: Zm_Imbibed_Seeds_P Parameter: Age (day) Value: 4 vs. 2
  misc_feature: MA Experiment 108547 PARAMETER Experiment Name: Zm_Imbibed_Seeds_P Parameter: Organism Value: Zea mays
  misc_feature: MA Experiment 108547 PARAMETER Experiment Name: Zm_Imbibed_Seeds_P Parameter: Plant Line Value: 35A19
  misc_feature: MA Experiment 108547 PARAMETER Experiment Name: Zm_Imbibed_Seeds_P Parameter: Tissue Value: Aerial vs. Embryo
  misc_feature: MA Experiment ID: 108597 Result: Down-regulated in Transcription
  misc_feature: MA Experiment 108597 PARAMETER Experiment Name: Zm_100uM_ABA_P Parameter: Age (day) Value: 9
  misc_feature: MA Experiment 108597 PARAMETER Experiment Name: Zm_100uM_ABA_P Parameter: Organism Value: Zea mays
  misc_feature: MA Experiment 108597 PARAMETER Experiment Name: Zm_100uM_ABA_P Parameter: Plant Line Value: 35A19
  misc_feature: MA Experiment 108597 PARAMETER Experiment Name: Zm_100uM_ABA_P Parameter: Timepoint (hr) Value: 24
  misc_feature: MA Experiment 108597 PARAMETER Experiment Name: Zm_100uM_ABA_P Parameter: Tissue Value: Aerial
  misc_feature: MA Experiment 108597 PARAMETER Experiment Name: Zm_100uM_ABA_P Parameter: Treatment Value: 100uM ABA vs. No Treatment
  misc_feature: MA Experiment ID: 108687 Result: Down-regulated in Transcription
  misc_feature: MA Experiment 108687 PARAMETER Experiment Name: Zm_Embryos-Flowers__P Parameter: Tissue Value: Embryo vs. Aerial+
  misc_feature: MA Experiment ID: 108689 Result: Down-regulated in Transcription
  misc_feature: MA Experiment 108689 PARAMETER Experiment Name: Zm_Drought_Roots_P Parameter: Age (day) Value: 9
  misc_feature: MA Experiment 108689 PARAMETER Experiment Name: Zm_Drought_Roots_P Parameter: Organism Value: Zea mays
  misc_feature: MA Experiment 108689 PARAMETER Experiment Name: Zm_Drought_Roots_P Parameter: Plant Line Value: 35A19
  misc_feature: MA Experiment 108689 PARAMETER Experiment Name: Zm_Drought_Roots_P Parameter: Timepoint (hr) Value: 24
  misc_feature: MA Experiment 108689 PARAMETER Experiment Name: Zm_Drought_Roots_P Parameter: Tissue Value: Roots
  misc_feature: MA Experiment 108689 PARAMETER Experiment Name: Zm_Drought_Roots_P Parameter: Treatment Value: Drought vs. No Drought
  misc_feature: MA Experiment ID: 20000477 Result: Down-regulated in Transcription
  misc_feature: MA Experiment 20000477 PARAMETER Experiment Name: Zm_5mM_SA_P Parameter: Age (day) Value: 10
  misc_feature: MA Experiment 20000477 PARAMETER Experiment Name: Zm_5mM_SA_P Parameter: Organism Value: Zea mays
  misc_feature: MA Experiment 20000477 PARAMETER Experiment Name: Zm_5mM_SA_P Parameter: Plant Line Value: 35A19
  misc_feature: MA Experiment 20000477 PARAMETER Experiment Name: Zm_5mM_SA_P Parameter: Timepoint (hr) Value: 48
  misc_feature: MA Experiment 20000477 PARAMETER Experiment Name: Zm_5mM_SA_P Parameter: Tissue Value: Aerial
  misc_feature: MA Experiment 20000477 PARAMETER Experiment Name: Zm_5mM_SA_P Parameter: Treatment Value: 5mM SA vs. No Treatment
  misc_feature: MA Experiment ID: 20000478 Result: Down-regulated in Transcription
  misc_feature: MA Experiment 20000478 PARAMETER Experiment Name: Zm_5mM_SA_P Parameter: Age (day) Value: 11
  misc_feature: MA Experiment 20000478 PARAMETER Experiment Name: Zm_5mM_SA_P Parameter: Organism Value: Zea mays
  misc_feature: MA Experiment 20000478 PARAMETER Experiment Name: Zm_5mM_SA_P Parameter: Plant Line Value: 35A19
  misc_feature: MA Experiment 20000478 PARAMETER Experiment Name: Zm_5mM_SA_P Parameter: Timepoint (hr) Value: 72
  misc_feature: MA Experiment 20000478 PARAMETER Experiment Name: Zm_5mM_SA_P Parameter: Tissue Value: Aerial
  misc_feature: MA Experiment 20000478 PARAMETER Experiment Name: Zm_5mM_SA_P Parameter: Treatment Value: 5mM SA vs. No Treatment
  misc_feature: MA Experiment ID: 20000480 Result: Down-regulated in Transcription
  misc_feature: MA Experiment 20000480 PARAMETER Experiment Name: Zm_Drought_P Parameter: Age (day) Value: 11
  misc_feature: MA Experiment 20000480 PARAMETER Experiment Name: Zm_Drought_P Parameter: Organism Value: Zea mays
  misc_feature: MA Experiment 20000480 PARAMETER Experiment Name: Zm_Drought_P Parameter: Plant Line Value: 35A19
  misc_feature: MA Experiment 20000480 PARAMETER Experiment Name: Zm_Drought_P Parameter: Timepoint (hr) Value: 72
  misc_feature: MA Experiment 20000480 PARAMETER Experiment Name: Zm_Drought_P Parameter: Tissue Value: Aerial
  misc_feature: MA Experiment 20000480 PARAMETER Experiment Name: Zm_Drought_P Parameter: Treatment Value: Drought vs. No Drought
  misc_feature: MA Experiment ID: 20000488 Result: Down-regulated in Transcription
  misc_feature: MA Experiment 20000488 PARAMETER Experiment Name: Zm_50mM_NH4NO3_L_to_H_P Parameter: Organism Value: Zea mays
  misc_feature: MA Experiment 20000488 PARAMETER Experiment Name: Zm_50mM_NH4NO3_L_to_H_P Parameter: Timepoint (hr) Value: 8
  misc_feature: MA Experiment 20000488 PARAMETER Experiment Name: Zm_50mM_NH4NO3_L_to_H_P Parameter: Tissue Value: Leaves
  misc_feature: MA Experiment 20000488 PARAMETER Experiment Name: Zm_50mM_NH4NO3_L_to_H_P Parameter: Treatment Value: 50mM NH4NO3 vs. 100mM Mannitol
  misc_feature: MA Experiment ID: 20000492 Result: Up-regulated in Transcription
  misc_feature: MA Experiment 20000492 PARAMETER Experiment Name: Zm_Hybrid_Seed_Dev_P Parameter: DAP Value: 12
  misc_feature: MA Experiment 20000492 PARAMETER Experiment Name: Zm_Hybrid_Seed_Dev_P Parameter: Organism Value: Zea mays
  misc_feature: MA Experiment 20000492 PARAMETER Experiment Name: Zm_Hybrid_Seed_Dev_P Parameter: Plant Line Value: 35A19
  misc_feature: MA Experiment 20000492 PARAMETER Experiment Name: Zm_Hybrid_Seed_Dev_P Parameter: Tissue Value: Fert Kernel vs. Unfert Floret
  misc_feature: MA Experiment ID: 20000629 Result: Up-regulated in Transcription
  misc_feature: MA Experiment 20000629 PARAMETER Experiment Name: Zm_Herbicide-Treatments_P Parameter: Timepoint (hr) Value: 12
  misc_feature: MA Experiment 20000629 PARAMETER Experiment Name: Zm_Herbicide-Treatments_P Parameter: Tissue Value: Aerial
  misc_feature: MA Experiment 20000629 PARAMETER Experiment Name: Zm_Herbicide-Treatments_P Parameter: Treatment Value: Trimec vs. No Treatment
gaagttctggacgggctcctgggcccgtactggaaggcggccgggctggcgttcaactgcactttcctgctcttcggcacggtcatccagctgatcgcctgcgcaagcaacatctactacatcaacgaccggctggacaagcggacgtggacgtacatcttcggcgcctgctgcgccaccaccgtcttcatcccctcgtaccacaactaccgcgtctggtccttcctcggcctcggcatgaccacctacaccgcctggtacctcaccatcgccgcggccgtccacggccaggtcccaggcgtcacccactctgggccccagcaagctcgtgccctacttcaccggcgccaccaacatcctctacaccttcggcggccacgcgatcactgtggagatcatgcacgcgatgtggaagcctcgcaagttcaagtacatctacctgctgggcgacgctgtacgtgttcacgctgacgcttccgtcggcggcggccatgtactgggcgttcggcgaccagctgctgacgcactccaacgccttctcgctgctgccgaggacgccgtggcgcgacgcggcggtggtgctgatgctggtccaccagttcatcaccttcggcttcgcgtgcacgccgctctacttcgtgtgggagaaggcggtggggatgcacgtcacccggagcgtcttcctccgcgcgctggtccgcctccccatcgtcgtccccgtctggttcctcgccatcatcttccccttcttcgggcccatcaactccgccgtcggcgcgctcctcgtcagcttcaccgtctacgtcatcccggccctcgcccacatgctcacgtaccgctccgcgtccgccagattgaacgcagcggagaagccgccgtccttcttgccgagctggtcggggatgttcgtgctgaacgcgttcgtggtggcgtggatgctggtggttggattcggcctcggcggctgggccagcgtcaccaacttcatcaagcagatcgatacgttcgggctcttcgccaagtgctaccagtgcccgacgaagccacaccccgggtcgccgctgccggcgccgccgcatcactgaagcagcgagcgagtgccaaaggctaacgaccgtaaaccgagacattcccgggtggtttcggtcgtcttgttatatgcagcctttctaggagtgtacaacacagcggagcagcttgtgagttcactgacccgagatacctagactggactcgcatgtgtcgcgtggctttgatacattagtgggcctcagtgtcacttcctttgtcttggttgtttgcacatggttgttttaggttgttcggttcatggtacgtgccatctagtacaagacttgatacaatgatacacagtggtgtctattcttatcttttgcatccttaatct

SEQ ID NO: 2855 - protein, 360 aa, Zea mays subsp. mays
  peptide (1)..(360): Ceres Seq. ID no. 12406457
  misc_feature (149)..(360): Homolog of NCBI NO: 6689614 NR Description: AUX1 protein [Zea mays]
  misc_feature (149)..(360): Homolog of NCBI NO: 5881784 NR Description: putative AUX1-like permease [Arabidopsis thaliana]
  misc_feature (148)..(359): Homolog of NCBI NO: 10800918 NR Description: putative AUX1-like permease [Medicago truncatula]
  misc_feature (149)..(357): Homolog of NCBI NO: 6650716 NR Description: AUX1-like protein [Populus tremula x Populus
  misc_feature (149)..(353): Homolog of NCBI NO: 21586468 NR Description: auxin influx carrier protein [Medicago truncatula]
  misc_feature (149)..(360): Homolog of NCBI NO: 18404642 NR Description: expressed protein
  misc_feature (149)..(359): Homolog of NCBI NO: 10800920 NR Description: putative AUX1-like permease [Medicago truncatula]
  misc_feature (149)..(360): Homolog of NCBI NO: 37651177 NR Description: AUX1-like auxin influx carrier protein [Pisum
  misc_feature (149)..(345): Homolog of NCBI NO: 10441742 NR Description: putative AUX1-like permease
  misc_feature (149)..(360): Homolog of NCBI NO: 15240927 NR Description: LAX1 / AUX1 -like permease; protein id:
SSGRAPGPVLEGGRAGVQLHFPALRHGHPADRLRKQHLLHQRPAGQADVDVHLRRLLRHHRLHPLVPQLPRLVLPRPRHDHLHRLVPHHRRGRPRPGPRRHPLWAPASSCPTSPAPPTSSTPSAATRSLWRSCTRCGSLASSSTSTCWATLYVFTLTLPSAAAMYWAFGDQLLTHSNAFSLLPRTPWRDAAVVLMLVHQFITFGFACTPLYFVWEKAVGMHVTRSVFLRALVRLPIVVPVWFLAIIFPFFGPINSAVGALLVSFTVYVIPALAHMLTYRSASARLNAAEKPPSFLPSWSGMFVLNAFVVAWMLVVGFGLGGWASVTNFIKQIDTFGLFAKCYQCPTKPHPGSPLPAPPHH

SEQ ID NO: 2856 - protein, 237 aa, Zea mays subsp. mays
  peptide (1)..(237): Ceres Seq. ID no. 12406458
  misc_feature (1)..(16): Homolog of NCBI NO: 6689614 NR Description: AUX1 protein [Zea mays]
  misc_feature (1)..(16): Homolog of NCBI NO: 5881784 NR Description: putative AUX1-like permease [Arabidopsis thaliana]
  misc_feature (1)..(14): Homolog of NCBI NO: 10800918 NR Description: putative AUX1-like permease [Medicago truncatula]
  misc_feature (1)..(16): Homolog of NCBI NO: 6650716 NR Description: AUX1-like protein [Populus tremula x Populus
  misc_feature (1)..(16): Homolog of NCBI NO: 21586468 NR Description: auxin influx carrier protein [Medicago truncatula]
  misc_feature (1)..(16): Homolog of NCBI NO: 18404642 NR Description: expressed protein
  misc_feature (1)..(16): Homolog of NCBI NO: 10800920 NR Description: putative AUX1-like permease [Medicago truncatula]
  misc_feature (1)..(16): Homolog of NCBI NO: 37651177 NR Description: AUX1-like auxin influx carrier protein [Pisum
  misc_feature (1)..(16): Homolog of NCBI NO: 10441742 NR Description: putative AUX1-like permease
  misc_feature (1)..(16): Homolog of NCBI NO: 15240927 NR Description: LAX1 / AUX1 -like permease; protein id:
MHAMWKPRKFKYIYLLGDAVRVHADASVGGGHVLGVRRPAADALQRLLAAAEDAVARRGGGADAGPPVHHLRLRVHAALLRVGEGGGDARHPERLPPRAGPPPHRRPRLVPRHHLPLLRAHQLRRRRAPRQLHRLRHPGPRPHAHVPLRVRQIERSGEAAVLLAELVGDVRAERVRGGVDAGGWIRPRRLGQRHQLHQADRYVRALRQVLPVPDEATPRVAAAGAAASLKQRASAKG

SEQ ID NO: 2857 - protein, 234 aa, Zea mays subsp. mays
  peptide (1)..(234): Ceres Seq. ID no. 12406459
  misc_feature (1)..(13): Homolog of NCBI NO: 6689614 NR Description: AUX1 protein [Zea mays]
  misc_feature (1)..(13): Homolog of NCBI NO: 5881784 NR Description: putative AUX1-like permease [Arabidopsis thaliana]
  misc_feature (1)..(11): Homolog of NCBI NO: 10800918 NR Description: putative AUX1-like permease [Medicago truncatula]
  misc_feature (1)..(13): Homolog of NCBI NO: 6650716 NR Description: AUX1-like protein [Populus tremula x Populus
  misc_feature (1)..(13): Homolog of NCBI NO: 21586468 NR Description: auxin influx carrier protein [Medicago truncatula]
  misc_feature (1)..(13): Homolog of NCBI NO: 18404642 NR Description: expressed protein
  misc_feature (1)..(13): Homolog of NCBI NO: 10800920 NR Description: putative AUX1-like permease [Medicago truncatula]
  misc_feature (1)..(13): Homolog of NCBI NO: 37651177 NR Description: AUX1-like auxin influx carrier protein [Pisum
  misc_feature (1)..(13): Homolog of NCBI NO: 10441742 NR Description: putative AUX1-like permease
  misc_feature (1)..(13): Homolog of NCBI NO: 15240927 NR Description: LAX1 / AUX1 -like permease; protein id:
MWKPRKFKYIYLLGDAVRVHADASVGGGHVLGVRRPAADALQRLLAAAEDAVARRGGGADAGPPVHHLRLRVHAALLRVGEGGGDARHPERLPPRAGPPPHRRPRLVPRHHLPLLRAHQLRRRRAPRQLHRLRHPGPRPHAHVPLRVRQIERSGEAAVLLAELVGDVRAERVRGGVDAGGWIRPRRLGQRHQLHQADRYVRALRQVLPVPDEATPRVAAAGAAASLKQRASAKG

SEQ ID NO: 2858 - DNA, 880 bp, Zea mays subsp. mays
  misc_feature (1)..(880): Ceres Seq. ID no. 12578653
  misc_feature: MA Experiment ID: 108522 Result: Up-regulated in Transcription
  misc_feature: MA Experiment 108522 PARAMETER Experiment Name: Zm_42deg_Heat_P Parameter: Age (day) Value: 8
  misc_feature: MA Experiment 108522 PARAMETER Experiment Name: Zm_42deg_Heat_P Parameter: Organism Value: Zea mays
  misc_feature: MA Experiment 108522 PARAMETER Experiment Name: Zm_42deg_Heat_P Parameter: Plant Line Value: 35A19
  misc_feature: MA Experiment 108522 PARAMETER Experiment Name: Zm_42deg_Heat_P Parameter: Temperature (deg C) Value: 42 vs. 22
  misc_feature: MA Experiment 108522 PARAMETER Experiment Name: Zm_42deg_Heat_P Parameter: Timepoint (hr) Value: 1
  misc_feature: MA Experiment 108522 PARAMETER Experiment Name: Zm_42deg_Heat_P Parameter: Tissue Value: Aerial
gttcggacttccgccgcgcttcgccctctcgctccagccgcttcacagcgccgccgctcgcctctccgaccgccgcgagaatgccgttcaagaggttcgtggagatcgggcgcgtggccctggtgaactacggcaaagactatggccgcctcgtcgtcatcgtctttgccgtagttcacctgggcacggacgaccactccctccacaacgccttcagcacctacggcgaggtcctcgagtccaagatcatcctcgatcgggagangcagaggtcccgcggcttcggcttcgtcaccttctccacggaggaggcgatgcggaacgcatcgagggcatgaacggcaaggagctggacggccgcaacatcaccgtcanngaggcccagtcccgcgncggccgtggaggcggcggcggcggcgggtacggtggtggccgtggaggcggcggctacggcggtggcgggccccgtgatggcggcggcggctacggcggtggcggcggctacggtggtggcggcggcggctacggtggtggtggcggcggctacggcggtggcaaccgtggcggcggctacggcaactccgacgggaactggaggaactgagcggtggggcccgcgcggccaagttatcctgttcgctaccgtgttgtttaccctagtccagagtgtttatcttcgttcgtctcgtgtttgttgttgcccatctgtgtttttgattgaaggtcgctctgtgtcagttgttagtgctgtgttcatcctcggctccagcagacccatgcatcaaccagcatggactgcggatcgatgggtgctgttacccccgtcaggctttattctaagttaaatcctaaggaaaaaaatggtgcttcttggtgctgc

SEQ ID NO: 2859 - protein, 200 aa, Zea mays subsp. mays
  peptide (1)..(200): Ceres Seq. ID no. 12578654
  misc_feature (63)..(200): Pfam Name: Herpesvirus latent membrane protein 1 (LMP1) Pfam Description: Herpesvirus latent membrane protein 1 (LMP1)
  misc_feature (105)..(200): Homolog of NCBI NO: 20257693 NR Description: glycine-rich RNA binding protein [Zea mays]
  misc_feature (105)..(200): Homolog of NCBI NO: 20257683 NR Description: glycine-rich RNA binding protein [Zea mays]
  misc_feature (105)..(200): Homolog of NCBI NO: 20257691 NR Description: glycine-rich RNA binding protein [Zea mays]
  misc_feature (105)..(200): Homolog of NCBI NO: 20257687 NR Description: glycine-rich RNA binding protein [Zea mays]
  misc_feature (105)..(200): Homolog of NCBI NO: 7439972 NR Description: glycine-rich RNA binding protein - maize
  misc_feature (109)..(200): Homolog of NCBI NO: 20257699 NR Description: glycine-rich RNA binding protein [Zea mays]
  misc_feature (105)..(200): Homolog of NCBI NO: 20257715 NR Description: glycine-rich RNA binding protein [Zea mays]
  misc_feature (105)..(200): Homolog of NCBI NO: 20257675 NR Description: glycine-rich RNA binding protein [Zea mays]
  misc_feature (109)..(200): Homolog of NCBI NO: 544421 NR Description: Glycine-rich RNA-binding protein 1
  misc_feature (108)..(200): Homolog of NCBI NO: 82696 NR Description: glycine-rich protein - maize
  misc_feature (88)..(88): Xaa is any aa, unknown or other
  misc_feature (125)..(125): Xaa is any aa, unknown or other
  misc_feature (131)..(131): Xaa is any aa, unknown or other
FGLPPRFALSLQPLHSAAARLSDRRENAVQEVRGDRARGPGELRQRLWPPRRHRLCRSSPGHGRPLPPQRLQHLRRGPRVQDHPRSGXAEVPRLRLRHLLHGGGDAERIEGMNGKELDGRNITVXEAQSRXGRGGGGGGGYGGGRGGGGYGGGGPRDGGGGYGGGGGYGGGGGGYGGGGGGYGGGNRGGGYGNSDGNWRN

SEQ ID NO: 2860 - protein, 124 aa, Zea mays subsp. mays
  peptide (1)..(124): Ceres Seq. ID no. 12578655
  misc_feature (1)..(62): Pfam Name: Equine herpesvirus glycoprotein gp2 Pfam Description: Equine herpesvirus glycoprotein gp2
  misc_feature (4)..(76): Homolog of NCBI NO: 18103931 NR Description: glycine rich RNA binding protein [Oryza sativa]
MAAAATAVAAATVVAAAATVVVAAATAVATVAAATATPTGTGGTERWGPRGQVILFATVLFTLVQSVYLRSSRVCCCPSVFLIEGRSVSVVSAVFILGSSRPMHQPAWTADRWVLLPPSGFILS

SEQ ID NO: 2861 - protein, 111 aa, Zea mays subsp. mays
  peptide (1)..(111): Ceres Seq. ID no. 12578656
  misc_feature (62)..(108): Homolog of NCBI NO: 20257715 NR Description: glycine-rich RNA binding protein [Zea mays]
  misc_feature (62)..(108): Homolog of NCBI NO: 7439972 NR Description: glycine-rich RNA binding protein - maize
  misc_feature (62)..(108): Homolog of NCBI NO: 20257699 NR Description: glycine-rich RNA binding protein [Zea mays]
  misc_feature (62)..(108): Homolog of NCBI NO: 20257693 NR Description: glycine-rich RNA binding protein [Zea mays]
  misc_feature (62)..(108): Homolog of NCBI NO: 20257687 NR Description: glycine-rich RNA binding protein [Zea mays]
  misc_feature (62)..(108): Homolog of NCBI NO: 20257683 NR Description: glycine-rich RNA binding protein [Zea mays]
  misc_feature (62)..(108): Homolog of NCBI NO: 20257691 NR Description: glycine-rich RNA binding protein [Zea mays]
  misc_feature (62)..(108): Homolog of NCBI NO: 20257675 NR Description: glycine-rich RNA binding protein [Zea mays]
  misc_feature (65)..(108): Homolog of NCBI NO: 544421 NR Description: Glycine-rich RNA-binding protein 1
  misc_feature (62)..(107): Homolog of NCBI NO: 82696 NR Description: glycine-rich protein - maize
  misc_feature (88)..(88): Xaa is any aa, unknown or other
SDFRRASPSRSSRFTAPPLASPTAARMPFKRFVEIGRVALVNYGKDYGRLVVIVFAVVHLGTDDHSLHNAFSTYGEVLESKIILDREXQRSRGFGFVTFSTEEAMRNASRA

SEQ ID NO: 2862 - DNA, 1805 bp, Zea mays subsp. mays
  misc_feature (1)..(1805): Ceres Seq. ID no. 13579576
  misc_feature: MA Experiment ID: 108523 Result: Down-regulated in Transcription
  misc_feature: MA Experiment 108523 PARAMETER Experiment Name: Zm_42deg_Heat_P Parameter: Age (day) Value: 8
  misc_feature: MA Experiment 108523 PARAMETER Experiment Name: Zm_42deg_Heat_P Parameter: Organism Value: Zea mays
  misc_feature: MA Experiment 108523 PARAMETER Experiment Name: Zm_42deg_Heat_P Parameter: Plant Line Value: 35A19
  misc_feature: MA Experiment 108523 PARAMETER Experiment Name: Zm_42deg_Heat_P Parameter: Temperature (deg C) Value: 42 vs. 22
  misc_feature: MA Experiment 108523 PARAMETER Experiment Name: Zm_42deg_Heat_P Parameter: Timepoint (hr) Value: 6
  misc_feature: MA Experiment 108523 PARAMETER Experiment Name: Zm_42deg_Heat_P Parameter: Tissue Value: Aerial
taatcgaaaaaattgggcacagaagaggagacagagagacggagaggggagacccggtcactgccaatgccaagaacaagaaaccagagaggacagtcgtcaatccaatccgagtctcctccaaaaacccatcaatctgcaggaacgagagcagcaggagagcatcctaggaaaaaagttaggaccaactgaccgagcaaaaaaggtagcatctctgtatcaccaaggcaccgccgatcacagaccaaatccctcccccctcctctggtccatcccacacgtagagcagccggtatttcttcgatccgtgcttgcgctttttttttctctttgtaaagatttcgtttccctcccttttaactgttgtcgagaagtttcgacaagagtggtgtgagtgttgaagagctcctcaacatgatggatccggccttgcttgacgacgtcatacgccggctgctggaggtgaagaatctcaagcctgggaagaacgcgcagttgtcggagtcggagatcaagcagctctgcgctgccgccaaggagatcttcctgcaccagcccaacctgctggagctcgaggcgcccatcaaaatctgcggtgatgtccatggccagtactctgatctcctgaggctattcgattatggtggctatccgcctcaggccaactaccttttcttgggtgattatgtggatcgtggaaagcaaagcttggaaacaatatgtcttcttttggcctacaaggtcaagtacccagagaacttctttcttctaaggggaaaccatgaatgcgcatcagtaaatcgcatctatggtttttatgacgagtgcaaacgcagattcagtgtaaagctgtggaaaacattcactgactgttttaactgcttgccagtgtcagcattgatagacgaaaagatcctctgtatgcatggtggtctatctccagagttgaacaagctcgaacaaatacttaatctgagtcgccccacagacgtgcctgatactggattgctctgtgaccttctttggtctgatccttctaatgaagcaacaggatgggccataaatgatcgaggtgtttcatatacatttggtcctgataaagtttctgaattccttgagaagcatgatttggacctcatctgccgagcccatcaggttgtcgaagatggatatgagtttttcgctagccgccaactcgtaacaatgttttcagcccctaactactgtggagaatttgataacgctggtgccatgatgagtgtagatgagacattgatgtgctccttccaaatactgaaacctgcgaggaaggtgttgggtggttcaactaataacaaatcaggcttcaagtcatcgagaggatggtgacaatggcaagcctgatatcaggttggttggtgagcagcacgccagtggtcgacggggggttgttccatcataatcatattacagcggctgcaactgacaggcccaatgcatcttctcttccatgttggatcaacactcttgtaatgtattatttactgtgcggatctgagaggatgtgaatgatttcatttgcgtcctcaagttcaaaagattcaggaaggcatgcttgaaataaaaatagccagaaacatgcaaggtgctccacgacgcagcacggcatttccagtgttttctttttgctgtctagttctgaatatattttaccgccagaccagcacgtaagcttgcctggcaatggtttttatttgttgctatgccatctcaaaagtcaaaaccatggatttatatcaaaagtcaaaagactttgagaagtattt

SEQ ID NO: 2863 - protein, 317 aa, Zea mays subsp. mays
  peptide (1)..(317): Ceres Seq. ID no. 13579577
  misc_feature (55)..(250): Pfam Name: Calcineurin-like phosphoesterase Pfam Description: Calcineurin-like phosphoesterase
  misc_feature (9)..(299): Homolog of NCBI NO: 7435132 NR Description: phosphoprotein phosphatase (EC 3.1.3.16) 1,
  misc_feature (2)..(299): Homolog of NCBI NO: 99751 NR Description: phosphoprotein phosphatase (EC 3.1.3.16) 1A
  misc_feature (2)..(310): Homolog of NCBI NO: 7435136 NR Description: phosphoprotein phosphatase (EC 3.1.3.16) 1a
  misc_feature (2)..(299): Homolog of NCBI NO: 15237829 NR Description: protein phosphatase 1A [Arabidopsis thaliana]
  misc_feature (2)..(299): Homolog of NCBI NO: 15225576 NR Description: phosphoprotein phosphatase type 1 catalytic
  misc_feature (2)..(299): Homolog of NCBI NO: 1346764 NR Description: SERINE/THREONINE PROTEIN PHOSPHATASE PP1
  misc_feature (2)..(299): Homolog of NCBI NO: 5917726 NR Description: serine/threonine protein phosphatase 1; PP1
  misc_feature (2)..(310): Homolog of NCBI NO: 7435129 NR Description: phosphoprotein phosphatase (EC 3.1.3.16),
  misc_feature (2)..(317): Homolog of NCBI NO: 14495346 NR Description: protein phosphatase [Oryza sativa]
  misc_feature (2)..(317): Homolog of NCBI NO: 130709 NR Description: SERINE/THREONINE PROTEIN PHOSPHATASE PP1
MMDPALLDDVIRRLLEVKNLKPGKNAQLSESEIKQLCAAAKEIFLHQPNLLELEAPIKICGDVHGQYSDLLRLFDYGGYPPQANYLFLGDYVDRGKQSLETICLLLAYKVKYPENFFLLRGNHECASVNRIYGFYDECKRRFSVKLWKTFTDCFNCLPVSALIDEKILCMHGGLSPELNKLEQILNLSRPTDVPDTGLLCDLLWSDPSNEATGWAINDRGVSYTFGPDKVSEFLEKHDLDLICRAHQVVEDGYEFFASRQLVTMFSAPNYCGEFDNAGAMMSVDETLMCSFQILKPARKVLGGSTNNKSGFKSSRGW

SEQ ID NO: 2864 - protein, 316 aa, Zea mays subsp. mays
  peptide (1)..(316): Ceres Seq. ID no. 13579578
  misc_feature (54)..(249): Pfam Name: Calcineurin-like phosphoesterase Pfam Description: Calcineurin-like phosphoesterase
  misc_feature (8)..(298): Homolog of NCBI NO: 7435132 NR Description: phosphoprotein phosphatase (EC 3.1.3.16) 1,
  misc_feature (1)..(298): Homolog of NCBI NO: 99751 NR Description: phosphoprotein phosphatase (EC 3.1.3.16) 1A
  misc_feature (1)..(309): Homolog of NCBI NO: 7435136 NR Description: phosphoprotein phosphatase (EC 3.1.3.16) 1a
  misc_feature (1)..(298): Homolog of NCBI NO: 15237829 NR Description: protein phosphatase 1A [Arabidopsis thaliana]
  misc_feature (1)..(298): Homolog of NCBI NO: 15225576 NR Description: phosphoprotein phosphatase type 1 catalytic
  misc_feature (1)..(298): Homolog of NCBI NO: 1346764 NR Description: SERINE/THREONINE PROTEIN PHOSPHATASE PP1
  misc_feature (1)..(298): Homolog of NCBI NO: 5917726 NR Description: serine/threonine protein phosphatase 1; PP1
  misc_feature (1)..(309): Homolog of NCBI NO: 7435129 NR Description: phosphoprotein phosphatase (EC 3.1.3.16),
  misc_feature (1)..(316): Homolog of NCBI NO: 14495346 NR Description: protein phosphatase [Oryza sativa]
  misc_feature (1)..(316): Homolog of NCBI NO: 130709 NR Description: SERINE/THREONINE PROTEIN PHOSPHATASE PP1
MDPALLDDVIRRLLEVKNLKPGKNAQLSESEIKQLCAAAKEIFLHQPNLLELEAPIKICGDVHGQYSDLLRLFDYGGYPPQANYLFLGDYVDRGKQSLETICLLLAYKVKYPENFFLLRGNHECASVNRIYGFYDECKRRFSVKLWKTFTDCFNCLPVSALIDEKILCMHGGLSPELNKLEQILNLSRPTDVPDTGLLCDLLWSDPSNEATGWAINDRGVSYTFGPDKVSEFLEKHDLDLICRAHQVVEDGYEFFASRQLVTMFSAPNYCGEFDNAGAMMSVDETLMCSFQILKPARKVLGGSTNNKSGFKSSRGW

SEQ ID NO: 2865 - DNA, 1807 bp, Zea mays subsp. mays
  misc_feature (1)..(1807): Ceres Seq. ID no. 12566732
  misc_feature: MA Experiment ID: 108543 Result: Up-regulated in Transcription
  misc_feature: MA Experiment ID: 108545 Result: Down-regulated in Transcription
  misc_feature: MA Experiment 108545 PARAMETER Experiment Name: Zm_Imbibed_Seeds_P Parameter: Age (day) Value: 3 vs. 2
  misc_feature: MA Experiment 108545 PARAMETER Experiment Name: Zm_Imbibed_Seeds_P Parameter: Organism Value: Zea mays
  misc_feature: MA Experiment 108545 PARAMETER Experiment Name: Zm_Imbibed_Seeds_P Parameter: Plant Line Value: 35A19
  misc_feature: MA Experiment 108545 PARAMETER Experiment Name: Zm_Imbibed_Seeds_P Parameter: Tissue Value: Aerial vs. Embryo
  misc_feature: MA Experiment ID: 20000477 Result: Down-regulated in Transcription
  misc_feature: MA Experiment 20000477 PARAMETER Experiment Name: Zm_5mM_SA_P Parameter: Age (day) Value: 10
  misc_feature: MA Experiment 20000477 PARAMETER Experiment Name: Zm_5mM_SA_P Parameter: Organism Value: Zea mays
  misc_feature: MA Experiment 20000477 PARAMETER Experiment Name: Zm_5mM_SA_P Parameter: Plant Line Value: 35A19
  misc_feature: MA Experiment 20000477 PARAMETER Experiment Name: Zm_5mM_SA_P Parameter: Timepoint (hr) Value: 48
  misc_feature: MA Experiment 20000477 PARAMETER Experiment Name: Zm_5mM_SA_P Parameter: Tissue Value: Aerial
  misc_feature: MA Experiment 20000477 PARAMETER Experiment Name: Zm_5mM_SA_P Parameter: Treatment Value: 5mM SA vs. No Treatment
  misc_feature: MA Experiment ID: 20000479 Result: Down-regulated in Transcription
  misc_feature: MA Experiment 20000479 PARAMETER Experiment Name: Zm_Drought_P Parameter: Age (day) Value: 10
  misc_feature: MA Experiment 20000479 PARAMETER Experiment Name: Zm_Drought_P Parameter: Organism Value: Zea mays
  misc_feature: MA Experiment 20000479 PARAMETER Experiment Name: Zm_Drought_P Parameter: Plant Line Value: 35A19
  misc_feature: MA Experiment 20000479 PARAMETER Experiment Name: Zm_Drought_P Parameter: Timepoint (hr) Value: 48
  misc_feature: MA Experiment 20000479 PARAMETER Experiment Name: Zm_Drought_P Parameter: Tissue Value: Aerial
  misc_feature: MA Experiment 20000479 PARAMETER Experiment Name: Zm_Drought_P Parameter: Treatment Value: Drought vs. No Drought
  misc_feature: MA Experiment ID: 20000480 Result: Down-regulated in Transcription
  misc_feature: MA Experiment 20000480 PARAMETER Experiment Name: Zm_Drought_P Parameter: Age (day) Value: 11
  misc_feature: MA Experiment 20000480 PARAMETER Experiment Name: Zm_Drought_P Parameter: Organism Value: Zea mays
  misc_feature: MA Experiment 20000480 PARAMETER Experiment Name: Zm_Drought_P Parameter: Plant Line Value: 35A19
  misc_feature: MA Experiment 20000480 PARAMETER Experiment Name: Zm_Drought_P Parameter: Timepoint (hr) Value: 72
  misc_feature: MA Experiment 20000480 PARAMETER Experiment Name: Zm_Drought_P Parameter: Tissue Value: Aerial
  misc_feature: MA Experiment 20000480 PARAMETER Experiment Name: Zm_Drought_P Parameter: Treatment Value: Drought vs. No Drought
  misc_feature: MA Experiment ID: 20000492 Result: Down-regulated in Transcription
  misc_feature: MA Experiment 20000492 PARAMETER Experiment Name: Zm_Hybrid_Seed_Dev_P Parameter: DAP Value: 12
  misc_feature: MA Experiment 20000492 PARAMETER Experiment Name: Zm_Hybrid_Seed_Dev_P Parameter: Organism Value: Zea mays
  misc_feature: MA Experiment 20000492 PARAMETER Experiment Name: Zm_Hybrid_Seed_Dev_P Parameter: Plant Line Value: 35A19
  misc_feature: MA Experiment 20000492 PARAMETER Experiment Name: Zm_Hybrid_Seed_Dev_P Parameter: Tissue Value: Fert Kernel vs. Unfert Floret
  misc_feature: MA Experiment ID: 20000535 Result: Down-regulated in Transcription
  misc_feature: MA Experiment 20000535 PARAMETER Experiment Name: Zm_Hybrid_Seed_Dev_P Parameter: DAP Value: 30 vs. 12
  misc_feature: MA Experiment 20000535 PARAMETER Experiment Name: Zm_Hybrid_Seed_Dev_P Parameter: Organism Value: Zea mays
  misc_feature: MA Experiment 20000535 PARAMETER Experiment Name: Zm_Hybrid_Seed_Dev_P Parameter: Plant Line Value: 35A19
  misc_feature: MA Experiment 20000535 PARAMETER Experiment Name: Zm_Hybrid_Seed_Dev_P Parameter: Tissue Value: Embryo vs. Unfert Floret
atcgaaaatttggtcgaaataaacaagcagagcagaaaacccccacacgcttttagttggccgtccgtccgtccgtctctgaggagcacacagcagtcgattttaaactgcagctacagtctacagaggtcaggtcaggggacacagcctgagcggctggctagcgggggctagcgagcggcgccacagcgcagcacgcagagagccagggcggcggccatggcgagcgcggcgagtggcggcggcgggtcgctgaagcggatgggcccgctccgggtacagtactacatcgtgatgggcgcggtggcagcggctgtggtgctggccacgctgcgctacatgccggggccagccgtcccggcgaccaccgcccgtaccagcggaggcggcgtcgtgcgctcggccccagcagccgcggccgtccccgtgcccgtgcccgccgtggaggaagaaacgggggaggatgagcaggcgcagaggaggaggaggagaaggaagaagaagggggacggggtcgtgctcttcaacttcggcgactccaacagcgacacgggcggcgtggcggcggtcatggggatccgcatcgcaccgccggagggcagggcctacttccaccaccccacggggcggctctccgacggacgcgtcatcctcgacttcatctgtgagagccctgggcacgccgcacctgagtccgttcatgaagccgctgggctccaacttctccaacggcgtcaacttcgccattgcagggtccacggccatgccgggagtaaccaccttctcgctggacgtgcaggtggatcagttcgtcttcttcaaggagagatgcctcgactccatcgagagaggtgagagtgccccgattgttgagaaggcgttcccagatgctatatacaccatggacatcgggcacaacgatataaacggtgttctccacttgccctatcatacaatgctcgaaaatctccccccagtaattgctgaaatcaagaaagccatcgagaggttgcacgagaatggagccaggaagttctggatacatggaacgggagcattagggtgcatgcctcagaagctttctatgccgagggatgacgacagcggcctcgatgagcatggatgcatcgcaagcattaataatgtctgcaagaagttcaattccttgctgagtgaagccttggacgagctgcgtttgacactgaaaagttcgactatcgtctttgtggatatgttcgctatcaagtatgatcttgttgccaaccacacgaaatatgggattgagaagccattgatgacatgttgtggtcatggaggccccccttacaactatgaccccaaggagagctgcatgacttcggacaaatacctgtgcaagcttggcgaaaagttcataagctgggacggggttcacttcaccgatgctgcaaatggcattgtggcttccaaagtactcagtggtgagtacaacattcccagggtcaagctggccagcctcgtccccgttccaaaatctgacgattaatggtgatgcagcatcttaattagcctttagtttggcctatcaaggatgatgaagatgaaactactaacaaaactgacaccaccaaagtttaattattttgaggttcttacgttacatccattgtagaagaagacttttcttttgtttccttctctttttgtacaatcggcgcatatgtatatcctaggggttaatatatggcgatgcatgtgtctgtaccatgtataattcttttcttttgaattttgggtctgttggtgcgatttagtcgccaaacacttg

SEQ ID NO: 2866 - protein, 353 aa, Zea mays subsp. mays
  peptide (1)..(353): Ceres Seq. ID no. 12566733
  misc_feature (70)..(330): Pfam Name: GDSL-like Lipase/Acylhydrolase Pfam Description: GDSL-like Lipase/Acylhydrolase
  misc_feature (74)..(338): Homolog of NCBI NO: 18405064 NR Description: early nodule-specific protein, putative
  misc_feature (75)..(181): Homolog of NCBI NO: 15228721 NR Description: putative protein; protein id: At3g62280.1
  misc_feature (205)..(342): Homolog of NCBI NO: 15228721 NR Description: putative protein; protein id: At3g62280.1
  misc_feature (74)..(338): Homolog of NCBI NO: 25405771 NR Description: hypothetical protein T22H22.20 [imported] -
  misc_feature (69)..(319): Homolog of NCBI NO: 25336281 NR Description: lipase-like protein Lip-4
  misc_feature (70)..(341): Homolog of NCBI NO: 34894844 NR Description: putative lipase homolog [Oryza sativa (japonica
  misc_feature (69)..(338): Homolog of NCBI NO: 15223585 NR Description: nodule-specific protein, putative; protein id:
  misc_feature (69)..(338): Homolog of NCBI NO: 15217506 NR Description: putative lipase; protein id: At1g09390.1
  misc_feature (70)..(340): Homolog of NCBI NO: 34894866 NR Description: putative lipase homolog [Oryza sativa (japonica
  misc_feature (70)..(346): Homolog of NCBI NO: 34894838 NR Description: putative lipase homolog [Oryza sativa (japonica
MSRRRGGGGEGRRRGTGSCSSTSATPTATRAAWRRSWGSASHRRRAGPTSTTPRGGSPTDASSSTSSVRALGTPHLSPFMKPLGSNFSNGVNFAIAGSTAMPGVTTFSLDVQVDQFVFFKERCLDSIERGESAPIVEKAFPDAIYTMDIGHNDINGVLHLPYHTMLENLPPVIAEIKKAIERLHENGARKFWIHGTGALGCMPQKLSMPRDDDSGLDEHGCIASINNVCKKFNSLLSEALDELRLTLKSSTIVFVDMFAIKYDLVANHTKYGIEKPLMTCCGHGGPPYNYDPKESCMTSDKYLCKLGEKFISWDGVHFTDAANGIVASKVLSGEYNIPRVKLASLVPVPKSDD

SEQ ID NO: 2867 - protein, 274 aa, Zea mays subsp. mays
  peptide (1)..(274): Ceres Seq. ID no. 12566734
  misc_feature (1)..(251): Pfam Name: GDSL-like Lipase/Acylhydrolase Pfam Description: GDSL-like Lipase/Acylhydrolase
  misc_feature (1)..(259): Homolog of NCBI NO: 18405064 NR Description: early nodule-specific protein, putative
  misc_feature (1)..(102): Homolog of NCBI NO: 15228721 NR Description: putative protein; protein id: At3g62280.1
  misc_feature (126)..(263): Homolog of NCBI NO: 15228721 NR Description: putative protein; protein id: At3g62280.1
  misc_feature (1)..(259): Homolog of NCBI NO: 25405771 NR Description: hypothetical protein T22H22.20 [imported] -
  misc_feature (1)..(240): Homolog of NCBI NO: 25336281 NR Description: lipase-like protein Lip-4
  misc_feature (1)..(262): Homolog of NCBI NO: 34894844 NR Description: putative lipase homolog [Oryza sativa (japonica
  misc_feature (1)..(259): Homolog of NCBI NO: 15223585 NR Description: nodule-specific protein, putative; protein id:
  misc_feature (1)..(259): Homolog of NCBI NO: 15217506 NR Description: putative lipase; protein id: At1g09390.1
  misc_feature (1)..(261): Homolog of NCBI NO: 34894866 NR Description: putative lipase homolog [Oryza sativa (japonica
  misc_feature (1)..(267): Homolog of NCBI NO: 34894838 NR Description: putative lipase homolog [Oryza sativa (japonica
MKPLGSNFSNGVNFAIAGSTAMPGVTTFSLDVQVDQFVFFKERCLDSIERGESAPIVEKAFPDAIYTMDIGHNDINGVLHLPYHTMLENLPPVIAEIKKAIERLHENGARKFWIHGTGALGCMPQKLSMPRDDDSGLDEHGCIASINNVCKKFNSLLSEALDELRLTLKSSTIVFVDMFAIKYDLVANHTKYGIEKPLMTCCGHGGPPYNYDPKESCMTSDKYLCKLGEKFISWDGVHFTDAANGIVASKVLSGEYNIPRVKLASLVPVPKSDD

SEQ ID NO: 2868 - protein, 253 aa, Zea mays subsp. mays
  peptide (1)..(253): Ceres Seq. ID no. 12566735
  misc_feature (1)..(230): Pfam Name: GDSL-like Lipase/Acylhydrolase Pfam Description: GDSL-like Lipase/Acylhydrolase
  misc_feature (1)..(238): Homolog of NCBI NO: 18405064 NR Description: early nodule-specific protein, putative
  misc_feature (1)..(81): Homolog of NCBI NO: 15228721 NR Description: putative protein; protein id: At3g62280.1
  misc_feature (105)..(242): Homolog of NCBI NO: 15228721 NR Description: putative protein; protein id: At3g62280.1
  misc_feature (1)..(238): Homolog of NCBI NO: 25405771 NR Description: hypothetical protein T22H22.20 [imported] -
  misc_feature (1)..(219): Homolog of NCBI NO: 25336281 NR Description: lipase-like protein Lip-4
  misc_feature (1)..(241): Homolog of NCBI NO: 34894844 NR Description: putative lipase homolog [Oryza sativa (japonica
  misc_feature (1)..(238): Homolog of NCBI NO: 15223585 NR Description: nodule-specific protein, putative; protein id:
  misc_feature (1)..(238): Homolog of NCBI NO: 15217506 NR Description: putative lipase; protein id: At1g09390.1
  misc_feature (1)..(240): Homolog of NCBI NO: 34894866 NR Description: putative lipase homolog [Oryza sativa (japonica
  misc_feature (1)..(246): Homolog of NCBI NO: 34894838 NR Description: putative lipase homolog [Oryza sativa (japonica
MPGVTTFSLDVQVDQFVFFKERCLDSIERGESAPIVEKAFPDAIYTMDIGHNDINGVLHLPYHTMLENLPPVIAEIKKAIERLHENGARKFWIHGTGALGCMPQKLSMPRDDDSGLDEHGCIASINNVCKKFNSLLSEALDELRLTLKSSTIVFVDMFAIKYDLVANHTKYGIEKPLMTCCGHGGPPYNYDPKESCMTSDKYLCKLGEKFISWDGVHFTDAANGIVASKVLSGEYNIPRVKLASLVPVPKSDD

SEQ ID NO: 2869 - DNA, 1875 bp, Zea mays subsp. mays
  misc_feature (1)..(1875): Ceres Seq. ID no. 12364204
  misc_feature: MA Experiment ID: 108535 Result: Up-regulated in Transcription
  misc_feature: MA Experiment 108535 PARAMETER Experiment Name: Zm_Meristem_P Parameter: Age (day) Value: 8
  misc_feature: MA Experiment 108535 PARAMETER Experiment Name: Zm_Meristem_P Parameter: Organism Value: Zea mays
  misc_feature: MA Experiment 108535 PARAMETER Experiment Name: Zm_Meristem_P Parameter: Plant Line Value: 35A19
  misc_feature: MA Experiment 108535 PARAMETER Experiment Name: Zm_Meristem_P Parameter: Tissue Value: Root Meristem vs. Above Root Meristem
  misc_feature: MA Experiment ID: 20000487 Result: Up-regulated in Transcription
  misc_feature: MA Experiment 20000487 PARAMETER Experiment Name: Zm_50mM_NH4NO3_L_to_H_P Parameter: Organism Value: Zea mays
  misc_feature: MA Experiment 20000487 PARAMETER Experiment Name: Zm_50mM_NH4NO3_L_to_H_P Parameter: Timepoint (hr) Value: 4
  misc_feature: MA Experiment 20000487 PARAMETER Experiment Name: Zm_50mM_NH4NO3_L_to_H_P Parameter: Tissue Value: Leaves
  misc_feature: MA Experiment 20000487 PARAMETER Experiment Name: Zm_50mM_NH4NO3_L_to_H_P Parameter: Treatment Value: 50mM NH4NO3 vs. 100mM Mannitol
  misc_feature: MA Experiment ID: 20000488 Result: Up-regulated in Transcription
  misc_feature: MA Experiment 20000488 PARAMETER Experiment Name: Zm_50mM_NH4NO3_L_to_H_P Parameter: Organism Value: Zea mays
  misc_feature: MA Experiment 20000488 PARAMETER Experiment Name: Zm_50mM_NH4NO3_L_to_H_P Parameter: Timepoint (hr) Value: 8
  misc_feature: MA Experiment 20000488 PARAMETER Experiment Name: Zm_50mM_NH4NO3_L_to_H_P Parameter: Tissue Value: Leaves
  misc_feature: MA Experiment 20000488 PARAMETER Experiment Name: Zm_50mM_NH4NO3_L_to_H_P Parameter: Treatment Value: 50mM NH4NO3 vs. 100mM Mannitol
gcacgagaccattacctagaacatcctaatcgaaaaaaaccctaatcctcccccgctacacgttcgcttgatctttacggccgccgctactcgttcgccatggctgcctgctcctccaggctcctatacctcactctgagctcctctttcctccgctcctgccgcctcgcgtccagctccctacttcccaccgcctcccgctgccacccggggtcgctccactccctccgcttctgctctgctgtccccgagtttgtcgatgtcgccgccgaccctgccgaggcggctgtatcctccggacacccgtggccggagtggggcaacttccttgataagctgcgggccaaggggtacttcgagcaaggtttgccctccagcgtgagttctggcgagggagccgccggagatggggatccagcaactgcatctgagaacgcagcaacggctgcttccggtaatacggtggtggatgcggaggatagcgcggtgacctcggaagatatctatcattttctcaaggacgagaacagggtgaagaatgcgtgcctcaaatttgggcgagaccgcttcgatctcctcagcttgcttcccaagcaggatattcaagctattgttatgtctggctgtcctaataacaatcggaagcccgtctattctgcaaaaaggttgagagagtacgtgcaggtcaaagaagaagatgcatgcagcatttgcaaatttaaggcatcttgtgatagagcttatgtcactccaaagggtgaggttgaagttaggactgttgatgttgttcgtatactgttaagttatgcaatggataaaaaccattcaggagataactctgttatcgaagaaagtgtgcaagaatctgcaaaaaagcttctctcaaagcttactgaatttagtgacacaacaatcgatccatctcttccgaaacctgcatttcaagttgctaggaaggctcagggctcagtggggaaggggagagaaacgactgcagttgaaatgaagaagggtgactggttgtgcactaactgtaacttcttaaattttgctcgcaatcgtcactgtctcgaatgcaaagcagatggaccaaagaagatagaagcggccgtggatgcaatgaaaatgggcgattggatctgcacacagtgtcagtttatgaacttctctcgcaacaagatatgttttaaatgtgaagaacctcacccgaagaggcaactcaatcctggagagtgggagtgcccctcatgcgactttgttaacttccgacgcaacgctatctgcaagaagtgcaatcaggaccgccccgaggatgatacccgagatagtcagcggggactgagaaaaaccagaggggctggcaagtttagaagattcgactatattgatcagaagagcgatgacgatgatgacaatgcctggttccagaagcgtggggcaagcatgaggtcgaaaccggaccagagaaccaccactgccaagagcagaggctctgacggtctggatgatattcttgttaccaccaagcgtagaagcaccaagcaagacgaggacgacgaggtcttgccgtacgagggtgcgcgcaagcatgttgtgagcagaagggcaacgccttcccagaggaggttcacggctgcccgtaaccagtaataatacccgagcttggagctttgatgactccgttctgtgaacaaatttcacagcgtcgctcgctctgctgctgtgatgcagacgaatagatgatggacataacacataagcgtgttcgatctgtagtgttattatacaaactagtaactatcgcgcgcaccgcgcgcctacgaaaacagacaatataaatgataatactattataaagtatttgtcattgtgatt

SEQ ID NO: 2870 - protein, 516 aa, Zea mays subsp. mays
  peptide (1)..(516): Ceres Seq. ID no. 12364205
  misc_feature (342)..(371): Pfam Name: Zn-finger in Ran binding protein and others Pfam Description: Zn-finger in Ran binding protein and others
  misc_feature (342)..(371): Pfam Name: Zn-finger in Ran binding protein and others Pfam Description: Zn-finger in Ran binding protein and others
  misc_feature (140)..(433): Homolog of NCBI NO: 21593408 NR Description: unknown [Arabidopsis thaliana]
  misc_feature (42)..(86): Homolog of NCBI NO: 15221905 NR Description: hypothetical protein
  misc_feature (295)..(411): Homolog of NCBI NO: 15221905 NR Description: hypothetical protein
  misc_feature (278)..(402): Homolog of NCBI NO: 15221905 NR Description: hypothetical protein
  misc_feature (140)..(417): Homolog of NCBI NO: 18409643 NR Description: expressed protein
  misc_feature (140)..(414): Homolog of NCBI NO: 13324787 NR Description: hypothetical protein [Oryza sativa]
  misc_feature (66)..(98): Homolog of NCBI NO: 18409643 NR Description: expressed protein
  misc_feature (66)..(98): Homolog of NCBI NO: 21593408 NR Description: unknown [Arabidopsis thaliana]
  misc_feature (14)..(467): Homolog of NCBI NO: 13702809 NR Description: putative ARP protein [Oryza sativa]
  misc_feature (124)..(280): Homolog of NCBI NO: 15221905 NR Description: hypothetical protein
  misc_feature (295)..(411): Homolog of NCBI NO: 15221905 NR Description: hypothetical protein
  misc_feature (42)..(86): Homolog of NCBI NO: 15221905 NR Description: hypothetical protein
  misc_feature (140)..(433): Homolog of NCBI NO: 21593408 NR Description: unknown [Arabidopsis thaliana]
  misc_feature (140)..(417): Homolog of NCBI NO: 18409643 NR Description: expressed protein
  misc_feature (278)..(402): Homolog of NCBI NO: 15221905 NR Description: hypothetical protein
  misc_feature (66)..(98): Homolog of NCBI NO: 21593408 NR Description: unknown [Arabidopsis thaliana]
  misc_feature (66)..(98): Homolog of NCBI NO: 18409643 NR Description: expressed protein
  misc_feature (140)..(414): Homolog of NCBI NO: 13324787 NR Description: hypothetical protein [Oryza sativa]
  misc_feature (124)..(280): Homolog of NCBI NO: 15221905 NR Description: hypothetical protein
  misc_feature (14)..(467): Homolog of NCBI NO: 13702809 NR Description: putative ARP protein [Oryza sativa]
MAACSSRLLYLTLSSSFLRSCRLASSSLLPTASRCHPGSLHSLRFCSAVPEFVDVAADPAEAAVSSGHPWPEWGNFLDKLRAKGYFEQGLPSSVSSGEGAAGDGDPATASENAATAASGNTVVDAEDSAVTSEDIYHFLKDENRVKNACLKFGRDRFDLLSLLPKQDIQAIVMSGCPNNNRKPVYSAKRLREYVQVKEEDACSICKFKASCDRAYVTPKGEVEVRTVDVVRILLSYAMDKNHSGDNSVIEESVQESAKKLLSKLTEFSDTTIDPSLPKPAFQVARKAQGSVGKGRETTAVEMKKGDWLCTNCNFLNFARNRHCLECKADGPKKIEAAVDAMKMGDWICTQCQFMNFSRNKICFKCEEPHPKRQLNPGEWECPSCDFVNFRRNAICKKCNQDRPEDDTRDSQRGLRKTRGAGKFRRFDYIDQKSDDDDDNAWFQKRGASMRSKPDQRTTTAKSRGSDGLDDILVTTKRRSTKQDEDDEVLPYEGARKHVVSRRATPSQRRFTAARNQ

SEQ ID NO: 2871 - protein, 344 aa, Zea mays subsp. mays
  peptide (1)..(344): Ceres Seq. ID no. 12364206
  misc_feature (170)..(199): Pfam Name: Zn-finger in Ran binding protein and others Pfam Description: Zn-finger in Ran binding protein and others
  misc_feature (170)..(199): Pfam Name: Zn-finger in Ran binding protein and others Pfam Description: Zn-finger in Ran binding protein and others
  misc_feature (1)..(199): Homolog of NCBI NO: 25372841 NR Description: hypothetical protein F5A18.17 [imported] -
  misc_feature (155)..(344): Homolog of NCBI NO: 13702809 NR Description: putative ARP protein [Oryza sativa]
  misc_feature (1)..(298): Homolog of NCBI NO: 34393925 NR Description: unknown protein [Oryza sativa (japonica
  misc_feature (1)..(242): Homolog of NCBI NO: 13324787 NR Description: hypothetical protein [Oryza sativa]
  misc_feature (106)..(230): Homolog of NCBI NO: 15221905 NR Description: hypothetical protein
  misc_feature (1)..(199): Homolog of NCBI NO: 25372841 NR Description: hypothetical protein F5A18.17 [imported] -
  misc_feature (1)..(298): Homolog of NCBI NO: 34393925 NR Description: unknown protein [Oryza sativa (japonica
  misc_feature (106)..(230): Homolog of NCBI NO: 15221905 NR Description: hypothetical protein
  misc_feature (1)..(295): Homolog of NCBI NO: 13702809 NR Description: putative ARP protein [Oryza sativa]
  misc_feature (1)..(108): Homolog of NCBI NO: 15221905 NR Description: hypothetical protein
  misc_feature (123)..(239): Homolog of NCBI NO: 15221905 NR Description: hypothetical protein
  misc_feature (1)..(261): Homolog of NCBI NO: 21593408 NR Description: unknown [Arabidopsis thaliana]
  misc_feature (1)..(245): Homolog of NCBI NO: 18409643 NR Description: expressed protein
  misc_feature (1)..(242): Homolog of NCBI NO: 13324787 NR Description: hypothetical protein [Oryza sativa]
  misc_feature (155)..(344): Homolog of NCBI NO: 13702809 NR Description: putative ARP protein [Oryza sativa]
  misc_feature (1)..(245): Homolog of NCBI NO: 18409643 NR Description: expressed protein
  misc_feature (1)..(261): Homolog of NCBI NO: 21593408 NR Description: unknown [Arabidopsis thaliana]
  misc_feature (123)..(239): Homolog of NCBI NO: 15221905 NR Description: hypothetical protein
  misc_feature (1)..(108): Homolog of NCBI NO: 15221905 NR Description: hypothetical protein
  misc_feature (1)..(295): Homolog of NCBI NO: 13702809 NR Description: putative ARP protein [Oryza sativa]
MSGCPNNNRKPVYSAKRLREYVQVKEEDACSICKFKASCDRAYVTPKGEVEVRTVDVVRILLSYAMDKNHSGDNSVIEESVQESAKKLLSKLTEFSDTTIDPSLPKPAFQVARKAQGSVGKGRETTAVEMKKGDWLCTNCNFLNFARNRHCLECKADGPKKIEAAVDAMKMGDWICTQCQFMNFSRNKICFKCEEPHPKRQLNPGEWECPSCDFVNFRRNAICKKCNQDRPEDDTRDSQRGLRKTRGAGKFRRFDYIDQKSDDDDDNAWFQKRGASMRSKPDQRTTTAKSRGSDGLDDILVTTKRRSTKQDEDDEVLPYEGARKHVVSRRATPSQRRFTAARNQ

SEQ ID NO: 2872 - protein, 279 aa, Zea mays subsp. mays
  peptide (1)..(279): Ceres Seq. ID no. 12364207
  misc_feature (105)..(134): Pfam Name: Zn-finger in Ran binding protein and others Pfam Description: Zn-finger in Ran binding protein and others
  misc_feature (105)..(134): Pfam Name: Zn-finger in Ran binding protein and others Pfam Description: Zn-finger in Ran binding protein and others
  misc_feature (1)..(134): Homolog of NCBI NO: 25372841 NR Description: hypothetical protein F5A18.17 [imported] -
  misc_feature (90)..(279): Homolog of NCBI NO: 13702809 NR Description: putative ARP protein [Oryza sativa]
  misc_feature (1)..(233): Homolog of NCBI NO: 34393925 NR Description: unknown protein [Oryza sativa (japonica
  misc_feature (1)..(177): Homolog of NCBI NO: 13324787 NR Description: hypothetical protein [Oryza sativa]
  misc_feature (41)..(165): Homolog of NCBI NO: 15221905 NR Description: hypothetical protein
  misc_feature (1)..(134): Homolog of NCBI NO: 25372841 NR Description: hypothetical protein F5A18.17 [imported] -
  misc_feature (1)..(233): Homolog of NCBI NO: 34393925 NR Description: unknown protein [Oryza sativa (japonica
  misc_feature (41)..(165): Homolog of NCBI NO: 15221905 NR Description: hypothetical protein
  misc_feature (1)..(230): Homolog of NCBI NO: 13702809 NR Description: putative ARP protein [Oryza sativa]
  misc_feature (1)..(43): Homolog of NCBI NO: 15221905 NR Description: hypothetical protein
  misc_feature (58)..(174): Homolog of NCBI NO: 15221905 NR Description: hypothetical protein
  misc_feature (1)..(196): Homolog of NCBI NO: 21593408 NR Description: unknown [Arabidopsis thaliana]
  misc_feature (1)..(180): Homolog of NCBI NO: 18409643 NR Description: expressed protein
  misc_feature (1)..(177): Homolog of NCBI NO: 13324787 NR Description: hypothetical protein [Oryza sativa]
  misc_feature (90)..(279): Homolog of NCBI NO: 13702809 NR Description: putative ARP protein [Oryza sativa]
  misc_feature (1)..(180): Homolog of NCBI NO: 18409643 NR Description: expressed protein
  misc_feature (1)..(196): Homolog of NCBI NO: 21593408 NR Description: unknown [Arabidopsis thaliana]
  misc_feature (58)..(174): Homolog of NCBI NO: 15221905 NR Description: hypothetical protein
  misc_feature (1)..(43): Homolog of NCBI NO: 15221905 NR Description: hypothetical protein
  misc_feature (1)..(230): Homolog of NCBI NO: 13702809 NR Description: putative ARP protein [Oryza sativa]
MDKNHSGDNSVIEESVQESAKKLLSKLTEFSDTTIDPSLPKPAFQVARKAQGSVGKGRETTAVEMKKGDWLCTNCNFLNFARNRHCLECKADGPKKIEAAVDAMKMGDWICTQCQFMNFSRNKICFKCEEPHPKRQLNPGEWECPSCDFVNFRRNAICKKCNQDRPEDDTRDSQRGLRKTRGAGKFRRFDYIDQKSDDDDDNAWFQKRGASMRSKPDQRTTTAKSRGSDGLDDILVTTKRRSTKQDEDDEVLPYEGARKHVVSRRATPSQRRFTAARNQ

SEQ ID NO: 2873 - DNA, 1675 bp, Zea mays subsp. mays
  misc_feature (1)..(1675): Ceres Seq. ID no. 12410523
  misc_feature: MA Experiment ID: 108527 Result: Up-regulated in Transcription
  misc_feature: MA Experiment 108527 PARAMETER Experiment Name: Zm_5mM_NO_P Parameter: Age (day) Value: 8
  misc_feature: MA Experiment 108527 PARAMETER Experiment Name: Zm_5mM_NO_P Parameter: Organism Value: Zea mays
  misc_feature: MA Experiment 108527 PARAMETER Experiment Name: Zm_5mM_NO_P Parameter: Plant Line Value: 35A19
  misc_feature: MA Experiment 108527 PARAMETER Experiment Name: Zm_5mM_NO_P Parameter: Timepoint (hr) Value: 6
  misc_feature: MA Experiment 108527 PARAMETER Experiment Name: Zm_5mM_NO_P Parameter: Tissue Value: Aerial
  misc_feature: MA Experiment 108527 PARAMETER Experiment Name: Zm_5mM_NO_P Parameter: Treatment Value: 5mM NO vs. No Treatment
  misc_feature: MA Experiment ID: 108528 Result: Down-regulated in Transcription
  misc_feature: MA Experiment 108528 PARAMETER Experiment Name: Zm_Imbibed_Seeds_P Parameter: Age (day) Value: 5 vs. 2
  misc_feature: MA Experiment 108528 PARAMETER Experiment Name: Zm_Imbibed_Seeds_P Parameter: Organism Value: Zea mays
  misc_feature: MA Experiment 108528 PARAMETER Experiment Name: Zm_Imbibed_Seeds_P Parameter: Plant Line Value: 35A19
  misc_feature: MA Experiment 108528 PARAMETER Experiment Name: Zm_Imbibed_Seeds_P Parameter: Tissue Value: Aerial vs. Embryo
  misc_feature: MA Experiment ID: 108547 Result: Down-regulated in Transcription
  misc_feature: MA Experiment 108547 PARAMETER Experiment Name: Zm_Imbibed_Seeds_P Parameter: Age (day) Value: 4 vs. 2
  misc_feature: MA Experiment 108547 PARAMETER Experiment Name: Zm_Imbibed_Seeds_P Parameter: Organism Value: Zea mays
  misc_feature: MA Experiment 108547 PARAMETER Experiment Name: Zm_Imbibed_Seeds_P Parameter: Plant Line Value: 35A19
  misc_feature: MA Experiment 108547 PARAMETER Experiment Name: Zm_Imbibed_Seeds_P Parameter: Tissue Value: Aerial vs. Embryo
  misc_feature: MA Experiment ID: 20000492 Result: Down-regulated in Transcription
  misc_feature: MA Experiment 20000492 PARAMETER Experiment Name: Zm_Hybrid_Seed_Dev_P Parameter: DAP Value: 12
  misc_feature: MA Experiment 20000492 PARAMETER Experiment Name: Zm_Hybrid_Seed_Dev_P Parameter: Organism Value: Zea mays
  misc_feature: MA Experiment 20000492 PARAMETER Experiment Name: Zm_Hybrid_Seed_Dev_P Parameter: Plant Line Value: 35A19
  misc_feature: MA Experiment 20000492 PARAMETER Experiment Name: Zm_Hybrid_Seed_Dev_P Parameter: Tissue Value: Fert Kernel vs. Unfert Floret
  misc_feature: MA Experiment ID: 20001614 Result: Up-regulated in Transcription
  misc_feature: MA Experiment 20001614 PARAMETER Experiment Name: Zm_50ppm_KNO3_L-to-H_P Parameter: Age (day) Value: 21
  misc_feature: MA Experiment 20001614 PARAMETER Experiment Name: Zm_50ppm_KNO3_L-to-H_P Parameter: Organism Value: Zea mays
  misc_feature: MA Experiment 20001614 PARAMETER Experiment Name: Zm_50ppm_KNO3_L-to-H_P Parameter: Plant Line Value: 35A19
  misc_feature: MA Experiment 20001614 PARAMETER Experiment Name: Zm_50ppm_KNO3_L-to-H_P Parameter: Timepoint (hr) Value: 48
  misc_feature: MA Experiment 20001614 PARAMETER Experiment Name: Zm_50ppm_KNO3_L-to-H_P Parameter: Tissue Value: Roots
  misc_feature: MA Experiment 20001614 PARAMETER Experiment Name: Zm_50ppm_KNO3_L-to-H_P Parameter: Treatment Value: 50ppm KNO3 vs. 50ppm KCl
acacggttcctctctgaccactcctctcctctcctctcctctcctctcgccggcgcatcgcccgactgtcagtcagcctcagccatggccgcggaggaggagcagggcttccgcccgctggacgaggcgtccctgctcgcctacatcaaggccacgccggcgctcgcctcccgcctcggcggcggtggcagtctagactccatcgagatcaaggaggtcggcgacggcaacctcaacttcgtctacatcgtgcagtccgaggccggcgccatcgtcgtcaagcaggcgctcccgtacgtgcgctgcgtgggggactcgtggcccatgacgcgggagcgcgcctacttcgaggcctccacgctgcgggagcacggccgcctgtgcccggagcacacccccgagggtgtaccacttcgaccggaccttgtcgctgatggggatgcgctacatcgagcccccgcacatcatcctccggaagggcctcgtcgccggtgtcgagtacccgctgctcgccgaccacatgtccgattacatggccaagacgctcttcttcacctccctcctctataacaataccacggatcataagaacggagttgctaagtactctgcgaacgtggagatgtgtaggctcacggagcaagttgtgttctcggacccataccgtgtttccaaatttaatcggtggacctcgccttatctcgacaaagatgctgaggcagttcgcgaggatgatgagctcaagttggaagtagctgggctgaaatcgatgtttatcgagagagctcaagctctgattcatggagatctccacactggttctatcatggtgaccgaaggttcaactcaagtcattgatccagaatttgggttctatgggccaatgggttttgatattggagccttccttggaaacctgattttggcatactatgcacagaatgggcatgctgatcaagcgaatgatcgtaaggcttacaagaaatggatcttgaagacaattgaagagtcgtggaatttgttccagaaaaagtttgttgaactatggaataaacacaaagaaagcaatggggaggcatacctgcctgatatatacaacaagccaaagcttttgagcgttgttcagaagaagtacatgacaaacctatttcatgatagccttgggtttggttcagccaaaatgatcaggagaatagtcggaatcgctcacgtagaggatctcgagtcaatcaaggatgccagcaagagagcagagtgcgagcgtgctgccctcaactgtgcgaagacgatcctcaagggaagacaccagtttgagacgatcgagcaagtcgtcgagcatattcagtcattcgatcaggactgagaagacgacagtctatttgtgcgctgaagcctgaaggagccatactctcgtcaattaacccacgcatgcccgagtatcgatgaatcgtctgttttgtagtgatgaagcgcccggttgtttgtgatctctgtattggttgctaggtgagaaaagtatgtggtctcctggcttgaactgtgtgtacactattattccgggccggcatagcgagcagctgaataatgaaatgtacgggtcctcagtgaccatctcagtgcatataaacacgtgtgttaccaataaattttgttatggtgctggtggttctatggt

SEQ ID NO: 2874 - protein, 309 aa, Zea mays subsp. mays
  peptide (1)..(309): Ceres Seq. ID no. 12410524
  misc_feature (1)..(205): Homolog of NCBI NO: 30022120 NR Description: 5-methylthioribose kinase [Bacillus cereus ATCC
  misc_feature (1)..(219): Homolog of NCBI NO: 37999472 NR Description: Methylthioribose kinase (MTR kinase)
  misc_feature (1)..(219): Homolog of NCBI NO: 16078420 NR Description: ykrT [Bacillus subtilis]
  misc_feature (1)..(299): Homolog of NCBI NO: 13476069 NR Description: hypothetical protein [Mesorhizobium loti]
  misc_feature (190)..(288): Homolog of NCBI NO: 21402086 NR Description: Choline_kinase, Choline/ethanolamine kinase
  misc_feature (1)..(205): Homolog of NCBI NO: 21402086 NR Description: Choline_kinase, Choline/ethanolamine kinase
  misc_feature (1)..(306): Homolog of NCBI NO: 18921366 NR Description: 5-methylthioribose kinase [Klebsiella pneumoniae]
  misc_feature (1)..(299): Homolog of NCBI NO: 16265283 NR Description: conserved hypothetical protein [Sinorhizobium
  misc_feature (1)..(299): Homolog of NCBI NO: 27380009 NR Description: bll4898 [Bradyrhizobium japonicum]
  misc_feature (1)..(304): Homolog of NCBI NO: 18402794 NR Description: expressed protein
MGMRYIEPPHIILRKGLVAGVEYPLLADHMSDYMAKTLFFTSLLYNNTTDHKNGVAKYSANVEMCRLTEQVVFSDPYRVSKFNRWTSPYLDKDAEAVREDDELKLEVAGLKSMFIERAQALIHGDLHTGSIMVTEGSTQVIDPEFGFYGPMGFDIGAFLGNLILAYYAQNGHADQANDRKAYKKWILKTIEESWNLFQKKFVELWNKHKESNGEAYLPDIYNKPKLLSVVQKKYMTNLFHDSLGFGSAKMIRRIVGIAHVEDLESIKDASKRAECERAALNCAKTILKGRHQFETIEQVVEHIQSFDQD

SEQ ID NO: 2875 - protein, 307 aa, Zea mays subsp. mays
  peptide (1)..(307): Ceres Seq. ID no. 12410525
  misc_feature (1)..(203): Homolog of NCBI NO: 30022120 NR Description: 5-methylthioribose kinase [Bacillus cereus ATCC
  misc_feature (1)..(217): Homolog of NCBI NO: 37999472 NR Description: Methylthioribose kinase (MTR kinase)
  misc_feature (1)..(217): Homolog of NCBI NO: 16078420 NR Description: ykrT [Bacillus subtilis]
  misc_feature (1)..(297): Homolog of NCBI NO: 13476069 NR Description: hypothetical protein [Mesorhizobium loti]
  misc_feature (188)..(286): Homolog of NCBI NO: 21402086 NR Description: Choline_kinase, Choline/ethanolamine kinase
  misc_feature (1)..(203): Homolog of NCBI NO: 21402086 NR Description: Choline_kinase, Choline/ethanolamine kinase
  misc_feature (1)..(304): Homolog of NCBI NO: 18921366 NR Description: 5-methylthioribose kinase [Klebsiella pneumoniae]
  misc_feature (1)..(297): Homolog of NCBI NO: 16265283 NR Description: conserved hypothetical protein [Sinorhizobium
  misc_feature (1)..(297): Homolog of NCBI NO: 27380009 NR Description: bll4898 [Bradyrhizobium japonicum]
  misc_feature (1)..(302): Homolog of NCBI NO: 18402794 NR Description: expressed protein
MRYIEPPHIILRKGLVAGVEYPLLADHMSDYMAKTLFFTSLLYNNTTDHKNGVAKYSANVEMCRLTEQVVFSDPYRVSKFNRWTSPYLDKDAEAVREDDELKLEVAGLKSMFIERAQALIHGDLHTGSIMVTEGSTQVIDPEFGFYGPMGFDIGAFLGNLILAYYAQNGHADQANDRKAYKKWILKTIEESWNLFQKKFVELWNKHKESNGEAYLPDIYNKPKLLSVVQKKYMTNLFHDSLGFGSAKMIRRIVGIAHVEDLESIKDASKRAECERAALNCAKTILKGRHQFETIEQVVEHIQSFDQD

SEQ ID NO: 2876 - protein, 280 aa, Zea mays subsp. mays
  peptide (1)..(280): Ceres Seq. ID no. 12410526
  misc_feature (1)..(176): Homolog of NCBI NO: 30022120 NR Description: 5-methylthioribose kinase [Bacillus cereus ATCC
  misc_feature (1)..(190): Homolog of NCBI NO: 37999472 NR Description: Methylthioribose kinase (MTR kinase)
  misc_feature (1)..(190): Homolog of NCBI NO: 16078420 NR Description: ykrT [Bacillus subtilis]
  misc_feature (1)..(270): Homolog of NCBI NO: 13476069 NR Description: hypothetical protein [Mesorhizobium loti]
  misc_feature (161)..(259): Homolog of NCBI NO: 21402086 NR Description: Choline_kinase, Choline/ethanolamine kinase
  misc_feature (1)..(176): Homolog of NCBI NO: 21402086 NR Description: Choline_kinase, Choline/ethanolamine kinase
  misc_feature (1)..(277): Homolog of NCBI NO: 18921366 NR Description: 5-methylthioribose kinase [Klebsiella pneumoniae]
  misc_feature (1)..(270): Homolog of NCBI NO: 16265283 NR Description: conserved hypothetical protein [Sinorhizobium
  misc_feature (1)..(270): Homolog of NCBI NO: 27380009 NR Description: bll4898 [Bradyrhizobium japonicum]
  misc_feature (1)..(275): Homolog of NCBI NO: 18402794 NR Description: expressed protein
MSDYMAKTLFFTSLLYNNTTDHKNGVAKYSANVEMCRLTEQVVFSDPYRVSKFNRWTSPYLDKDAEAVREDDELKLEVAGLKSMFIERAQALIHGDLHTGSIMVTEGSTQVIDPEFGFYGPMGFDIGAFLGNLILAYYAQNGHADQANDRKAYKKWILKTIEESWNLFQKKFVELWNKHKESNGEAYLPDIYNKPKLLSVVQKKYMTNLFHDSLGFGSAKMIRRIVGIAHVEDLESIKDASKRAECERAALNCAKTILKGRHQFETIEQVVEHIQSFDQD

SEQ ID NO: 2877 - DNA, 1346 bp, Zea mays subsp. mays
  misc_feature (1)..(1346): Ceres Seq. ID no. 12356016
  misc_feature: MA Experiment ID: 108534 Result: Down-regulated in Transcription
  misc_feature: MA Experiment 108534 PARAMETER Experiment Name: Zm_4deg_Cold_P Parameter: Age (hr) Value: 8
  misc_feature: MA Experiment 108534 PARAMETER Experiment Name: Zm_4deg_Cold_P Parameter: Organism Value: Zea mays
  misc_feature: MA Experiment 108534 PARAMETER Experiment Name: Zm_4deg_Cold_P Parameter: Plant Line Value: 35A19
  misc_feature: MA Experiment 108534 PARAMETER Experiment Name: Zm_4deg_Cold_P Parameter: Temperature (deg C) Value: 4 vs. 22
  misc_feature: MA Experiment 108534 PARAMETER Experiment Name: Zm_4deg_Cold_P Parameter: Timepoint (hr) Value: 6
  misc_feature: MA Experiment 108534 PARAMETER Experiment Name: Zm_4deg_Cold_P Parameter: Tissue Value: Aerial
  misc_feature: MA Experiment ID: 108535 Result: Up-regulated in Transcription
  misc_feature: MA Experiment 108535 PARAMETER Experiment Name: Zm_Meristem_P Parameter: Age (day) Value: 8
  misc_feature: MA Experiment 108535 PARAMETER Experiment Name: Zm_Meristem_P Parameter: Organism Value: Zea mays
  misc_feature: MA Experiment 108535 PARAMETER Experiment Name: Zm_Meristem_P Parameter: Plant Line Value: 35A19
  misc_feature: MA Experiment 108535 PARAMETER Experiment Name: Zm_Meristem_P Parameter: Tissue Value: Root Meristem vs. Above Root Meristem
  misc_feature: MA Experiment ID: 108597 Result: Down-regulated in Transcription
  misc_feature: MA Experiment 108597 PARAMETER Experiment Name: Zm_100uM_ABA_P Parameter: Age (day) Value: 9
  misc_feature: MA Experiment 108597 PARAMETER Experiment Name: Zm_100uM_ABA_P Parameter: Organism Value: Zea mays
  misc_feature: MA Experiment 108597 PARAMETER Experiment Name: Zm_100uM_ABA_P Parameter: Plant Line Value: 35A19
  misc_feature: MA Experiment 108597 PARAMETER Experiment Name: Zm_100uM_ABA_P Parameter: Timepoint (hr) Value: 24
  misc_feature: MA Experiment 108597 PARAMETER Experiment Name: Zm_100uM_ABA_P Parameter: Tissue Value: Aerial
  misc_feature: MA Experiment 108597 PARAMETER Experiment Name: Zm_100uM_ABA_P Parameter: Treatment Value: 100uM ABA vs. No Treatment
  misc_feature: MA Experiment ID: 108687 Result: Down-regulated in Transcription
  misc_feature: MA Experiment 108687 PARAMETER Experiment Name: Zm_Embryos-Flowers__P Parameter: Tissue Value: Embryo vs. Aerial+
  misc_feature: MA Experiment ID: 20000534 Result: Up-regulated in Transcription
  misc_feature: MA Experiment 20000534 PARAMETER Experiment Name: Zm_Hybrid_Pollen_P Parameter: Age (day) Value: 8
  misc_feature: MA Experiment 20000534 PARAMETER Experiment Name: Zm_Hybrid_Pollen_P Parameter: Organism Value: Zea mays
  misc_feature: MA Experiment 20000534 PARAMETER Experiment Name: Zm_Hybrid_Pollen_P Parameter: Plant Line Value: 35A19
  misc_feature: MA Experiment 20000534 PARAMETER Experiment Name: Zm_Hybrid_Pollen_P Parameter: Tissue Value: Pollen vs. Aerial
gactcgtcctcttccctcgccgcgagctccgggttcccctgcgcatagctaggccaagccaggtataccccaaccatcgcatgggagccgcgactgccccgacgaagcggagacgcggccccagcaagacgcaggaggaggccatggcgcgcgcgagcccggaggcgcggcggcgaccgcggccgcgcctggtgggctatgaggagctgccggagtacctcaaggacaacgagtacatccgcgggcactaccgcgccgagtggcccgtccgcgacgcgctcctcagcgccttcgcctggcacaacgagacgctcaacgtctggacgcatctgggagggttcctgttcttcctagcgctcgcggtcgccggaggacggaaggaggccgccgacggtgccgctccgggtatcatgaggttcgttgtgagactagattcatggggcagcgaccatccgggccagccgaggcacgacgacgccggggcatcgctgcccagtgtgccgcggtggccgcggacggtgttcctggtgggggccatgtcgtgcctcgccatcagcgcggcggcgcacctgctggcgtgccactcgcggcgcgccagcgcggtgttctggcagctggactacgcgggcatctccgtgatgatcgtcgcctccttcgtgccgccggtgtactacgccttcctctgccacccgccggcgcgggcggcctacctgtgcgccatcgcggcgctgggcgcgctggtggtggccgcgctgctctccccgtcctgctcgtccccgcgctaccgccgcctccgcgcggcgctgttcctggccatgggcctgtcgggcgtcgtcccggcgctgcacgcgctctggctcaactggggccacgccgcctgctacctggcgctgggcatcgaggtcgtcatgggcctcacctacgccacgggcgcctggttctacgtcagccgcgtgccggagaagtggcgacccggggtgttcgacgtcgtcggccacagccaccagatcttccacgtcctcgtgctcgtcggcgccgtcacgcactacgtcgccgtcgccgtgctcatccactggcgggagaaggtggccgtcgcctgtggcgccgcgtcggcgtaggctcacctgtttggttggctcactcaacaaccattcgaatggcaaaccaagtagtcgcaacatagatcagctctagagtttgagtgtgaccttcgacgatttataatttaattgatggggtgattgagtatggtggttcattagttcatgagatttatctgtcgagtgagtgcgtgcctcagatttccagaccttttgtttccagcctactcaactttttgtcccgtc

SEQ ID NO: 2878 - protein, 371 aa, Zea mays subsp. mays
  peptide (1)..(371): Ceres Seq. ID no. 12356017
  misc_feature (97)..(350): Pfam Name: Uncharacterised protein family (Hly-III / UPF0073) Pfam Description: Uncharacterised protein family (Hly-III /
  misc_feature (62)..(108): Homolog of NCBI NO: 25309925 NR Description: hypothetical protein At2g24150 [imported] -
  misc_feature (185)..(367): Homolog of NCBI NO: 25309925 NR Description: hypothetical protein At2g24150 [imported] -
  misc_feature (19)..(122): Homolog of NCBI NO: 15241302 NR Description: putative protein
  misc_feature (165)..(362): Homolog of NCBI NO: 15241302 NR Description: putative protein
  misc_feature (62)..(367): Homolog of NCBI NO: 18400468 NR Description: expressed protein
  misc_feature (62)..(367): Homolog of NCBI NO: 13272399 NR Description: hypothetical protein [Arabidopsis thaliana]
  misc_feature (35)..(133): Homolog of NCBI NO: 30688829 NR Description: expressed protein [Arabidopsis thaliana]
  misc_feature (165)..(366): Homolog of NCBI NO: 30688829 NR Description: expressed protein [Arabidopsis thaliana]
  misc_feature (35)..(133): Homolog of NCBI NO: 18377749 NR Description: unknown protein [Arabidopsis thaliana]
  misc_feature (165)..(366): Homolog of NCBI NO: 18377749 NR Description: unknown protein [Arabidopsis thaliana]
LVLFPRRELRVPLRIARPSQVYPNHRMGAATAPTKRRRGPSKTQEEAMARASPEARRRPRPRLVGYEELPEYLKDNEYIRGHYRAEWPVRDALLSAFAWHNETLNVWTHLGGFLFFLALAVAGGRKEAADGAAPGIMRFVVRLDSWGSDHPGQPRHDDAGASLPSVPRWPRTVFLVGAMSCLAISAAAHLLACHSRRASAVFWQLDYAGISVMIVASFVPPVYYAFLCHPPARAAYLCAIAALGALVVAALLSPSCSSPRYRRLRAALFLAMGLSGVVPALHALWLNWGHAACYLALGIEVVMGLTYATGAWFYVSRVPEKWRPGVFDVVGHSHQIFHVLVLVGAVTHYVAVAVLIHWREKVAVACGAASA

SEQ ID NO: 2879 - protein, 345 aa, Zea mays subsp. mays
  peptide (1)..(345): Ceres Seq. ID no. 12356018
  misc_feature (71)..(324): Pfam Name: Uncharacterised protein family (Hly-III / UPF0073) Pfam Description: Uncharacterised protein family (Hly-III /
  misc_feature (36)..(82): Homolog of NCBI NO: 25309925 NR Description: hypothetical protein At2g24150 [imported] -
  misc_feature (159)..(341): Homolog of NCBI NO: 25309925 NR Description: hypothetical protein At2g24150 [imported] -
  misc_feature (1)..(96): Homolog of NCBI NO: 15241302 NR Description: putative protein
  misc_feature (139)..(336): Homolog of NCBI NO: 15241302 NR Description: putative protein
  misc_feature (36)..(341): Homolog of NCBI NO: 18400468 NR Description: expressed protein
  misc_feature (36)..(341): Homolog of NCBI NO: 13272399 NR Description: hypothetical protein [Arabidopsis thaliana]
  misc_feature (9)..(107): Homolog of NCBI NO: 30688829 NR Description: expressed protein [Arabidopsis thaliana]
  misc_feature (139)..(340): Homolog of NCBI NO: 30688829 NR Description: expressed protein [Arabidopsis thaliana]
  misc_feature (9)..(107): Homolog of NCBI NO: 18377749 NR Description: unknown protein [Arabidopsis thaliana]
  misc_feature (139)..(340): Homolog of NCBI NO: 18377749 NR Description: unknown protein [Arabidopsis thaliana]
MGAATAPTKRRRGPSKTQEEAMARASPEARRRPRPRLVGYEELPEYLKDNEYIRGHYRAEWPVRDALLSAFAWHNETLNVWTHLGGFLFFLALAVAGGRKEAADGAAPGIMRFVVRLDSWGSDHPGQPRHDDAGASLPSVPRWPRTVFLVGAMSCLAISAAAHLLACHSRRASAVFWQLDYAGISVMIVASFVPPVYYAFLCHPPARAAYLCAIAALGALVVAALLSPSCSSPRYRRLRAALFLAMGLSGVVPALHALWLNWGHAACYLALGIEVVMGLTYATGAWFYVSRVPEKWRPGVFDVVGHSHQIFHVLVLVGAVTHYVAVAVLIHWREKVAVACGAASA

SEQ ID NO: 2880 - protein, 324 aa, Zea mays subsp. mays
  peptide (1)..(324): Ceres Seq. ID no. 12356019
  misc_feature (50)..(303): Pfam Name: Uncharacterised protein family (Hly-III / UPF0073) Pfam Description: Uncharacterised protein family (Hly-III /
  misc_feature (15)..(61): Homolog of NCBI NO: 25309925 NR Description: hypothetical protein At2g24150 [imported] -
  misc_feature (138)..(320): Homolog of NCBI NO: 25309925 NR Description: hypothetical protein At2g24150 [imported] -
  misc_feature (1)..(75): Homolog of NCBI NO: 15241302 NR Description: putative protein
  misc_feature (118)..(315): Homolog of NCBI NO: 15241302 NR Description: putative protein
  misc_feature (15)..(320): Homolog of NCBI NO: 18400468 NR Description: expressed protein
  misc_feature (15)..(320): Homolog of NCBI NO: 13272399 NR Description: hypothetical protein [Arabidopsis thaliana]
  misc_feature (1)..(86): Homolog of NCBI NO: 30688829 NR Description: expressed protein [Arabidopsis thaliana]
  misc_feature (118)..(319): Homolog of NCBI NO: 30688829 NR Description: expressed protein [Arabidopsis thaliana]
  misc_feature (1)..(86): Homolog of NCBI NO: 18377749 NR Description: unknown protein [Arabidopsis thaliana]
  misc_feature (118)..(319): Homolog of NCBI NO: 18377749 NR Description: unknown protein [Arabidopsis thaliana]
MARASPEARRRPRPRLVGYEELPEYLKDNEYIRGHYRAEWPVRDALLSAFAWHNETLNVWTHLGGFLFFLALAVAGGRKEAADGAAPGIMRFVVRLDSWGSDHPGQPRHDDAGASLPSVPRWPRTVFLVGAMSCLAISAAAHLLACHSRRASAVFWQLDYAGISVMIVASFVPPVYYAFLCHPPARAAYLCAIAALGALVVAALLSPSCSSPRYRRLRAALFLAMGLSGVVPALHALWLNWGHAACYLALGIEVVMGLTYATGAWFYVSRVPEKWRPGVFDVVGHSHQIFHVLVLVGAVTHYVAVAVLIHWREKVAVACGAASA

SEQ ID NO: 2881 - DNA, 2015 bp, Zea mays subsp. mays
  misc_feature (1)..(2015): Ceres Seq. ID no. 12359708
  misc_feature: MA Experiment ID: 108529 Result: Down-regulated in Transcription
  misc_feature: MA Experiment 108529 PARAMETER Experiment Name: Zm_Imbibed_Seeds_P Parameter: Age (day) Value: 5 vs. 2
  misc_feature: MA Experiment 108529 PARAMETER Experiment Name: Zm_Imbibed_Seeds_P Parameter: Organism Value: Zea mays
  misc_feature: MA Experiment 108529 PARAMETER Experiment Name: Zm_Imbibed_Seeds_P Parameter: Plant Line Value: 35A19
  misc_feature: MA Experiment 108529 PARAMETER Experiment Name: Zm_Imbibed_Seeds_P Parameter: Tissue Value: Roots vs. Embryo
  misc_feature: MA Experiment ID: 108530 Result: Down-regulated in Transcription
  misc_feature: MA Experiment 108530 PARAMETER Experiment Name: Zm_Imbibed_Seeds_P Parameter: Age (day) Value: 6 vs. 2
  misc_feature: MA Experiment 108530 PARAMETER Experiment Name: Zm_Imbibed_Seeds_P Parameter: Organism Value: Zea mays
  misc_feature: MA Experiment 108530 PARAMETER Experiment Name: Zm_Imbibed_Seeds_P Parameter: Plant Line Value: 35A19
  misc_feature: MA Experiment 108530 PARAMETER Experiment Name: Zm_Imbibed_Seeds_P Parameter: Tissue Value: Aerial vs. Embryo
agccaaatcggcctatagatcaaacgctgcactgtagggagcgtgaagccagcggcgaatggaatccctagccgccacctccgtgttcgcgccctcccgcgtcgccgtcccggcggcgcgggccctggttagggcggggacggtggtaccaaccaggcggacgagcagccggagcggaaccagcggggtgaaatgctctgctgccgtgacgccgcaggcgagcccagtgattagcaggagcgctgcggcggcgaaggcggcggaggaggacaagaggcggttcttcgaggcggcggcgcgggggagcgggaaggggaacctggtgcccatgtgggagtgcatcgtgtcggaccatctcacccccgtgctcgcctaccgctgcctcgtccccgaggacaacgtcgacgcccccagcttcctcttcgagtccgtcgagcaggggccccagggcaccaccaacgtcggccgctacagcatggtgggagcccacccagtgatggagattgtggccaaagaccacaaggttacgatcatggaccacgagaagagccaagtgacagagcaggtagtggacgacccgatgcagatcccgaggaccatgatggagggatggcacccacagcagatcgacgagctccctgaatccttctccggtggatgggttgggttcttttcctatgatacggttaggtatgttgagaagaagaagctaccgttctccagtgctcctcaggacgataggaaccttcctgatgtgcacttgggactctatgatgatgttctagtcttcgataatgttgagaagaaagtatatgttatccattgggtcaatgtggaccggcatgcatctgttgaggaagcataccaagatggcaggtcccgactaaacatgttgctatctaaagtgcacaattccaatgtccccacactctctcctggatttgtgaagctgcacacacgcaagtttggtacacctttgaacaagtcgaccatgacaagtgatgagtataagaatgctgttctgcaggctaaggaacatattatggctggggatatcttccagattgttttaagccagaggttcgagagacgaacatatgccaacccatttgaggtttatcgagcattacggattgtgaatcctagcccatacatggcgtatgtacaggcaagaggctgtgtattggttgcgtctagtcctgaaattcttacacgagtcagtaaggggaagattattaatcgaccacttgctggaactgttcgaaggggcaagacagagaaggaagatcaaatgcaagagcagcaactgttaagtgatgaaaaacagtgtgccgagcacataatgcttgtggacttgggaaggaatgatgttggcaaggtatccaaaccaggatcagtgaaggtggagaagttgatgaacattgagagatactcccatgttatgcacatcagctcaacggttagtggacagttggatgatcatctccagagttgggatgccttgagagctgccttgcccgttggaacagtcagtggtgcaccaaaggtgaaggccatggagttgattgataagttggaagttacgaggcgaggaccatatagtggtggtctaggaggaatatcgtttgatggtgacatgcaaattgcactttctctccgcaccatcgtattctcaacagcgccgagccacaacacgatgtactcatacaaagacgcagataggcgtcgggagtgggtcgctcatcttcaggctggtgcaggcattgttgccgacagtagcccagatgacgaacaacgtgaatgcgagaataaggctgctgcactagctcgggccatcgatcttgcagagtcagcttttgtagacaaagaatagtgtgctatggttatcgtttagttcttgttcatgtttcttttacccactttccgttaaaaaaagatgtcattagtgggtggagaaaagcaataagactgttctctagagaaccgaagaaatatggaaattgaggttatggctc

SEQ ID NO: 2882 - protein, 604 aa, Zea mays subsp. mays
  peptide (1)..(604): Ceres Seq. ID no. 12359709
  misc_feature (313)..(593): Pfam Name: chorismate binding enzyme Pfam Description: chorismate binding enzyme
  misc_feature (46)..(603): Homolog of NCBI NO: 12830362 NR Description: anthranilate synthase alpha subunit [Catharanthus
  misc_feature (1)..(603): Homolog of NCBI NO: 11268466 NR Description: anthranilate synthase (EC 4.1.3.27) alpha chain
  misc_feature (35)..(603): Homolog of NCBI NO: 960289 NR Description: anthranilate synthase alpha subunit
  misc_feature (76)..(602): Homolog of NCBI NO: 320553 NR Description: anthranilate synthase (EC 4.1.3.27) alpha-2 chain
  misc_feature (65)..(603): Homolog of NCBI NO: 5360657 NR Description: anthranilate synthase alpha 1 subunit
  misc_feature (65)..(603): Homolog of NCBI NO: 34897346 NR Description: anthranilate synthase alpha 1 subunit [Oryza
  misc_feature (76)..(602): Homolog of NCBI NO: 15227604 NR Description: anthranilate synthase, alpha subunit; protein id:
  misc_feature (29)..(601): Homolog of NCBI NO: 7436743 NR Description: anthranilate synthase (EC 4.1.3.27) alpha-2 chain
  misc_feature (1)..(604): Homolog of NCBI NO: 34901980 NR Description: putative anthraniliate synthase alpha 2 subunit
  misc_feature (1)..(604): Homolog of NCBI NO: 5360659 NR Description: anthranilate synthase alpha 2 subunit
MESLAATSVFAPSRVAVPAARALVRAGTVVPTRRTSSRSGTSGVKCSAAVTPQASPVISRSAAAAKAAEEDKRRFFEAAARGSGKGNLVPMWECIVSDHLTPVLAYRCLVPEDNVDAPSFLFESVEQGPQGTTNVGRYSMVGAHPVMEIVAKDHKVTIMDHEKSQVTEQVVDDPMQIPRTMMEGWHPQQIDELPESFSGGWVGFFSYDTVRYVEKKKLPFSSAPQDDRNLPDVHLGLYDDVLVFDNVEKKVYVIHWVNVDRHASVEEAYQDGRSRLNMLLSKVHNSNVPTLSPGFVKLHTRKFGTPLNKSTMTSDEYKNAVLQAKEHIMAGDIFQIVLSQRFERRTYANPFEVYRALRIVNPSPYMAYVQARGCVLVASSPEILTRVSKGKIINRPLAGTVRRGKTEKEDQMQEQQLLSDEKQCAEHIMLVDLGRNDVGKVSKPGSVKVEKLMNIERYSHVMHISSTVSGQLDDHLQSWDALRAALPVGTVSGAPKVKAMELIDKLEVTRRGPYSGGLGGISFDGDMQIALSLRTIVFSTAPSHNTMYSYKDADRRREWVAHLQAGAGIVADSSPDDEQRECENKAAALARAIDLAESAFVDKE

SEQ ID NO: 2883 - protein, 514 aa, Zea mays subsp. mays
  peptide (1)..(514): Ceres Seq. ID no. 12359710
  misc_feature (223)..(503): Pfam Name: chorismate binding enzyme Pfam Description: chorismate binding enzyme
  misc_feature (1)..(511): Homolog of NCBI NO: 7436743 NR Description: anthranilate synthase (EC 4.1.3.27) alpha-2 chain
  misc_feature (1)..(512): Homolog of NCBI NO: 320553 NR Description: anthranilate synthase (EC 4.1.3.27) alpha-2 chain
  misc_feature (1)..(512): Homolog of NCBI NO: 15227604 NR Description: anthranilate synthase, alpha subunit; protein id:
  misc_feature (1)..(513): Homolog of NCBI NO: 5360657 NR Description: anthranilate synthase alpha 1 subunit
  misc_feature (1)..(513): Homolog of NCBI NO: 34897346 NR Description: anthranilate synthase alpha 1 subunit [Oryza
  misc_feature (1)..(513): Homolog of NCBI NO: 12830362 NR Description: anthranilate synthase alpha subunit [Catharanthus
  misc_feature (1)..(513): Homolog of NCBI NO: 11268466 NR Description: anthranilate synthase (EC 4.1.3.27) alpha chain
  misc_feature (1)..(513): Homolog of NCBI NO: 960289 NR Description: anthranilate synthase alpha subunit
  misc_feature (1)..(514): Homolog of NCBI NO: 34901980 NR Description: putative anthraniliate synthase alpha 2 subunit
  misc_feature (1)..(514): Homolog of NCBI NO: 5360659 NR Description: anthranilate synthase alpha 2 subunit
MWECIVSDHLTPVLAYRCLVPEDNVDAPSFLFESVEQGPQGTTNVGRYSMVGAHPVMEIVAKDHKVTIMDHEKSQVTEQVVDDPMQIPRTMMEGWHPQQIDELPESFSGGWVGFFSYDTVRYVEKKKLPFSSAPQDDRNLPDVHLGLYDDVLVFDNVEKKVYVIHWVNVDRHASVEEAYQDGRSRLNMLLSKVHNSNVPTLSPGFVKLHTRKFGTPLNKSTMTSDEYKNAVLQAKEHIMAGDIFQIVLSQRFERRTYANPFEVYRALRIVNPSPYMAYVQARGCVLVASSPEILTRVSKGKIINRPLAGTVRRGKTEKEDQMQEQQLLSDEKQCAEHIMLVDLGRNDVGKVSKPGSVKVEKLMNIERYSHVMHISSTVSGQLDDHLQSWDALRAALPVGTVSGAPKVKAMELIDKLEVTRRGPYSGGLGGISFDGDMQIALSLRTIVFSTAPSHNTMYSYKDADRRREWVAHLQAGAGIVADSSPDDEQRECENKAAALARAIDLAESAFVDKE

SEQ ID NO: 2884 - protein, 465 aa, Zea mays subsp. mays
  peptide (1)..(465): Ceres Seq. ID no. 12359711
  misc_feature (174)..(454): Pfam Name: chorismate binding enzyme Pfam Description: chorismate binding enzyme
  misc_feature (1)..(462): Homolog of NCBI NO: 7436743 NR Description: anthranilate synthase (EC 4.1.3.27) alpha-2 chain
  misc_feature (1)..(463): Homolog of NCBI NO: 320553 NR Description: anthranilate synthase (EC 4.1.3.27) alpha-2 chain
  misc_feature (1)..(463): Homolog of NCBI NO: 15227604 NR Description: anthranilate synthase, alpha subunit; protein id:
  misc_feature (1)..(464): Homolog of NCBI NO: 5360657 NR Description: anthranilate synthase alpha 1 subunit
  misc_feature (1)..(464): Homolog of NCBI NO: 34897346 NR Description: anthranilate synthase alpha 1 subunit [Oryza
  misc_feature (1)..(464): Homolog of NCBI NO: 12830362 NR Description: anthranilate synthase alpha subunit [Catharanthus
  misc_feature (1)..(464): Homolog of NCBI NO: 11268466 NR Description: anthranilate synthase (EC 4.1.3.27) alpha chain
  misc_feature (1)..(464): Homolog of NCBI NO: 960289 NR Description: anthranilate synthase alpha subunit
  misc_feature (1)..(465): Homolog of NCBI NO: 34901980 NR Description: putative anthraniliate synthase alpha 2 subunit
  misc_feature (1)..(465): Homolog of NCBI NO: 5360659 NR Description: anthranilate synthase alpha 2 subunit
MVGAHPVMEIVAKDHKVTIMDHEKSQVTEQVVDDPMQIPRTMMEGWHPQQIDELPESFSGGWVGFFSYDTVRYVEKKKLPFSSAPQDDRNLPDVHLGLYDDVLVFDNVEKKVYVIHWVNVDRHASVEEAYQDGRSRLNMLLSKVHNSNVPTLSPGFVKLHTRKFGTPLNKSTMTSDEYKNAVLQAKEHIMAGDIFQIVLSQRFERRTYANPFEVYRALRIVNPSPYMAYVQARGCVLVASSPEILTRVSKGKIINRPLAGTVRRGKTEKEDQMQEQQLLSDEKQCAEHIMLVDLGRNDVGKVSKPGSVKVEKLMNIERYSHVMHISSTVSGQLDDHLQSWDALRAALPVGTVSGAPKVKAMELIDKLEVTRRGPYSGGLGGISFDGDMQIALSLRTIVFSTAPSHNTMYSYKDADRRREWVAHLQAGAGIVADSSPDDEQRECENKAAALARAIDLAESAFVDKE

SEQ ID NO: 2885 - DNA, 1906 bp, Zea mays subsp. mays
  misc_feature (1)..(1906): Ceres Seq. ID no. 12352137
  misc_feature: MA Experiment ID: 108522 Result: Up-regulated in Transcription
  misc_feature: MA Experiment 108522 PARAMETER Experiment Name: Zm_42deg_Heat_P Parameter: Age (day) Value: 8
  misc_feature: MA Experiment 108522 PARAMETER Experiment Name: Zm_42deg_Heat_P Parameter: Organism Value: Zea mays
  misc_feature: MA Experiment 108522 PARAMETER Experiment Name: Zm_42deg_Heat_P Parameter: Plant Line Value: 35A19
  misc_feature: MA Experiment 108522 PARAMETER Experiment Name: Zm_42deg_Heat_P Parameter: Temperature (deg C) Value: 42 vs. 22
  misc_feature: MA Experiment 108522 PARAMETER Experiment Name: Zm_42deg_Heat_P Parameter: Timepoint (hr) Value: 1
  misc_feature: MA Experiment 108522 PARAMETER Experiment Name: Zm_42deg_Heat_P Parameter: Tissue Value: Aerial
  misc_feature: MA Experiment ID: 108687 Result: Down-regulated in Transcription
  misc_feature: MA Experiment 108687 PARAMETER Experiment Name: Zm_Embryos-Flowers__P Parameter: Tissue Value: Embryo vs. Aerial+
aactaaccaccacacacacaggcaggaagaagccgactgaggctggccggtcgtgctttgttcttcttcttttctccgattcttttttttttactgacggctttggcagtagcgggcgcacacacttatactgccatttaacattgattgaggttgttttgaggtggcctcgtggtgaagaaaggcgggagctggagagcaacgagacaagcacggcggtgtgcgtgcgcacaggcactagagtgagacagctctagaagagagcaagccgccgccgccgccgcatcatcgtcagaagcggccactcctacctctgatcctgatacaaaatccaggccagaaggcaggagcctccaaaagagatccactcccccggatggcttcttgcttctgcttccgcagacgccgccgcccaatcattgcctcctctgtccccttattcctcctcctcgtctccttcctcgcctcggcctcggcctcttccgcgacgacgacgaagctgctaggcagcggcaataatgccacgcggcgggtggcgttcagctcggaggagctgcgcgggttgcggagcatcacggcccggcttgcgcggctcagggacgcgtccgtcaagacgatccagagccccgacggcgacgtcatcgactgcgtgccggcgcacctgcagccggcgttcgagcaccccaagctgaggagccagaagccagaggaggagcccgaagagaggccgaggagcagcgctggccgcttctccgacgctggccaggacgaggacgacgacccgttgccgcaggtgtggcggcgctccggcgagtcctgcccggaggggaccataccagtgcggcgaaccacggaggacgacgtgctcagggccaccgcctcttccgccacccggttcgggatgaaggcccgcggtgcggggctcgggttcgcgcggcgcgactccaccggtggcggccacgagcacgcggtggggtacgtgaccggcgggcagttctacggcgccaaggcgagcctgaacgtgtggccggcgcaggtggcgtcgccggcggagttcagcctctcgcagatctgggtcatctccggcgccttcggcaacgacctcaacaccatcgaggccggctggcaggtcagccctcagttgtacggcgacaacagccccaggttcttcacctactggacagacgacgcgtaccaggagacgggctgctacaacctccactgctcgggcttcgtgcagaccagcagccgcgtggccatcggcgccgccatctcgcccgtctcctcctacgccggccgccagttcgacgtcacgcttctcatctggaaggacccgcgccggggccactggtggctgcagctcggctccggcgcgctcgtcggctactggccctccgcgctcttcacgcacctcggctcgcgcgccgacatggtgcagttcgggggcgaggtcgtcaacgcgcgccccgccggcgcgccgcacacgcccacgcagatgggctccggccgcttccccgccgagggatacgcgcgcgccgcatacttccgcaacgtgcagctcgtcgactgggacaacaacctcgtcccggcccgccgggctccgcctgctcgccgaccggccgggatgctatgacatcgccggcggcagcggcggcgcgtggggcacctacttctattacggcgggcccggcaggaacgcacggtgcccgtagctttatagtattagctaggaactgaatcgagtgcatgggatgggtgttgtacgtgtttttcgtacgtgcgcactcaagcacacattagcagaggctgatttctatatattactccaaatgagtctgcgttcacttttttttatctctccatgtgaatatgatgccgttgtgatcatctaactatttgctcattt

SEQ ID NO: 2886 - protein, 418 aa, Zea mays subsp. mays
  peptide (1)..(418): Ceres Seq. ID no. 12352138
  misc_feature (207)..(403): Pfam Name: Arabidopsis proteins of unknown function Pfam Description: Arabidopsis proteins of unknown function
  misc_feature (24)..(405): Homolog of NCBI NO: 15528706 NR Description: P0583G08.7 [Oryza sativa (japonica
  misc_feature (35)..(405): Homolog of NCBI NO: 28416687 NR Description: At1g70550 [Arabidopsis thaliana]
  misc_feature (35)..(405): Homolog of NCBI NO: 25345697 NR Description: unknown protein F5A18.27 [imported] - Arabidopsis
  misc_feature (16)..(404): Homolog of NCBI NO: 34913794 NR Description: OSJNBa0026J14.25 [Oryza sativa (japonica
  misc_feature (18)..(404): Homolog of NCBI NO: 21389708 NR Description: putative carboxyl-terminal proteinase [Gossypium
  misc_feature (8)..(115): Homolog of NCBI NO: 6573746 NR Description: F20B24.18 [Arabidopsis thaliana]
  misc_feature (134)..(405): Homolog of NCBI NO: 6573746 NR Description: F20B24.18 [Arabidopsis thaliana]
  misc_feature (42)..(406): Homolog of NCBI NO: 15240622 NR Description: putative protein
  misc_feature (6)..(405): Homolog of NCBI NO: 30698726 NR Description: expressed protein [Arabidopsis thaliana]
  misc_feature (8)..(405): Homolog of NCBI NO: 15220207 NR Description: putative carboxyl-terminal peptidase; protein id:
MASCFCFRRRRRPIIASSVPLFLLLVSFLASASASSATTTKLLGSGNNATRRVAFSSEELRGLRSITARLARLRDASVKTIQSPDGDVIDCVPAHLQPAFEHPKLRSQKPEEEPEERPRSSAGRFSDAGQDEDDDPLPQVWRRSGESCPEGTIPVRRTTEDDVLRATASSATRFGMKARGAGLGFARRDSTGGGHEHAVGYVTGGQFYGAKASLNVWPAQVASPAEFSLSQIWVISGAFGNDLNTIEAGWQVSPQLYGDNSPRFFTYWTDDAYQETGCYNLHCSGFVQTSSRVAIGAAISPVSSYAGRQFDVTLLIWKDPRRGHWWLQLGSGALVGYWPSALFTHLGSRADMVQFGGEVVNARPAGAPHTPTQMGSGRFPAEGYARAAYFRNVQLVDWDNNLVPARRAPPARRPAGML

SEQ ID NO: 2887 - protein, 243 aa, Zea mays subsp. mays
  peptide (1)..(243): Ceres Seq. ID no. 12352139
  misc_feature (32)..(228): Pfam Name: Arabidopsis proteins of unknown function Pfam Description: Arabidopsis proteins of unknown function
  misc_feature (1)..(229): Homolog of NCBI NO: 30688348 NR Description: expressed protein [Arabidopsis thaliana]
  misc_feature (1)..(230): Homolog of NCBI NO: 15528706 NR Description: P0583G08.7 [Oryza sativa (japonica
  misc_feature (1)..(230): Homolog of NCBI NO: 28416687 NR Description: At1g70550 [Arabidopsis thaliana]
  misc_feature (1)..(230): Homolog of NCBI NO: 25345697 NR Description: unknown protein F5A18.27 [imported] - Arabidopsis
  misc_feature (1)..(229): Homolog of NCBI NO: 34913794 NR Description: OSJNBa0026J14.25 [Oryza sativa (japonica
  misc_feature (1)..(229): Homolog of NCBI NO: 21389708 NR Description: putative carboxyl-terminal proteinase [Gossypium
  misc_feature (1)..(230): Homolog of NCBI NO: 6573746 NR Description: F20B24.18 [Arabidopsis thaliana]
  misc_feature (1)..(231): Homolog of NCBI NO: 15240622 NR Description: putative protein
  misc_feature (1)..(230): Homolog of NCBI NO: 30698726 NR Description: expressed protein [Arabidopsis thaliana]
  misc_feature (1)..(230): Homolog of NCBI NO: 15220207 NR Description: putative carboxyl-terminal peptidase; protein id:
MKARGAGLGFARRDSTGGGHEHAVGYVTGGQFYGAKASLNVWPAQVASPAEFSLSQIWVISGAFGNDLNTIEAGWQVSPQLYGDNSPRFFTYWTDDAYQETGCYNLHCSGFVQTSSRVAIGAAISPVSSYAGRQFDVTLLIWKDPRRGHWWLQLGSGALVGYWPSALFTHLGSRADMVQFGGEVVNARPAGAPHTPTQMGSGRFPAEGYARAAYFRNVQLVDWDNNLVPARRAPPARRPAGML

SEQ ID NO: 2888 - DNA, 804 bp, Zea mays subsp. mays
  misc_feature (1)..(804): Ceres Seq. ID no. 12351411
  misc_feature: MA Experiment ID: 108522 Result: Up-regulated in Transcription
  misc_feature: MA Experiment 108522 PARAMETER Experiment Name: Zm_42deg_Heat_P Parameter: Age (day) Value: 8
  misc_feature: MA Experiment 108522 PARAMETER Experiment Name: Zm_42deg_Heat_P Parameter: Organism Value: Zea mays
  misc_feature: MA Experiment 108522 PARAMETER Experiment Name: Zm_42deg_Heat_P Parameter: Plant Line Value: 35A19
  misc_feature: MA Experiment 108522 PARAMETER Experiment Name: Zm_42deg_Heat_P Parameter: Temperature (deg C) Value: 42 vs. 22
  misc_feature: MA Experiment 108522 PARAMETER Experiment Name: Zm_42deg_Heat_P Parameter: Timepoint (hr) Value: 1
  misc_feature: MA Experiment 108522 PARAMETER Experiment Name: Zm_42deg_Heat_P Parameter: Tissue Value: Aerial
  misc_feature: MA Experiment ID: 108523 Result: Up-regulated in Transcription
  misc_feature: MA Experiment 108523 PARAMETER Experiment Name: Zm_42deg_Heat_P Parameter: Age (day) Value: 8
  misc_feature: MA Experiment 108523 PARAMETER Experiment Name: Zm_42deg_Heat_P Parameter: Organism Value: Zea mays
  misc_feature: MA Experiment 108523 PARAMETER Experiment Name: Zm_42deg_Heat_P Parameter: Plant Line Value: 35A19
  misc_feature: MA Experiment 108523 PARAMETER Experiment Name: Zm_42deg_Heat_P Parameter: Temperature (deg C) Value: 42 vs. 22
  misc_feature: MA Experiment 108523 PARAMETER Experiment Name: Zm_42deg_Heat_P Parameter: Timepoint (hr) Value: 6
  misc_feature: MA Experiment 108523 PARAMETER Experiment Name: Zm_42deg_Heat_P Parameter: Tissue Value: Aerial
attcagtccggccacgcactcaagcaatcatcgttctttcgaaacgcaacagcaagaagaacaaccacgcacatcgccgttccatcgattcatgggtcgcctcggcaccgcgacgacgctggtggccctcgcggcctgcctcctctactgctctgcttcgtcggcgacgctggcctacgccggcgctgcgccgacggaccttggggcgctgcggccgacgtgcgacgggacgcttgggcagtgcgcggtggggagcgacgaggagcaggaggtgggcggcagcgacgcgttcctgcggcgggcgctggcgcagcggcagcccaccaaccggtacatcagctacgcggcgctgcgcgcggatcaggtgccgtgcaaccagcgcggccgctcttactacagcaactgcgcgtcgcagaagcccgccaacccctaccgccgcggatgctccgccatcacccgatgcgcacgcaacaccaactgacccatccgatttatcattcctagctaaattctcatccatgacggttgacggcgtgaccgtatgatttgaggattatatataaatatattgggcgcatccaagagatccagccatggcagatgtggatccatccattgacgtgcaggtccatccagaggtagaggaggaagacagggaacacatgtccaagtgttgtttggattgacatggatgtttccacttttttgtgttaatttatctttttgtgatgaatgatcgacgtctacgtatgtaccataagtactagtagttccattattgttttgattttttatggcttttgc

SEQ ID NO: 2889 - protein, 180 aa, Zea mays subsp. mays
  peptide (1)..(180): Ceres Seq. ID no. 12351412
SVRPRTQAIIVLSKRNSKKNNHAHRRSIDSWVASAPRRRWWPSRPASSTALLRRRRWPTPALRRRTLGRCGRRATGRLGSARWGATRSRRWAAATRSCGGRWRSGSPPTGTSATRRCARIRCRATSAAALTTATARRRSPPTPTAADAPPSPDAHATPTDPSDLSFLAKFSSMTVDGVTV

SEQ ID NO: 2890 - protein, 167 aa, Zea mays subsp. mays
  peptide (1)..(167): Ceres Seq. ID no. 12351413
IQSGHALKQSSFFRNATARRTTTHIAVPSIHGSPRHRDDAGGPRGLPPLLLCFVGDAGLRRRCADGPWGAAADVRRDAWAVRGGERRGAGGGRQRRVPAAGAGAAAAHQPVHQLRGAARGSGAVQPARPLLLQQLRVAEARQPLPPRMLRHHPMRTQHQLTHPIYHS

SEQ ID NO: 2891 - protein, 159 aa, Zea mays subsp. mays
  peptide (1)..(159): Ceres Seq. ID no. 12351414
  misc_feature (95)..(156): Pfam Name: Rapid ALkalinization Factor (RALF) Pfam Description: Rapid ALkalinization Factor (RALF)
  misc_feature (79)..(156): Homolog of NCBI NO: 15217877 NR Description: hypothetical protein; protein id: At1g28270.1
  misc_feature (43)..(154): Homolog of NCBI NO: 28628203 NR Description: rapid alkalinization factor 1 precursor
  misc_feature (29)..(157): Homolog of NCBI NO: 18401177 NR Description: expressed protein
  misc_feature (74)..(156): Homolog of NCBI NO: 18397246 NR Description: expressed protein
  misc_feature (59)..(154): Homolog of NCBI NO: 28628205 NR Description: rapid alkalinization factor 2 precursor
  misc_feature (56)..(159): Homolog of NCBI NO: 30685837 NR Description: expressed protein [Arabidopsis thaliana]
  misc_feature (41)..(154): Homolog of NCBI NO: 16566316 NR Description: RALF precursor [Nicotiana tabacum]
  misc_feature (35)..(156): Homolog of NCBI NO: 18414528 NR Description: Expressed protein
  misc_feature (40)..(154): Homolog of NCBI NO: 34902918 NR Description: unnamed protein product [Oryza sativa (japonica
  misc_feature (40)..(159): Homolog of NCBI NO: 34903676 NR Description: B1015E06.23 [Oryza sativa (japonica
FSPATHSSNHRSFETQQQEEQPRTSPFHRFMGRLGTATTLVALAACLLYCSASSATLAYAGAAPTDLGALRPTCDGTLGQCAVGSDEEQEVGGSDAFLRRALAQRQPTNRYISYAALRADQVPCNQRGRSYYSNCASQKPANPYRRGCSAITRCARNTN

SEQ ID NO: 2892 - protein, 129 aa, Zea mays subsp. mays
  peptide (1)..(129): Ceres Seq. ID no. 12351415
  misc_feature (65)..(126): Pfam Name: Rapid ALkalinization Factor (RALF) Pfam Description: Rapid ALkalinization Factor (RALF)
  misc_feature (49)..(126): Homolog of NCBI NO: 15217877 NR Description: hypothetical protein; protein id: At1g28270.1
  misc_feature (13)..(124): Homolog of NCBI NO: 28628203 NR Description: rapid alkalinization factor 1 precursor
  misc_feature (1)..(127): Homolog of NCBI NO: 18401177 NR Description: expressed protein
  misc_feature (44)..(126): Homolog of NCBI NO: 18397246 NR Description: expressed protein
  misc_feature (29)..(124): Homolog of NCBI NO: 28628205 NR Description: rapid alkalinization factor 2 precursor
  misc_feature (26)..(129): Homolog of NCBI NO: 30685837 NR Description: expressed protein [Arabidopsis thaliana]
  misc_feature (11)..(124): Homolog of NCBI NO: 16566316 NR Description: RALF precursor [Nicotiana tabacum]
  misc_feature (5)..(126): Homolog of NCBI NO: 18414528 NR Description: Expressed protein
  misc_feature (10)..(124): Homolog of NCBI NO: 34902918 NR Description: unnamed protein product [Oryza sativa (japonica
  misc_feature (10)..(129): Homolog of NCBI NO: 34903676 NR Description: B1015E06.23 [Oryza sativa (japonica
MGRLGTATTLVALAACLLYCSASSATLAYAGAAPTDLGALRPTCDGTLGQCAVGSDEEQEVGGSDAFLRRALAQRQPTNRYISYAALRADQVPCNQRGRSYYSNCASQKPANPYRRGCSAITRCARNTN

SEQ ID NO: 2893 - DNA, 1401 bp, Zea mays subsp. mays
  misc_feature (1)..(1401): Ceres Seq. ID no. 13493590
  misc_feature: MA Experiment ID: 108522 Result: Down-regulated in Transcription
  misc_feature: MA Experiment 108522 PARAMETER Experiment Name: Zm_42deg_Heat_P Parameter: Age (day) Value: 8
  misc_feature: MA Experiment 108522 PARAMETER Experiment Name: Zm_42deg_Heat_P Parameter: Organism Value: Zea mays
  misc_feature: MA Experiment 108522 PARAMETER Experiment Name: Zm_42deg_Heat_P Parameter: Plant Line Value: 35A19
  misc_feature: MA Experiment 108522 PARAMETER Experiment Name: Zm_42deg_Heat_P Parameter: Temperature (deg C) Value: 42 vs. 22
  misc_feature: MA Experiment 108522 PARAMETER Experiment Name: Zm_42deg_Heat_P Parameter: Timepoint (hr) Value: 1
  misc_feature: MA Experiment 108522 PARAMETER Experiment Name: Zm_42deg_Heat_P Parameter: Tissue Value: Aerial
  misc_feature: MA Experiment ID: 108529 Result: Down-regulated in Transcription
  misc_feature: MA Experiment 108529 PARAMETER Experiment Name: Zm_Imbibed_Seeds_P Parameter: Age (day) Value: 5 vs. 2
  misc_feature: MA Experiment 108529 PARAMETER Experiment Name: Zm_Imbibed_Seeds_P Parameter: Organism Value: Zea mays
  misc_feature: MA Experiment 108529 PARAMETER Experiment Name: Zm_Imbibed_Seeds_P Parameter: Plant Line Value: 35A19
  misc_feature: MA Experiment 108529 PARAMETER Experiment Name: Zm_Imbibed_Seeds_P Parameter: Tissue Value: Roots vs. Embryo
  misc_feature: MA Experiment ID: 108544 Result: Down-regulated in Transcription
  misc_feature: MA Experiment ID: 20000478 Result: Down-regulated in Transcription
  misc_feature: MA Experiment 20000478 PARAMETER Experiment Name: Zm_5mM_SA_P Parameter: Age (day) Value: 11
  misc_feature: MA Experiment 20000478 PARAMETER Experiment Name: Zm_5mM_SA_P Parameter: Organism Value: Zea mays
  misc_feature: MA Experiment 20000478 PARAMETER Experiment Name: Zm_5mM_SA_P Parameter: Plant Line Value: 35A19
  misc_feature: MA Experiment 20000478 PARAMETER Experiment Name: Zm_5mM_SA_P Parameter: Timepoint (hr) Value: 72
  misc_feature: MA Experiment 20000478 PARAMETER Experiment Name: Zm_5mM_SA_P Parameter: Tissue Value: Aerial
  misc_feature: MA Experiment 20000478 PARAMETER Experiment Name: Zm_5mM_SA_P Parameter: Treatment Value: 5mM SA vs. No Treatment
aatcgaaaaccaccacaggcacacacacctccctttttcattcgagttcgaggagaaggcggcggaggcggccatggagctcgacgagcaggccttcctggaggagatcctctccctgcgcagggacgcctgggactgcaatgtgtccatgggggacctcttcgccccggcggcggccgccgccattgactgctccttccacaaccagcaggcgcccaccgtcagcgtcctccccaccttcaccgcctcctgcgccgagccgccggccttcgactgcctcagcgaggtctacggcgccgccgccgcgttcggcgggcccaatgccggcgacgagatggcgttcctccacgtcgcggagcccaaggaggcgctgcagctggacgacaacgccggcctcggggtgtgcaaggtggagcccggcctggtggagagcgacggcggcggcgccgccgcgccgacgcccgcccctgcggcgtccaagaagaagaggaccgaggggatgccgtctaagaacctcatggccgagcgccgccgccgcaagcgcctcaacgaccgcctctccatgctgcgctccgtcgtgcccaagatcagcaagatggaccggacgtcgatcctgggcgacacgatcgactacatgaaggagctgctggagaggatcaagctgctgcaggaggagatcgagcagcagggggaggcgccggcgggcatgctcagcgtcttccgggagctcaaccccaacgagatggtggccaggaacacccccaagttggacgtggagcggaaggagggcggcgacacacgggtggagatctactgcggcgccaggccggggctgctgctgtccacggtgagcacgctggacgcgctagggctggacatccagcagtgcgtcgtcagctgcttcaacgacttcggcatgcacgcctcctgctccgagatgcagagggacatgatcagcgccgacgcgataaagcaggagctgttgaagaccgctggctatggcggaggctgcatgtagagggcatggcgcggctgtagcctggaggaaggagaagaagaggaggagcaggaggaggcggcaataaattcagctctattagacgacagcgctagtaacaaggagcagcagcagtatcggttcaggtccagtccagtagctgaaaaggcaggcagggcatgaggccagtgaagatatggcatgggggaactttttgcaatccaatctccccatcagaacccacttcgagttagcagtgtgtgtccgcctgaatctttctcctatatactgctgtatttaattagcaagagcaaagctctcactgcctttctaatgattgatcagaagtgcctttggcgaccccttgtctttctgggacatctatatataatgttcttcattct

SEQ ID NO: 2894 - protein, 338 aa, Zea mays subsp. mays
  peptide (1)..(338): Ceres Seq. ID no. 13493591
  misc_feature (168)..(216): Pfam Name: Helix-loop-helix DNA-binding domain Pfam Description: Helix-loop-helix DNA-binding domain
  misc_feature (239)..(335): Homolog of NCBI NO: 22331357 NR Description: bHLH protein family [Arabidopsis thaliana]
  misc_feature (128)..(245): Homolog of NCBI NO: 22331357 NR Description: bHLH protein family [Arabidopsis thaliana]
  misc_feature (159)..(335): Homolog of NCBI NO: 15222101 NR Description: bHLH protein [Arabidopsis thaliana]
  misc_feature (159)..(335): Homolog of NCBI NO: 25513489 NR Description: F13K23.12 protein - Arabidopsis thaliana
  misc_feature (136)..(310): Homolog of NCBI NO: 37536566 NR Description: hypothetical protein [Oryza sativa (japonica
  misc_feature (162)..(338): Homolog of NCBI NO: 20127062 NR Description: putative bHLH transcription factor [Arabidopsis
  misc_feature (162)..(338): Homolog of NCBI NO: 15238199 NR Description: bHLH protein [Arabidopsis thaliana]
  misc_feature (90)..(335): Homolog of NCBI NO: 22758263 NR Description: Putative bHLH transcription protein
  misc_feature (160)..(338): Homolog of NCBI NO: 21537346 NR Description: unknown [Arabidopsis thaliana]
  misc_feature (160)..(338): Homolog of NCBI NO: 18424973 NR Description: bHLH protein [Arabidopsis thaliana]
IENHHRHTHLPFSFEFEEKAAEAAMELDEQAFLEEILSLRRDAWDCNVSMGDLFAPAAAAAIDCSFHNQQAPTVSVLPTFTASCAEPPAFDCLSEVYGAAAAFGGPNAGDEMAFLHVAEPKEALQLDDNAGLGVCKVEPGLVESDGGGAAAPTPAPAASKKKRTEGMPSKNLMAERRRRKRLNDRLSMLRSVVPKISKMDRTSILGDTIDYMKELLERIKLLQEEIEQQGEAPAGMLSVFRELNPNEMVARNTPKLDVERKEGGDTRVEIYCGARPGLLLSTVSTLDALGLDIQQCVVSCFNDFGMHASCSEMQRDMISADAIKQELLKTAGYGGGCM

SEQ ID NO: 2895 - protein, 314 aa, Zea mays subsp. mays
  peptide (1)..(314): Ceres Seq. ID no. 13493592
  misc_feature (144)..(192): Pfam Name: Helix-loop-helix DNA-binding domain Pfam Description: Helix-loop-helix DNA-binding domain
  misc_feature (135)..(311): Homolog of NCBI NO: 25513489 NR Description: F13K23.12 protein - Arabidopsis thaliana
  misc_feature (112)..(286): Homolog of NCBI NO: 37536566 NR Description: hypothetical protein [Oryza sativa (japonica
  misc_feature (138)..(314): Homolog of NCBI NO: 20127062 NR Description: putative bHLH transcription factor [Arabidopsis
  misc_feature (138)..(314): Homolog of NCBI NO: 15238199 NR Description: bHLH protein [Arabidopsis thaliana]
  misc_feature (104)..(221): Homolog of NCBI NO: 22331357 NR Description: bHLH protein family [Arabidopsis thaliana]
  misc_feature (135)..(311): Homolog of NCBI NO: 15222101 NR Description: bHLH protein [Arabidopsis thaliana]
  misc_feature (215)..(311): Homolog of NCBI NO: 22331357 NR Description: bHLH protein family [Arabidopsis thaliana]
  misc_feature (66)..(311): Homolog of NCBI NO: 22758263 NR Description: Putative bHLH transcription protein
  misc_feature (136)..(314): Homolog of NCBI NO: 21537346 NR Description: unknown [Arabidopsis thaliana]
  misc_feature (136)..(314): Homolog of NCBI NO: 18424973 NR Description: bHLH protein [Arabidopsis thaliana]
MELDEQAFLEEILSLRRDAWDCNVSMGDLFAPAAAAAIDCSFHNQQAPTVSVLPTFTASCAEPPAFDCLSEVYGAAAAFGGPNAGDEMAFLHVAEPKEALQLDDNAGLGVCKVEPGLVESDGGGAAAPTPAPAASKKKRTEGMPSKNLMAERRRRKRLNDRLSMLRSVVPKISKMDRTSILGDTIDYMKELLERIKLLQEEIEQQGEAPAGMLSVFRELNPNEMVARNTPKLDVERKEGGDTRVEIYCGARPGLLLSTVSTLDALGLDIQQCVVSCFNDFGMHASCSEMQRDMISADAIKQELLKTAGYGGGCM

SEQ ID NO: 2896 - protein, 289 aa, Zea mays subsp. mays
  peptide (1)..(289): Ceres Seq. ID no. 13493593
  misc_feature (119)..(167): Pfam Name: Helix-loop-helix DNA-binding domain Pfam Description: Helix-loop-helix DNA-binding domain
  misc_feature (190)..(286): Homolog of NCBI NO: 22331357 NR Description: bHLH protein family [Arabidopsis thaliana]
  misc_feature (79)..(196): Homolog of NCBI NO: 22331357 NR Description: bHLH protein family [Arabidopsis thaliana]
  misc_feature (110)..(286): Homolog of NCBI NO: 15222101 NR Description: bHLH protein [Arabidopsis thaliana]
  misc_feature (110)..(286): Homolog of NCBI NO: 25513489 NR Description: F13K23.12 protein - Arabidopsis thaliana
  misc_feature (87)..(261): Homolog of NCBI NO: 37536566 NR Description: hypothetical protein [Oryza sativa (japonica
  misc_feature (113)..(289): Homolog of NCBI NO: 20127062 NR Description: putative bHLH transcription factor [Arabidopsis
  misc_feature (113)..(289): Homolog of NCBI NO: 15238199 NR Description: bHLH protein [Arabidopsis thaliana]
  misc_feature (41)..(286): Homolog of NCBI NO: 22758263 NR Description: Putative bHLH transcription protein
  misc_feature (111)..(289): Homolog of NCBI NO: 21537346 NR Description: unknown [Arabidopsis thaliana]
  misc_feature (111)..(289): Homolog of NCBI NO: 18424973 NR Description: bHLH protein [Arabidopsis thaliana]
MGDLFAPAAAAAIDCSFHNQQAPTVSVLPTFTASCAEPPAFDCLSEVYGAAAAFGGPNAGDEMAFLHVAEPKEALQLDDNAGLGVCKVEPGLVESDGGGAAAPTPAPAASKKKRTEGMPSKNLMAERRRRKRLNDRLSMLRSVVPKISKMDRTSILGDTIDYMKELLERIKLLQEEIEQQGEAPAGMLSVFRELNPNEMVARNTPKLDVERKEGGDTRVEIYCGARPGLLLSTVSTLDALGLDIQQCVVSCFNDFGMHASCSEMQRDMISADAIKQELLKTAGYGGGCM

SEQ ID NO: 2897 - DNA, 1121 bp, Zea mays subsp. mays
  misc_feature (1)..(1121): Ceres Seq. ID no. 12373836
  misc_feature: MA Experiment ID: 108527 Result: Up-regulated in Transcription
  misc_feature: MA Experiment 108527 PARAMETER Experiment Name: Zm_5mM_NO_P Parameter: Age (day) Value: 8
  misc_feature: MA Experiment 108527 PARAMETER Experiment Name: Zm_5mM_NO_P Parameter: Organism Value: Zea mays
  misc_feature: MA Experiment 108527 PARAMETER Experiment Name: Zm_5mM_NO_P Parameter: Plant Line Value: 35A19
  misc_feature: MA Experiment 108527 PARAMETER Experiment Name: Zm_5mM_NO_P Parameter: Timepoint (hr) Value: 6
  misc_feature: MA Experiment 108527 PARAMETER Experiment Name: Zm_5mM_NO_P Parameter: Tissue Value: Aerial
  misc_feature: MA Experiment 108527 PARAMETER Experiment Name: Zm_5mM_NO_P Parameter: Treatment Value: 5mM NO vs. No Treatment
  misc_feature: MA Experiment ID: 20000478 Result: Up-regulated in Transcription
  misc_feature: MA Experiment 20000478 PARAMETER Experiment Name: Zm_5mM_SA_P Parameter: Age (day) Value: 11
  misc_feature: MA Experiment 20000478 PARAMETER Experiment Name: Zm_5mM_SA_P Parameter: Organism Value: Zea mays
  misc_feature: MA Experiment 20000478 PARAMETER Experiment Name: Zm_5mM_SA_P Parameter: Plant Line Value: 35A19
  misc_feature: MA Experiment 20000478 PARAMETER Experiment Name: Zm_5mM_SA_P Parameter: Timepoint (hr) Value: 72
  misc_feature: MA Experiment 20000478 PARAMETER Experiment Name: Zm_5mM_SA_P Parameter: Tissue Value: Aerial
  misc_feature: MA Experiment 20000478 PARAMETER Experiment Name: Zm_5mM_SA_P Parameter: Treatment Value: 5mM SA vs. No Treatment
gttcggcttcggtcctaccgccgccgcgtcgtgggaggataatcgaactgcttcccttctcgtcttccctaacctttccgtccttcccggattatttccatcaccagagcgtatcgcgtcgtctcctctctatccgattccgcccgcggacccaggctcccgcatggacgctgccggcggggtggaggccgccgccaacggcgggatcgagggctccgccgacccctgcagctcaggcggtgccggcgggtacaggcgctccgtccaccagatcgccggcggcgggaaagctgctgatatcatcttatggaggcgagcgcgtgttacatttggtgttatatttggtgctactctggcatggtggttgtttgagaagtctggactatcattattaactatctgctctgatatacttctcatcttgatagttctgcagttcataagggttaaaatagctggactgctagataggcagcctaggccactacctgagttagttttatcagaggagatggttagcaatgctgcggcttcattccgtgtgaaagtgaacagcatgctgatgatagcgcatgacattactcttggcaaggacttcaggctatttttccaggtcgtgattgtcttgtggctgttatctgtcattggaaatttctgctcgtctatcactcttgcttacataggaaccgttgctttggtcacaatgcctgcattgtacaacaagtaccagaggcctgttgataggtatgctgggatggtctaccggaacatttcgaggcattacaagatagttgatgagaatgtgatcagtagactaccgagaaggtttatcagagataaagaggactgatactctgaaaaatgaactcgctaagctagtcaggtaatcttttacctacattgtcagaccttacatggtgtgaaactatagagctacgaaaacagagaacggcatggaacctacagtagataccgttgcagtgtactcttgggcaaaggtttgagacgaaattaaaatgtatagctttctgtgttagctctttgcaacgaactggctaaatgttgttaaaaataacaaaagcaattgtcatgggaagttgaaaatgaagtggttgtaactg

SEQ ID NO: 2898 - protein, 282 aa, Zea mays subsp. mays
  peptide (1)..(282): Ceres Seq. ID no. 12373837
  misc_feature (83)..(281): Homolog of NCBI NO: 15236556 NR Description: putative protein
  misc_feature (85)..(281): Homolog of NCBI NO: 21592845 NR Description: unknown [Arabidopsis thaliana]
  misc_feature (85)..(281): Homolog of NCBI NO: 18401821 NR Description: expressed protein
  misc_feature (83)..(272): Homolog of NCBI NO: 15222616 NR Description: hypothetical protein
  misc_feature (83)..(281): Homolog of NCBI NO: 15237093 NR Description: putative protein
  misc_feature (83)..(281): Homolog of NCBI NO: 34909318 NR Description: OSJNBb0021A09.5 [Oryza sativa (japonica
  misc_feature (85)..(260): Homolog of NCBI NO: 38345298 NR Description: OSJNBa0043A12.26 [Oryza sativa (japonica
  misc_feature (45)..(281): Homolog of NCBI NO: 34904202 NR Description: P0492F05.25 [Oryza sativa (japonica
  misc_feature (98)..(281): Homolog of NCBI NO: 30681541 NR Description: reticulon family [Arabidopsis thaliana]
  misc_feature (55)..(281): Homolog of NCBI NO: 26450318 NR Description: unknown protein [Arabidopsis thaliana]
FGFGPTAAASWEDNRTASLLVFPNLSVLPGLFPSPERIASSPLYPIPPADPGSRMDAAGGVEAAANGGIEGSADPCSSGGAGGYRRSVHQIAGGGKAADIILWRRARVTFGVIFGATLAWWLFEKSGLSLLTICSDILLILIVLQFIRVKIAGLLDRQPRPLPELVLSEEMVSNAAASFRVKVNSMLMIAHDITLGKDFRLFFQVVIVLWLLSVIGNFCSSITLAYIGTVALVTMPALYNKYQRPVDRYAGMVYRNISRHYKIVDENVISRLPRRFIRDKED

SEQ ID NO: 2899 - protein, 228 aa, Zea mays subsp. mays
  peptide (1)..(228): Ceres Seq. ID no. 12373838
  misc_feature (29)..(227): Homolog of NCBI NO: 15236556 NR Description: putative protein
  misc_feature (31)..(227): Homolog of NCBI NO: 21592845 NR Description: unknown [Arabidopsis thaliana]
  misc_feature (31)..(227): Homolog of NCBI NO: 18401821 NR Description: expressed protein
  misc_feature (29)..(218): Homolog of NCBI NO: 15222616 NR Description: hypothetical protein
  misc_feature (29)..(227): Homolog of NCBI NO: 15237093 NR Description: putative protein
  misc_feature (29)..(227): Homolog of NCBI NO: 34909318 NR Description: OSJNBb0021A09.5 [Oryza sativa (japonica
  misc_feature (31)..(206): Homolog of NCBI NO: 38345298 NR Description: OSJNBa0043A12.26 [Oryza sativa (japonica
  misc_feature (1)..(227): Homolog of NCBI NO: 34904202 NR Description: P0492F05.25 [Oryza sativa (japonica
  misc_feature (44)..(227): Homolog of NCBI NO: 30681541 NR Description: reticulon family [Arabidopsis thaliana]
  misc_feature (1)..(227): Homolog of NCBI NO: 26450318 NR Description: unknown protein [Arabidopsis thaliana]
MDAAGGVEAAANGGIEGSADPCSSGGAGGYRRSVHQIAGGGKAADIILWRRARVTFGVIFGATLAWWLFEKSGLSLLTICSDILLILIVLQFIRVKIAGLLDRQPRPLPELVLSEEMVSNAAASFRVKVNSMLMIAHDITLGKDFRLFFQVVIVLWLLSVIGNFCSSITLAYIGTVALVTMPALYNKYQRPVDRYAGMVYRNISRHYKIVDENVISRLPRRFIRDKED

SEQ ID NO: 2900 - DNA, 1621 bp, Zea mays subsp. mays
  misc_feature (1)..(1621): Ceres Seq. ID no. 12368052
  misc_feature: MA Experiment ID: 108504 Result: Up-regulated in Transcription
  misc_feature: MA Experiment 108504 PARAMETER Experiment Name: Zm_Drought_P Parameter: Age (day) Value: 8
  misc_feature: MA Experiment 108504 PARAMETER Experiment Name: Zm_Drought_P Parameter: Organism Value: Zea mays
  misc_feature: MA Experiment 108504 PARAMETER Experiment Name: Zm_Drought_P Parameter: Plant Line Value: 35A19
  misc_feature: MA Experiment 108504 PARAMETER Experiment Name: Zm_Drought_P Parameter: Timepoint (hr) Value: 12
  misc_feature: MA Experiment 108504 PARAMETER Experiment Name: Zm_Drought_P Parameter: Tissue Value: Aerial
  misc_feature: MA Experiment 108504 PARAMETER Experiment Name: Zm_Drought_P Parameter: Treatment Value: Drought vs. No Drought
  misc_feature: MA Experiment ID: 108534 Result: Up-regulated in Transcription
  misc_feature: MA Experiment 108534 PARAMETER Experiment Name: Zm_4deg_Cold_P Parameter: Age (hr) Value: 8
  misc_feature: MA Experiment 108534 PARAMETER Experiment Name: Zm_4deg_Cold_P Parameter: Organism Value: Zea mays
  misc_feature: MA Experiment 108534 PARAMETER Experiment Name: Zm_4deg_Cold_P Parameter: Plant Line Value: 35A19
  misc_feature: MA Experiment 108534 PARAMETER Experiment Name: Zm_4deg_Cold_P Parameter: Temperature (deg C) Value: 4 vs. 22
  misc_feature: MA Experiment 108534 PARAMETER Experiment Name: Zm_4deg_Cold_P Parameter: Timepoint (hr) Value: 6
  misc_feature: MA Experiment 108534 PARAMETER Experiment Name: Zm_4deg_Cold_P Parameter: Tissue Value: Aerial
  misc_feature: MA Experiment ID: 108540 Result: Up-regulated in Transcription
  misc_feature: MA Experiment 108540 PARAMETER Experiment Name: Zm_20percent_PEG_P Parameter: Age (day) Value: 8
  misc_feature: MA Experiment 108540 PARAMETER Experiment Name: Zm_20percent_PEG_P Parameter: Organism Value: Zea mays
  misc_feature: MA Experiment 108540 PARAMETER Experiment Name: Zm_20percent_PEG_P Parameter: Plant Line Value: 35A19
  misc_feature: MA Experiment 108540 PARAMETER Experiment Name: Zm_20percent_PEG_P Parameter: Timepoint (hr) Value: 6
  misc_feature: MA Experiment 108540 PARAMETER Experiment Name: Zm_20percent_PEG_P Parameter: Tissue Value: Aerial
  misc_feature: MA Experiment 108540 PARAMETER Experiment Name: Zm_20percent_PEG_P Parameter: Treatment Value: 20percent PEG vs. No Treatment
  misc_feature: MA Experiment ID: 108548 Result: Down-regulated in Transcription
  misc_feature: MA Experiment 108548 PARAMETER Experiment Name: Zm_20uM_KNO3_H-to-L_P Parameter: Age (day) Value: 11
  misc_feature: MA Experiment 108548 PARAMETER Experiment Name: Zm_20uM_KNO3_H-to-L_P Parameter: Organism Value: Zea mays
  misc_feature: MA Experiment 108548 PARAMETER Experiment Name: Zm_20uM_KNO3_H-to-L_P Parameter: Plant Line Value: 35A19
  misc_feature: MA Experiment 108548 PARAMETER Experiment Name: Zm_20uM_KNO3_H-to-L_P Parameter: Timepoint (hr) Value: 4
  misc_feature: MA Experiment 108548 PARAMETER Experiment Name: Zm_20uM_KNO3_H-to-L_P Parameter: Tissue Value: Roots
  misc_feature: MA Experiment 108548 PARAMETER Experiment Name: Zm_20uM_KNO3_H-to-L_P Parameter: Treatment Value: 20uM KNO3 vs. 60mM KNO3
  misc_feature: MA Experiment ID: 108556 Result: Up-regulated in Transcription
  misc_feature: MA Experiment 108556 PARAMETER Experiment Name: Zm_Drought_P Parameter: Age (day) Value: 9
  misc_feature: MA Experiment 108556 PARAMETER Experiment Name: Zm_Drought_P Parameter: Organism Value: Zea mays
  misc_feature: MA Experiment 108556 PARAMETER Experiment Name: Zm_Drought_P Parameter: Plant Line Value: 35A19
  misc_feature: MA Experiment 108556 PARAMETER Experiment Name: Zm_Drought_P Parameter: Timepoint (hr) Value: 24
  misc_feature: MA Experiment 108556 PARAMETER Experiment Name: Zm_Drought_P Parameter: Tissue Value: Aerial
  misc_feature: MA Experiment 108556 PARAMETER Experiment Name: Zm_Drought_P Parameter: Treatment Value: Drought vs. No Drought
  misc_feature: MA Experiment ID: 108689 Result: Up-regulated in Transcription
  misc_feature: MA Experiment 108689 PARAMETER Experiment Name: Zm_Drought_Roots_P Parameter: Age (day) Value: 9
  misc_feature: MA Experiment 108689 PARAMETER Experiment Name: Zm_Drought_Roots_P Parameter: Organism Value: Zea mays
  misc_feature: MA Experiment 108689 PARAMETER Experiment Name: Zm_Drought_Roots_P Parameter: Plant Line Value: 35A19
  misc_feature: MA Experiment 108689 PARAMETER Experiment Name: Zm_Drought_Roots_P Parameter: Timepoint (hr) Value: 24
  misc_feature: MA Experiment 108689 PARAMETER Experiment Name: Zm_Drought_Roots_P Parameter: Tissue Value: Roots
  misc_feature: MA Experiment 108689 PARAMETER Experiment Name: Zm_Drought_Roots_P Parameter: Treatment Value: Drought vs. No Drought
  misc_feature: MA Experiment ID: 20000479 Result: Up-regulated in Transcription
  misc_feature: MA Experiment 20000479 PARAMETER Experiment Name: Zm_Drought_P Parameter: Age (day) Value: 10
  misc_feature: MA Experiment 20000479 PARAMETER Experiment Name: Zm_Drought_P Parameter: Organism Value: Zea mays
  misc_feature: MA Experiment 20000479 PARAMETER Experiment Name: Zm_Drought_P Parameter: Plant Line Value: 35A19
  misc_feature: MA Experiment 20000479 PARAMETER Experiment Name: Zm_Drought_P Parameter: Timepoint (hr) Value: 48
  misc_feature: MA Experiment 20000479 PARAMETER Experiment Name: Zm_Drought_P Parameter: Tissue Value: Aerial
  misc_feature: MA Experiment 20000479 PARAMETER Experiment Name: Zm_Drought_P Parameter: Treatment Value: Drought vs. No Drought
  misc_feature: MA Experiment ID: 20000480 Result: Up-regulated in Transcription
  misc_feature: MA Experiment 20000480 PARAMETER Experiment Name: Zm_Drought_P Parameter: Age (day) Value: 11
  misc_feature: MA Experiment 20000480 PARAMETER Experiment Name: Zm_Drought_P Parameter: Organism Value: Zea mays
  misc_feature: MA Experiment 20000480 PARAMETER Experiment Name: Zm_Drought_P Parameter: Plant Line Value: 35A19
  misc_feature: MA Experiment 20000480 PARAMETER Experiment Name: Zm_Drought_P Parameter: Timepoint (hr) Value: 72
  misc_feature: MA Experiment 20000480 PARAMETER Experiment Name: Zm_Drought_P Parameter: Tissue Value: Aerial
  misc_feature: MA Experiment 20000480 PARAMETER Experiment Name: Zm_Drought_P Parameter: Treatment Value: Drought vs. No Drought
  misc_feature: MA Experiment ID: 20000492 Result: Down-regulated in Transcription
  misc_feature: MA Experiment 20000492 PARAMETER Experiment Name: Zm_Hybrid_Seed_Dev_P Parameter: DAP Value: 12
  misc_feature: MA Experiment 20000492 PARAMETER Experiment Name: Zm_Hybrid_Seed_Dev_P Parameter: Organism Value: Zea mays
  misc_feature: MA Experiment 20000492 PARAMETER Experiment Name: Zm_Hybrid_Seed_Dev_P Parameter: Plant Line Value: 35A19
  misc_feature: MA Experiment 20000492 PARAMETER Experiment Name: Zm_Hybrid_Seed_Dev_P Parameter: Tissue Value: Fert Kernel vs. Unfert Floret
  misc_feature: MA Experiment ID: 20000534 Result: Down-regulated in Transcription
  misc_feature: MA Experiment 20000534 PARAMETER Experiment Name: Zm_Hybrid_Pollen_P Parameter: Age (day) Value: 8
  misc_feature: MA Experiment 20000534 PARAMETER Experiment Name: Zm_Hybrid_Pollen_P Parameter: Organism Value: Zea mays
  misc_feature: MA Experiment 20000534 PARAMETER Experiment Name: Zm_Hybrid_Pollen_P Parameter: Plant Line Value: 35A19
  misc_feature: MA Experiment 20000534 PARAMETER Experiment Name: Zm_Hybrid_Pollen_P Parameter: Tissue Value: Pollen vs. Aerial
  misc_feature: MA Experiment ID: 20000626 Result: Down-regulated in Transcription
  misc_feature: MA Experiment 20000626 PARAMETER Experiment Name: Zm_Herbicide-Treatments_P Parameter: Timepoint (hr) Value: 12
  misc_feature: MA Experiment 20000626 PARAMETER Experiment Name: Zm_Herbicide-Treatments_P Parameter: Tissue Value: Aerial
  misc_feature: MA Experiment 20000626 PARAMETER Experiment Name: Zm_Herbicide-Treatments_P Parameter: Treatment Value: Roundup vs. No Treatment
gtttttcttttattcccctccactgctttgcgcttgcgcctacgcatcgccgccccgcctctagttctctctgtcctcgtcttcctactgtaaaccacctcgtccctatccgcggcaaccgttcaccgcgccgcgaggcctgctgatccgaccgacctccaccgtcatggctcccctgcgccgcgcgtctcgcctccttcgatcagccgtctgccggctgaggtctccagcgccggctcgggccttctccagcgccgcggcgaccgagacgggtgccgtgatcgccgctgctgccgtggcggtggccagctccgggctcgggctgtggctgaaaccgccgtcgcttgccgactccggcgaggcgcccggcgaccagatctcggtcgcctgcgccggcgccacggaggcgcgggaggagaaggggtggttcctgttcgcagactcatttcgtagaagggtcttcttcaactacgagaagaggatacggcttctcagtcctcctgagaagatttttgagtactttgcgtctgtgaggaatcgagaagggaaagtttacatgttgcctgctgacttgatgagagcagtagtccctgtttttcctccatcagagtccacggtagttcgtgaaggaagattaaggggggagcggagccctggagaattgcactgtgctccatcagagttctttatgcagttcgacacaaataatgatggcctcatctcctttgctgagtacattttttttgtgacattgctcagcattcatgagtcaaatttcactgtggccttcaaaatgttcgacatcgaccacagtggttaatttatctcgccaagaaaaaagacctgctcgttatgagcatgttcaatcatctgacttgtttgttgatggtaaaagaaggggtgatagacagagaagagtttaagaaaataatggcactgatgcggtcctttaacagacaagggtcgactcataaggatggtttacgtattggacttaaagttggcaagcctgtggaaaatggtggggtggtcgagtacttctttgggagtgatgggaatgaacctctacactttgacaagttttctaaaattttgaaggaattgcatgatgagattattcaactggagttcagtcattatgatgtcaagtcgtctaaaacaataccagcaaaggattttgcattgtccatggttgcttctgctgacatgaaccatatcaacaaactgcttgatagagttgatagtttggtcaaggagccagatctgaaggacatacgcatcacctttgaggagtttaaggcatttgctgatttgcgacgaagattggagccactgtcgatggctatctttgcttacggtaaattgaatgggttattgacgaaggaggatctaaaacgtgcagcgcaacatgcgcagaaggtaatcaccaagcagtgcattgctgatcgttacaacggacttcactgtatgtcgtcttggtggccgaagcttgactagcagtaacagctgtaattgtaaatcgtgtcctctgtagccctaggactgagtgatatacattgttattctcacgtgtaaattaaaccccatatggccatatggcttcaatatatgaaacattgcc

SEQ ID NO: 2901 - protein, 217 aa, Zea mays subsp. mays
  peptide (1)..(217): Ceres Seq. ID no. 12368053
  misc_feature (169)..(197): Pfam Name: EF hand Pfam Description: EF hand
  misc_feature (62)..(217): Homolog of NCBI NO: 18605991 NR Description: Unknown (protein for MGC:36503) [Mus musculus]
  misc_feature (62)..(217): Homolog of NCBI NO: 40786511 NR Description: calcium binding atopy-related autoantigen 1
  misc_feature (62)..(217): Homolog of NCBI NO: 26346488 NR Description: unnamed protein product [Mus musculus]
  misc_feature (62)..(217): Homolog of NCBI NO: 21450201 NR Description: calcium binding atopy-related autoantigen 1 [Mus
  misc_feature (94)..(217): Homolog of NCBI NO: 29841284 NR Description: similar to GenBank Accession Number AE003616
  misc_feature (94)..(217): Homolog of NCBI NO: 19920872 NR Description: CG4495-PA [Drosophila melanogaster]
  misc_feature (94)..(217): Homolog of NCBI NO: 39587689 NR Description: Hypothetical protein CBG01795 [Caenorhabditis
  misc_feature (94)..(217): Homolog of NCBI NO: 17543982 NR Description: EF hand calcium binding protein (65.2 kD)
  misc_feature (88)..(217): Homolog of NCBI NO: 15236653 NR Description: putative protein
  misc_feature (10)..(217): Homolog of NCBI NO: 38345151 NR Description: OSJNBa0014K14.5 [Oryza sativa (japonica
MAPLRRASRLLRSAVCRLRSPAPARAFSSAAATETGAVIAAAAVAVASSGLGLWLKPPSLADSGEAPGDQISVACAGATEAREEKGWFLFADSFRRRVFFNYEKRIRLLSPPEKIFEYFASVRNREGKVYMLPADLMRAVVPVFPPSESTVVREGRLRGERSPGELHCAPSEFFMQFDTNNDGLISFAEYIFFVTLLSIHESNFTVAFKMFDIDHSG

SEQ ID NO: 2902 - protein, 214 aa, Zea mays subsp. mays
  peptide (1)..(214): Ceres Seq. ID no. 12368054
  misc_feature (6)..(187): Homolog of NCBI NO: 34874232 NR Description: similar to Smhs2 homolog [Rattus norvegicus]
  misc_feature (62)..(183): Homolog of NCBI NO: 23271302 NR Description: Unknown (protein for IMAGE:5261983) [Homo sapiens]
  misc_feature (15)..(184): Homolog of NCBI NO: 29841284 NR Description: similar to GenBank Accession Number AE003616
  misc_feature (15)..(198): Homolog of NCBI NO: 19920872 NR Description: CG4495-PA [Drosophila melanogaster]
  misc_feature (16)..(184): Homolog of NCBI NO: 39587689 NR Description: Hypothetical protein CBG01795 [Caenorhabditis
  misc_feature (16)..(184): Homolog of NCBI NO: 17543982 NR Description: EF hand calcium binding protein (65.2 kD)
  misc_feature (16)..(184): Homolog of NCBI NO: 15236653 NR Description: putative protein
  misc_feature (16)..(186): Homolog of NCBI NO: 38345151 NR Description: OSJNBa0014K14.5 [Oryza sativa (japonica
MSMFNHLTCLLMVKEGVIDREEFKKIMALMRSFNRQGSTHKDGLRIGLKVGKPVENGGVVEYFFGSDGNEPLHFDKFSKILKELHDEIIQLEFSHYDVKSSKTIPAKDFALSMVASADMNHINKLLDRVDSLVKEPDLKDIRITFEEFKAFADLRRRLEPLSMAIFAYGKLNGLLTKEDLKRAAQHAQKVITKQCIADRYNGLHCMSSWWPKLD

SEQ ID NO: 2903 - protein, 212 aa, Zea mays subsp. mays
  peptide (1)..(212): Ceres Seq. ID no. 12368055
  misc_feature (4)..(185): Homolog of NCBI NO: 34874232 NR Description: similar to Smhs2 homolog [Rattus norvegicus]
  misc_feature (60)..(181): Homolog of NCBI NO: 23271302 NR Description: Unknown (protein for IMAGE:5261983) [Homo sapiens]
  misc_feature (13)..(182): Homolog of NCBI NO: 29841284 NR Description: similar to GenBank Accession Number AE003616
  misc_feature (13)..(196): Homolog of NCBI NO: 19920872 NR Description: CG4495-PA [Drosophila melanogaster]
  misc_feature (14)..(182): Homolog of NCBI NO: 39587689 NR Description: Hypothetical protein CBG01795 [Caenorhabditis
  misc_feature (14)..(182): Homolog of NCBI NO: 17543982 NR Description: EF hand calcium binding protein (65.2 kD)
  misc_feature (14)..(182): Homolog of NCBI NO: 15236653 NR Description: putative protein
  misc_feature (14)..(184): Homolog of NCBI NO: 38345151 NR Description: OSJNBa0014K14.5 [Oryza sativa (japonica
MFNHLTCLLMVKEGVIDREEFKKIMALMRSFNRQGSTHKDGLRIGLKVGKPVENGGVVEYFFGSDGNEPLHFDKFSKILKELHDEIIQLEFSHYDVKSSKTIPAKDFALSMVASADMNHINKLLDRVDSLVKEPDLKDIRITFEEFKAFADLRRRLEPLSMAIFAYGKLNGLLTKEDLKRAAQHAQKVITKQCIADRYNGLHCMSSWWPKLD

SEQ ID NO: 2904 - DNA, 1341 bp, Zea mays subsp. mays
  misc_feature (1)..(1341): Ceres Seq. ID no. 12366729
  misc_feature: MA Experiment ID: 108527 Result: Up-regulated in Transcription
  misc_feature: MA Experiment 108527 PARAMETER Experiment Name: Zm_5mM_NO_P Parameter: Age (day) Value: 8
  misc_feature: MA Experiment 108527 PARAMETER Experiment Name: Zm_5mM_NO_P Parameter: Organism Value: Zea mays
  misc_feature: MA Experiment 108527 PARAMETER Experiment Name: Zm_5mM_NO_P Parameter: Plant Line Value: 35A19
  misc_feature: MA Experiment 108527 PARAMETER Experiment Name: Zm_5mM_NO_P Parameter: Timepoint (hr) Value: 6
  misc_feature: MA Experiment 108527 PARAMETER Experiment Name: Zm_5mM_NO_P Parameter: Tissue Value: Aerial
  misc_feature: MA Experiment 108527 PARAMETER Experiment Name: Zm_5mM_NO_P Parameter: Treatment Value: 5mM NO vs. No Treatment
  misc_feature: MA Experiment ID: 108543 Result: Up-regulated in Transcription
  misc_feature: MA Experiment ID: 108559 Result: Up-regulated in Transcription
  misc_feature: MA Experiment 108559 PARAMETER Experiment Name: Zm_5mM_NO_P Parameter: Age (day) Value: 8
  misc_feature: MA Experiment 108559 PARAMETER Experiment Name: Zm_5mM_NO_P Parameter: Organism Value: Zea mays
  misc_feature: MA Experiment 108559 PARAMETER Experiment Name: Zm_5mM_NO_P Parameter: Plant Line Value: 35A19
  misc_feature: MA Experiment 108559 PARAMETER Experiment Name: Zm_5mM_NO_P Parameter: Timepoint (hr) Value: 12
  misc_feature: MA Experiment 108559 PARAMETER Experiment Name: Zm_5mM_NO_P Parameter: Tissue Value: Aerial
  misc_feature: MA Experiment 108559 PARAMETER Experiment Name: Zm_5mM_NO_P Parameter: Treatment Value: 5mM NO vs. No Treatment
  misc_feature: MA Experiment ID: 108599 Result: Down-regulated in Transcription
  misc_feature: MA Experiment 108599 PARAMETER Experiment Name: Zm_RT1_P Parameter: Age (day) Value: 11
  misc_feature: MA Experiment 108599 PARAMETER Experiment Name: Zm_RT1_P Parameter: Organism Value: Zea mays
  misc_feature: MA Experiment 108599 PARAMETER Experiment Name: Zm_RT1_P Parameter: Plant Line Value: rt1 mut vs. rt1 wt
  misc_feature: MA Experiment 108599 PARAMETER Experiment Name: Zm_RT1_P Parameter: Tissue Value: Roots
  misc_feature: MA Experiment ID: 20000492 Result: Down-regulated in Transcription
  misc_feature: MA Experiment 20000492 PARAMETER Experiment Name: Zm_Hybrid_Seed_Dev_P Parameter: DAP Value: 12
  misc_feature: MA Experiment 20000492 PARAMETER Experiment Name: Zm_Hybrid_Seed_Dev_P Parameter: Organism Value: Zea mays
  misc_feature: MA Experiment 20000492 PARAMETER Experiment Name: Zm_Hybrid_Seed_Dev_P Parameter: Plant Line Value: 35A19
  misc_feature: MA Experiment 20000492 PARAMETER Experiment Name: Zm_Hybrid_Seed_Dev_P Parameter: Tissue Value: Fert Kernel vs. Unfert Floret
  misc_feature: MA Experiment ID: 20000535 Result: Down-regulated in Transcription
  misc_feature: MA Experiment 20000535 PARAMETER Experiment Name: Zm_Hybrid_Seed_Dev_P Parameter: DAP Value: 30 vs. 12
  misc_feature: MA Experiment 20000535 PARAMETER Experiment Name: Zm_Hybrid_Seed_Dev_P Parameter: Organism Value: Zea mays
  misc_feature: MA Experiment 20000535 PARAMETER Experiment Name: Zm_Hybrid_Seed_Dev_P Parameter: Plant Line Value: 35A19
  misc_feature: MA Experiment 20000535 PARAMETER Experiment Name: Zm_Hybrid_Seed_Dev_P Parameter: Tissue Value: Embryo vs. Unfert Floret
gtccagacatcaggcagagcaggaacacaaggagagttcagagttcagacagcagggctttctctccgatcgctgttctgagcgatggcagcgcgcggcggtggtacgaggatgacgtctgctgctgctgccgcggcgccatgggttagcgtctgcagcttcttgctctgcttggcggccttccagggcgctgagggtgcgattggcgtgaactacggcatggtcgctaacaacctgccggcgccggagcaggtcgtctccatgtacaaggccaagaacatcagctacgtgcggctcttccacccggacaaggacgcgttgaacgcgctccgcggctccggcgtcggcgtcgtcctgggcacgctgaacgaggacctcccgcgcctggcgtccgacctgtccttcgccgcgtcgtgggtggccacgaacgtgcagcccttcgccggcgccgtccagttccggtacatcaacgccggcaacgaggtcatcccgggggacgccgcggcgcgggtgctcccggccatgcagaacctggagtcggcgctccggtccgcgggggtcacgggcgtccccgtcaccacggccgtggccaccagcgtgctcggcgcctcgtacccgccgtcccagggcgccttctccgaggcggccgcgccggtgatggcgcccatcgtctcgtacctgtcgtcgaagggcgcgccgctgctggtcaacgtatacccgtacttcgcctactcgagcagcggcgggcaggtggcgctcgggtacgcgctgctgtcggcggacgccggcgcggcgtcgtcggtcacggacgccggggtggtctacaccaacatgttcgacgctatcgtggacgcgacgcacgccgcggtggagaaagccggggtccaggggctggagctggtggtgtcggagaccggctggccgtcggccggcggcgagggcgccaccgtggagaatgccgcggcgtacaacaacaacgtggtgcggcacgtcggcggcggtaccccgcggcgaccagggaaggccgtggagacgtaccttttcgccatgttcaacgagaacggcaaggccgagggcgtggagcagcacttcggcctcttccagccggacatgagcgaggtctaccacgtcgacttcacggcgggatccccctaggtctagggaggaggcggcttacccgcttcttcacttttagtagtaggctcatccttcattcccctgatctacttcgttttgttggagtagcaaaactgccgcacgtcacgtttactgtttattttttaatatcttatatagaaaaataatatcaacatttattctttaaataagtttatgtttact

SEQ ID NO: 2905 - protein, 356 aa, Zea mays subsp. mays
  peptide (1)..(356): Ceres Seq. ID no. 12366730
  misc_feature (42)..(351): Pfam Name: Glycosyl hydrolases family 17 Pfam Description: Glycosyl hydrolases family 17
  misc_feature (23)..(351): Homolog of NCBI NO: 34906502 NR Description: putative beta 1,3-glucanase
  misc_feature (39)..(351): Homolog of NCBI NO: 6448757 NR Description: beta-1,3-glucanase [Musa acuminata]
  misc_feature (39)..(351): Homolog of NCBI NO: 6073860 NR Description: beta-1, 3-glucananse [Musa acuminata]
  misc_feature (40)..(355): Homolog of NCBI NO: 322839 NR Description: glucan endo-1,3-beta-D-glucosidase (EC 3.2.1.39)
  misc_feature (35)..(355): Homolog of NCBI NO: 585078 NR Description: PUTATIVE GLUCAN ENDO-1,3-BETA-GLUCOSIDASE GVI
  misc_feature (22)..(353): Homolog of NCBI NO: 4097944 NR Description: beta-1,3-glucanase precursor [Oryza sativa]
  misc_feature (22)..(353): Homolog of NCBI NO: 34908958 NR Description: beta-1,3-glucanase precursor
  misc_feature (39)..(355): Homolog of NCBI NO: 7447972 NR Description: glucan endo-1,3-beta-D-glucosidase (EC 3.2.1.39)
  misc_feature (36)..(350): Homolog of NCBI NO: 4097946 NR Description: beta-1,3-glucanase precursor [Oryza sativa]
  misc_feature (42)..(355): Homolog of NCBI NO: 4884532 NR Description: beta-1,3-glucanase [Oryza sativa]
MAARGGGTRMTSAAAAAAPWVSVCSFLLCLAAFQGAEGAIGVNYGMVANNLPAPEQVVSMYKAKNISYVRLFHPDKDALNALRGSGVGVVLGTLNEDLPRLASDLSFAASWVATNVQPFAGAVQFRYINAGNEVIPGDAAARVLPAMQNLESALRSAGVTGVPVTTAVATSVLGASYPPSQGAFSEAAAPVMAPIVSYLSSKGAPLLVNVYPYFAYSSSGGQVALGYALLSADAGAASSVTDAGVVYTNMFDAIVDATHAAVEKAGVQGLELVVSETGWPSAGGEGATVENAAAYNNNVVRHVGGGTPRRPGKAVETYLFAMFNENGKAEGVEQHFGLFQPDMSEVYHVDFTAGSP

SEQ ID NO: 2906 - protein, 347 aa, Zea mays subsp. mays
  peptide (1)..(347): Ceres Seq. ID no. 12366731
  misc_feature (33)..(342): Pfam Name: Glycosyl hydrolases family 17 Pfam Description: Glycosyl hydrolases family 17
  misc_feature (14)..(342): Homolog of NCBI NO: 34906502 NR Description: putative beta 1,3-glucanase
  misc_feature (30)..(342): Homolog of NCBI NO: 6448757 NR Description: beta-1,3-glucanase [Musa acuminata]
  misc_feature (30)..(342): Homolog of NCBI NO: 6073860 NR Description: beta-1, 3-glucananse [Musa acuminata]
  misc_feature (31)..(346): Homolog of NCBI NO: 322839 NR Description: glucan endo-1,3-beta-D-glucosidase (EC 3.2.1.39)
  misc_feature (26)..(346): Homolog of NCBI NO: 585078 NR Description: PUTATIVE GLUCAN ENDO-1,3-BETA-GLUCOSIDASE GVI
  misc_feature (13)..(344): Homolog of NCBI NO: 4097944 NR Description: beta-1,3-glucanase precursor [Oryza sativa]
  misc_feature (13)..(344): Homolog of NCBI NO: 34908958 NR Description: beta-1,3-glucanase precursor
  misc_feature (30)..(346): Homolog of NCBI NO: 7447972 NR Description: glucan endo-1,3-beta-D-glucosidase (EC 3.2.1.39)
  misc_feature (27)..(341): Homolog of NCBI NO: 4097946 NR Description: beta-1,3-glucanase precursor [Oryza sativa]
  misc_feature (33)..(346): Homolog of NCBI NO: 4884532 NR Description: beta-1,3-glucanase [Oryza sativa]
MTSAAAAAAPWVSVCSFLLCLAAFQGAEGAIGVNYGMVANNLPAPEQVVSMYKAKNISYVRLFHPDKDALNALRGSGVGVVLGTLNEDLPRLASDLSFAASWVATNVQPFAGAVQFRYINAGNEVIPGDAAARVLPAMQNLESALRSAGVTGVPVTTAVATSVLGASYPPSQGAFSEAAAPVMAPIVSYLSSKGAPLLVNVYPYFAYSSSGGQVALGYALLSADAGAASSVTDAGVVYTNMFDAIVDATHAAVEKAGVQGLELVVSETGWPSAGGEGATVENAAAYNNNVVRHVGGGTPRRPGKAVETYLFAMFNENGKAEGVEQHFGLFQPDMSEVYHVDFTAGSP

SEQ ID NO: 2907 - protein, 311 aa, Zea mays subsp. mays
  peptide (1)..(311): Ceres Seq. ID no. 12366732
  misc_feature (1)..(306): Pfam Name: Glycosyl hydrolases family 17 Pfam Description: Glycosyl hydrolases family 17
  misc_feature (1)..(306): Homolog of NCBI NO: 34906502 NR Description: putative beta 1,3-glucanase
  misc_feature (1)..(306): Homolog of NCBI NO: 6448757 NR Description: beta-1,3-glucanase [Musa acuminata]
  misc_feature (1)..(306): Homolog of NCBI NO: 6073860 NR Description: beta-1, 3-glucananse [Musa acuminata]
  misc_feature (1)..(310): Homolog of NCBI NO: 322839 NR Description: glucan endo-1,3-beta-D-glucosidase (EC 3.2.1.39)
  misc_feature (1)..(310): Homolog of NCBI NO: 585078 NR Description: PUTATIVE GLUCAN ENDO-1,3-BETA-GLUCOSIDASE GVI
  misc_feature (1)..(308): Homolog of NCBI NO: 4097944 NR Description: beta-1,3-glucanase precursor [Oryza sativa]
  misc_feature (1)..(308): Homolog of NCBI NO: 34908958 NR Description: beta-1,3-glucanase precursor
  misc_feature (1)..(310): Homolog of NCBI NO: 7447972 NR Description: glucan endo-1,3-beta-D-glucosidase (EC 3.2.1.39)
  misc_feature (1)..(305): Homolog of NCBI NO: 4097946 NR Description: beta-1,3-glucanase precursor [Oryza sativa]
  misc_feature (1)..(310): Homolog of NCBI NO: 4884532 NR Description: beta-1,3-glucanase [Oryza sativa]
MVANNLPAPEQVVSMYKAKNISYVRLFHPDKDALNALRGSGVGVVLGTLNEDLPRLASDLSFAASWVATNVQPFAGAVQFRYINAGNEVIPGDAAARVLPAMQNLESALRSAGVTGVPVTTAVATSVLGASYPPSQGAFSEAAAPVMAPIVSYLSSKGAPLLVNVYPYFAYSSSGGQVALGYALLSADAGAASSVTDAGVVYTNMFDAIVDATHAAVEKAGVQGLELVVSETGWPSAGGEGATVENAAAYNNNVVRHVGGGTPRRPGKAVETYLFAMFNENGKAEGVEQHFGLFQPDMSEVYHVDFTAGSP

SEQ ID NO: 2908 - DNA, 1359 bp, Zea mays subsp. mays
  misc_feature (1)..(1359): Ceres Seq. ID no. 12410500
  misc_feature: MA Experiment ID: 108504 Result: Up-regulated in Transcription
  misc_feature: MA Experiment 108504 PARAMETER Experiment Name: Zm_Drought_P Parameter: Age (day) Value: 8
  misc_feature: MA Experiment 108504 PARAMETER Experiment Name: Zm_Drought_P Parameter: Organism Value: Zea mays
  misc_feature: MA Experiment 108504 PARAMETER Experiment Name: Zm_Drought_P Parameter: Plant Line Value: 35A19
  misc_feature: MA Experiment 108504 PARAMETER Experiment Name: Zm_Drought_P Parameter: Timepoint (hr) Value: 12
  misc_feature: MA Experiment 108504 PARAMETER Experiment Name: Zm_Drought_P Parameter: Tissue Value: Aerial
  misc_feature: MA Experiment 108504 PARAMETER Experiment Name: Zm_Drought_P Parameter: Treatment Value: Drought vs. No Drought
  misc_feature: MA Experiment ID: 108523 Result: Up-regulated in Transcription
  misc_feature: MA Experiment 108523 PARAMETER Experiment Name: Zm_42deg_Heat_P Parameter: Age (day) Value: 8
  misc_feature: MA Experiment 108523 PARAMETER Experiment Name: Zm_42deg_Heat_P Parameter: Organism Value: Zea mays
  misc_feature: MA Experiment 108523 PARAMETER Experiment Name: Zm_42deg_Heat_P Parameter: Plant Line Value: 35A19
  misc_feature: MA Experiment 108523 PARAMETER Experiment Name: Zm_42deg_Heat_P Parameter: Temperature (deg C) Value: 42 vs. 22
  misc_feature: MA Experiment 108523 PARAMETER Experiment Name: Zm_42deg_Heat_P Parameter: Timepoint (hr) Value: 6
  misc_feature: MA Experiment 108523 PARAMETER Experiment Name: Zm_42deg_Heat_P Parameter: Tissue Value: Aerial
  misc_feature: MA Experiment ID: 108534 Result: Up-regulated in Transcription
  misc_feature: MA Experiment 108534 PARAMETER Experiment Name: Zm_4deg_Cold_P Parameter: Age (hr) Value: 8
  misc_feature: MA Experiment 108534 PARAMETER Experiment Name: Zm_4deg_Cold_P Parameter: Organism Value: Zea mays
  misc_feature: MA Experiment 108534 PARAMETER Experiment Name: Zm_4deg_Cold_P Parameter: Plant Line Value: 35A19
  misc_feature: MA Experiment 108534 PARAMETER Experiment Name: Zm_4deg_Cold_P Parameter: Temperature (deg C) Value: 4 vs. 22
  misc_feature: MA Experiment 108534 PARAMETER Experiment Name: Zm_4deg_Cold_P Parameter: Timepoint (hr) Value: 6
  misc_feature: MA Experiment 108534 PARAMETER Experiment Name: Zm_4deg_Cold_P Parameter: Tissue Value: Aerial
  misc_feature: MA Experiment ID: 108539 Result: Up-regulated in Transcription
  misc_feature: MA Experiment 108539 PARAMETER Experiment Name: Zm_20percent_PEG_P Parameter: Age (day) Value: 8
  misc_feature: MA Experiment 108539 PARAMETER Experiment Name: Zm_20percent_PEG_P Parameter: Organism Value: Zea mays
  misc_feature: MA Experiment 108539 PARAMETER Experiment Name: Zm_20percent_PEG_P Parameter: Plant Line Value: 35A19
  misc_feature: MA Experiment 108539 PARAMETER Experiment Name: Zm_20percent_PEG_P Parameter: Timepoint (hr) Value: 1
  misc_feature: MA Experiment 108539 PARAMETER Experiment Name: Zm_20percent_PEG_P Parameter: Tissue Value: Aerial
  misc_feature: MA Experiment 108539 PARAMETER Experiment Name: Zm_20percent_PEG_P Parameter: Treatment Value: 20percent PEG vs. No Treatment
  misc_feature: MA Experiment ID: 108556 Result: Up-regulated in Transcription
  misc_feature: MA Experiment 108556 PARAMETER Experiment Name: Zm_Drought_P Parameter: Age (day) Value: 9
  misc_feature: MA Experiment 108556 PARAMETER Experiment Name: Zm_Drought_P Parameter: Organism Value: Zea mays
  misc_feature: MA Experiment 108556 PARAMETER Experiment Name: Zm_Drought_P Parameter: Plant Line Value: 35A19
  misc_feature: MA Experiment 108556 PARAMETER Experiment Name: Zm_Drought_P Parameter: Timepoint (hr) Value: 24
  misc_feature: MA Experiment 108556 PARAMETER Experiment Name: Zm_Drought_P Parameter: Tissue Value: Aerial
  misc_feature: MA Experiment 108556 PARAMETER Experiment Name: Zm_Drought_P Parameter: Treatment Value: Drought vs. No Drought
  misc_feature: MA Experiment ID: 108689 Result: Up-regulated in Transcription
  misc_feature: MA Experiment 108689 PARAMETER Experiment Name: Zm_Drought_Roots_P Parameter: Age (day) Value: 9
  misc_feature: MA Experiment 108689 PARAMETER Experiment Name: Zm_Drought_Roots_P Parameter: Organism Value: Zea mays
  misc_feature: MA Experiment 108689 PARAMETER Experiment Name: Zm_Drought_Roots_P Parameter: Plant Line Value: 35A19
  misc_feature: MA Experiment 108689 PARAMETER Experiment Name: Zm_Drought_Roots_P Parameter: Timepoint (hr) Value: 24
  misc_feature: MA Experiment 108689 PARAMETER Experiment Name: Zm_Drought_Roots_P Parameter: Tissue Value: Roots
  misc_feature: MA Experiment 108689 PARAMETER Experiment Name: Zm_Drought_Roots_P Parameter: Treatment Value: Drought vs. No Drought
  misc_feature: MA Experiment ID: 20000492 Result: Up-regulated in Transcription
  misc_feature: MA Experiment 20000492 PARAMETER Experiment Name: Zm_Hybrid_Seed_Dev_P Parameter: DAP Value: 12
  misc_feature: MA Experiment 20000492 PARAMETER Experiment Name: Zm_Hybrid_Seed_Dev_P Parameter: Organism Value: Zea mays
  misc_feature: MA Experiment 20000492 PARAMETER Experiment Name: Zm_Hybrid_Seed_Dev_P Parameter: Plant Line Value: 35A19
  misc_feature: MA Experiment 20000492 PARAMETER Experiment Name: Zm_Hybrid_Seed_Dev_P Parameter: Tissue Value: Fert Kernel vs. Unfert Floret
gctcggcgctcgctcgctcgttcgcgcttcgctcccttccttccgtttcgctcgctgccgcggacacgccgcacacggtcgaggagacgacagctgccgcgcggcactgggctcgggggagctggaccgccgggcgaggacaagagacggtatcgatggcctacgcgcgcaccgtgatggcggcggccgcctctgcgctgctgatggccgtgggcgtgcggttcctgggccccgcggcggcggcgttcgtggaggaagagctgccgcgcgcccgcgcggtggccgccacctggctcacgccgccgtacctgtacctcgtcatcaacgccatcatcatctccatcgccgcgtcgtcccgcttccagtcgagcggcggcgccggcggacgtccgtcagccccgtcgtatgcgcccgccgcggaccccgacgccgacgccatcggaggagaaggagcgggcgaggagatagcagcagcaggatgggatccagccggcggttgcgtcgttgcaggtgcctgcggcggtgcccgtggtggcagcgaaggccgcggaggttgctgctgtcgtcgaggagccagtggtggtggagatccacactgtagcggtggcgccggagggcgaggtggacgaggactattcggtttcgaggtcgacatggacgccgcgtcggaggggcgcggagccggaggtggcggcggaggtgccgccgttcgcggacctgaccaactccaggaagaagccgctcgtgtcggcgaggttcagcaggaaggcgaccaaaccaagccccgaaggtagcagggctctgcgggtggcgcggccgcggaaggaggagacgctggagagcacgtggaaggccatcacggagggccgggggccgacgctagctcggcacctcaagaagtccgacacctgggacaccccgtccccgggcgccgcccgtccggcggcggcagcagcggggaggtcgatccagcggccgcggcaccggcggggacgatgcggaaggccgagactttcaacgacggtggcgccggaaggagcagacctgctcccgctgcgctggtgcggcgggagccgtcgctggggcaggacgagctgaaccgccgcgtggaggcgttcatccacaagttcaacatggagatgcggctgcagcggcaggagtcgctcaagcactacaacgacatgattggcaggggcaggggcagccgttagtgggaagtcttgctgcaaatagctgcggctccgcaagaaggattctgcttttttgttccgtgatatttctcgattttggttcttggtctctgtaagatatggttttgtgtaaatggttttatcaagtaacgaggacaagttcgatcgc

SEQ ID NO: 2909 - protein, 263 aa, Zea mays subsp. mays
  peptide (1)..(263): Ceres Seq. ID no. 12410501
  misc_feature (61)..(141): Pfam Name: Cotton fibre expressed protein Pfam Description: Cotton fibre expressed protein
  misc_feature (125)..(263): Homolog of NCBI NO: 15609627 NR Description: PE_PGRS [Mycobacterium tuberculosis H37Rv]
  misc_feature (123)..(263): Homolog of NCBI NO: 9625624 NR Description: nuclear antigen EBNA1 [Human herpesvirus 4]
  misc_feature (115)..(263): Homolog of NCBI NO: 15610480 NR Description: PE_PGRS [Mycobacterium tuberculosis H37Rv]
  misc_feature (58)..(125): Homolog of NCBI NO: 7484718 NR Description: fiber protein 3 [imported] - upland cotton
  misc_feature (49)..(119): Homolog of NCBI NO: 15239605 NR Description: cotton fiber expressed protein 1-like protein
  misc_feature (58)..(161): Homolog of NCBI NO: 7484717 NR Description: fiber protein 2 [imported] - upland cotton
  misc_feature (62)..(123): Homolog of NCBI NO: 30696552 NR Description: cotton fiber expressed protein -related
  misc_feature (62)..(123): Homolog of NCBI NO: 25373438 NR Description: hypothetical protein F11P17.2 [imported] -
  misc_feature (58)..(125): Homolog of NCBI NO: 7484716 NR Description: fiber protein 1 [imported] - upland cotton
  misc_feature (52)..(141): Homolog of NCBI NO: 34898720 NR Description: putative fiber protein [Oryza sativa (japonica
SALARSFALRSLPSVSLAAADTPHTVEETTAAARHWARGSWTAGRGQETVSMAYARTVMAAAASALLMAVGVRFLGPAAAAFVEEELPRARAVAATWLTPPYLYLVINAIIISIAASSRFQSSGGAGGRPSAPSYAPAADPDADAIGGEGAGEEIAAAGWDPAGGCVVAGACGGARGGSEGRGGCCCRRGASGGGDPHCSGGAGGRGGRGLFGFEVDMDAASEGRGAGGGGGGAAVRGPDQLQEEAARVGEVQQEGDQTKPRR

SEQ ID NO: 2910 - protein, 212 aa, Zea mays subsp. mays
  peptide (1)..(212): Ceres Seq. ID no. 12410502
  misc_feature (10)..(90): Pfam Name: Cotton fibre expressed protein Pfam Description: Cotton fibre expressed protein
  misc_feature (74)..(212): Homolog of NCBI NO: 15609627 NR Description: PE_PGRS [Mycobacterium tuberculosis H37Rv]
  misc_feature (72)..(212): Homolog of NCBI NO: 9625624 NR Description: nuclear antigen EBNA1 [Human herpesvirus 4]
  misc_feature (64)..(212): Homolog of NCBI NO: 15610480 NR Description: PE_PGRS [Mycobacterium tuberculosis H37Rv]
  misc_feature (7)..(74): Homolog of NCBI NO: 7484718 NR Description: fiber protein 3 [imported] - upland cotton
  misc_feature (1)..(68): Homolog of NCBI NO: 15239605 NR Description: cotton fiber expressed protein 1-like protein
  misc_feature (7)..(110): Homolog of NCBI NO: 7484717 NR Description: fiber protein 2 [imported] - upland cotton
  misc_feature (11)..(72): Homolog of NCBI NO: 30696552 NR Description: cotton fiber expressed protein -related
  misc_feature (11)..(72): Homolog of NCBI NO: 25373438 NR Description: hypothetical protein F11P17.2 [imported] -
  misc_feature (7)..(74): Homolog of NCBI NO: 7484716 NR Description: fiber protein 1 [imported] - upland cotton
  misc_feature (1)..(90): Homolog of NCBI NO: 34898720 NR Description: putative fiber protein [Oryza sativa (japonica
MAYARTVMAAAASALLMAVGVRFLGPAAAAFVEEELPRARAVAATWLTPPYLYLVINAIIISIAASSRFQSSGGAGGRPSAPSYAPAADPDADAIGGEGAGEEIAAAGWDPAGGCVVAGACGGARGGSEGRGGCCCRRGASGGGDPHCSGGAGGRGGRGLFGFEVDMDAASEGRGAGGGGGGAAVRGPDQLQEEAARVGEVQQEGDQTKPRR

SEQ ID NO: 2911 - protein, 205 aa, Zea mays subsp. mays
  peptide (1)..(205): Ceres Seq. ID no. 12410503
  misc_feature (3)..(83): Pfam Name: Cotton fibre expressed protein Pfam Description: Cotton fibre expressed protein
  misc_feature (67)..(205): Homolog of NCBI NO: 15609627 NR Description: PE_PGRS [Mycobacterium tuberculosis H37Rv]
  misc_feature (65)..(205): Homolog of NCBI NO: 9625624 NR Description: nuclear antigen EBNA1 [Human herpesvirus 4]
  misc_feature (57)..(205): Homolog of NCBI NO: 15610480 NR Description: PE_PGRS [Mycobacterium tuberculosis H37Rv]
  misc_feature (1)..(67): Homolog of NCBI NO: 7484718 NR Description: fiber protein 3 [imported] - upland cotton
  misc_feature (1)..(61): Homolog of NCBI NO: 15239605 NR Description: cotton fiber expressed protein 1-like protein
  misc_feature (1)..(103): Homolog of NCBI NO: 7484717 NR Description: fiber protein 2 [imported] - upland cotton
  misc_feature (4)..(65): Homolog of NCBI NO: 30696552 NR Description: cotton fiber expressed protein -related
  misc_feature (4)..(65): Homolog of NCBI NO: 25373438 NR Description: hypothetical protein F11P17.2 [imported] -
  misc_feature (1)..(67): Homolog of NCBI NO: 7484716 NR Description: fiber protein 1 [imported] - upland cotton
  misc_feature (1)..(83): Homolog of NCBI NO: 34898720 NR Description: putative fiber protein [Oryza sativa (japonica
MAAAASALLMAVGVRFLGPAAAAFVEEELPRARAVAATWLTPPYLYLVINAIIISIAASSRFQSSGGAGGRPSAPSYAPAADPDADAIGGEGAGEEIAAAGWDPAGGCVVAGACGGARGGSEGRGGCCCRRGASGGGDPHCSGGAGGRGGRGLFGFEVDMDAASEGRGAGGGGGGAAVRGPDQLQEEAARVGEVQQEGDQTKPRR

SEQ ID NO: 2912 - DNA, 884 bp, Zea mays subsp. mays
  misc_feature (1)..(884): Ceres Seq. ID no. 12405757
  misc_feature: MA Experiment ID: 108523 Result: Down-regulated in Transcription
  misc_feature: MA Experiment 108523 PARAMETER Experiment Name: Zm_42deg_Heat_P Parameter: Age (day) Value: 8
  misc_feature: MA Experiment 108523 PARAMETER Experiment Name: Zm_42deg_Heat_P Parameter: Organism Value: Zea mays
  misc_feature: MA Experiment 108523 PARAMETER Experiment Name: Zm_42deg_Heat_P Parameter: Plant Line Value: 35A19
  misc_feature: MA Experiment 108523 PARAMETER Experiment Name: Zm_42deg_Heat_P Parameter: Temperature (deg C) Value: 42 vs. 22
  misc_feature: MA Experiment 108523 PARAMETER Experiment Name: Zm_42deg_Heat_P Parameter: Timepoint (hr) Value: 6
  misc_feature: MA Experiment 108523 PARAMETER Experiment Name: Zm_42deg_Heat_P Parameter: Tissue Value: Aerial
  misc_feature: MA Experiment ID: 108527 Result: Up-regulated in Transcription
  misc_feature: MA Experiment 108527 PARAMETER Experiment Name: Zm_5mM_NO_P Parameter: Age (day) Value: 8
  misc_feature: MA Experiment 108527 PARAMETER Experiment Name: Zm_5mM_NO_P Parameter: Organism Value: Zea mays
  misc_feature: MA Experiment 108527 PARAMETER Experiment Name: Zm_5mM_NO_P Parameter: Plant Line Value: 35A19
  misc_feature: MA Experiment 108527 PARAMETER Experiment Name: Zm_5mM_NO_P Parameter: Timepoint (hr) Value: 6
  misc_feature: MA Experiment 108527 PARAMETER Experiment Name: Zm_5mM_NO_P Parameter: Tissue Value: Aerial
  misc_feature: MA Experiment 108527 PARAMETER Experiment Name: Zm_5mM_NO_P Parameter: Treatment Value: 5mM NO vs. No Treatment
  misc_feature: MA Experiment ID: 108530 Result: Down-regulated in Transcription
  misc_feature: MA Experiment 108530 PARAMETER Experiment Name: Zm_Imbibed_Seeds_P Parameter: Age (day) Value: 6 vs. 2
  misc_feature: MA Experiment 108530 PARAMETER Experiment Name: Zm_Imbibed_Seeds_P Parameter: Organism Value: Zea mays
  misc_feature: MA Experiment 108530 PARAMETER Experiment Name: Zm_Imbibed_Seeds_P Parameter: Plant Line Value: 35A19
  misc_feature: MA Experiment 108530 PARAMETER Experiment Name: Zm_Imbibed_Seeds_P Parameter: Tissue Value: Aerial vs. Embryo
  misc_feature: MA Experiment ID: 108535 Result: Down-regulated in Transcription
  misc_feature: MA Experiment 108535 PARAMETER Experiment Name: Zm_Meristem_P Parameter: Age (day) Value: 8
  misc_feature: MA Experiment 108535 PARAMETER Experiment Name: Zm_Meristem_P Parameter: Organism Value: Zea mays
  misc_feature: MA Experiment 108535 PARAMETER Experiment Name: Zm_Meristem_P Parameter: Plant Line Value: 35A19
  misc_feature: MA Experiment 108535 PARAMETER Experiment Name: Zm_Meristem_P Parameter: Tissue Value: Root Meristem vs. Above Root Meristem
  misc_feature: MA Experiment ID: 108543 Result: Up-regulated in Transcription
  misc_feature: MA Experiment ID: 108544 Result: Up-regulated in Transcription
  misc_feature: MA Experiment ID: 20000479 Result: Up-regulated in Transcription
  misc_feature: MA Experiment 20000479 PARAMETER Experiment Name: Zm_Drought_P Parameter: Age (day) Value: 10
  misc_feature: MA Experiment 20000479 PARAMETER Experiment Name: Zm_Drought_P Parameter: Organism Value: Zea mays
  misc_feature: MA Experiment 20000479 PARAMETER Experiment Name: Zm_Drought_P Parameter: Plant Line Value: 35A19
  misc_feature: MA Experiment 20000479 PARAMETER Experiment Name: Zm_Drought_P Parameter: Timepoint (hr) Value: 48
  misc_feature: MA Experiment 20000479 PARAMETER Experiment Name: Zm_Drought_P Parameter: Tissue Value: Aerial
  misc_feature: MA Experiment 20000479 PARAMETER Experiment Name: Zm_Drought_P Parameter: Treatment Value: Drought vs. No Drought
  misc_feature: MA Experiment ID: 20000626 Result: Up-regulated in Transcription
  misc_feature: MA Experiment 20000626 PARAMETER Experiment Name: Zm_Herbicide-Treatments_P Parameter: Timepoint (hr) Value: 12
  misc_feature: MA Experiment 20000626 PARAMETER Experiment Name: Zm_Herbicide-Treatments_P Parameter: Tissue Value: Aerial
  misc_feature: MA Experiment 20000626 PARAMETER Experiment Name: Zm_Herbicide-Treatments_P Parameter: Treatment Value: Roundup vs. No Treatment
aaccaactgagctgagcaagaaggcaagcaccaatcagccagcagtccagcacaatatcatgaacaagcgtcaggtcgccgcggcggtggctgccctcctggcgctgctagccgcatcatcgacggccggcgccgtgacgttcgacgcgacgaacacggcgtccgatacccccggcgggcagcggttcgaccaggccgtcggcctcgactacgccaagcaggtcctgtccgacgcgtccacgttcatctggaacaccttcgaccagcccagccccgccgaccgcaagcccgtcgacgcggtgaccctcgtcgtcgaggacatcggcggcgtggccttcacgagcgccaacgggatccacctcagcgcgcagtacgtcggcggctactccggcgacgtcaagaccgaagtcaccggcgtgctgtaccacgagacaacgcacgtgtggcagtgggacgggcagggccaggcgaacggcggcctcatcgagggcatcgccgactacgtccggctgaaggcggggtacgcgccgggccactgggtgcagccggggcagggggaccggtgggaccaggggtacgacgtcacggcgaggttcctggactactgcgactcgctcaagccgggcttcgtcgcgctgctcaacgccaagatgaaggacggctacaccgacgacttcttcgcccagatcctgggcaagaccgtgcagcagctgtggcaggactacaaggctaagtacgggggctgatgatggtgatgcaaattggtggcggtgcgaagtcaacgcgtcaatggctcaatgcgtttggtatgagatgctattatgtgctagtacgtacactctgtgtgtaaaatatatagagaaaataaaagggatcggataatt

SEQ ID NO: 2913 - protein, 247 aa, Zea mays subsp. mays
  peptide (1)..(247): Ceres Seq. ID no. 12405758
  misc_feature (22)..(247): Pfam Name: Plant Basic Secretory Protein Pfam Description: Plant Basic Secretory Protein
  misc_feature (29)..(246): Homolog of NCBI NO: 37535610 NR Description: putative basic secretory protein
  misc_feature (24)..(245): Homolog of NCBI NO: 7489380 NR Description: hypothetical protein pBH6-12 - barley
  misc_feature (30)..(245): Homolog of NCBI NO: 14329814 NR Description: putative NtPRp27-like protein [Atropa belladonna]
  misc_feature (31)..(245): Homolog of NCBI NO: 5360263 NR Description: NtPRp27 [Nicotiana tabacum]
  misc_feature (29)..(246): Homolog of NCBI NO: 27803890 NR Description: NtPRp27-like protein [Solanum tuberosum]
  misc_feature (22)..(245): Homolog of NCBI NO: 7489663 NR Description: benzothiadiazole-induced protein (clone WCI-5) -
  misc_feature (27)..(246): Homolog of NCBI NO: 37535606 NR Description: putative secretory protein
  misc_feature (63)..(247): Homolog of NCBI NO: 37535608 NR Description: putative secretory protein
  misc_feature (22)..(247): Homolog of NCBI NO: 5669008 NR Description: secretory protein [Triticum aestivum]
  misc_feature (22)..(247): Homolog of NCBI NO: 7489381 NR Description: hypothetical protein pBH6-17 - barley
PTELSKKASTNQPAVQHNIMNKRQVAAAVAALLALLAASSTAGAVTFDATNTASDTPGGQRFDQAVGLDYAKQVLSDASTFIWNTFDQPSPADRKPVDAVTLVVEDIGGVAFTSANGIHLSAQYVGGYSGDVKTEVTGVLYHETTHVWQWDGQGQANGGLIEGIADYVRLKAGYAPGHWVQPGQGDRWDQGYDVTARFLDYCDSLKPGFVALLNAKMKDGYTDDFFAQILGKTVQQLWQDYKAKYGG

SEQ ID NO: 2914 - protein, 228 aa, Zea mays subsp. mays
  peptide (1)..(228): Ceres Seq. ID no. 12405759
  misc_feature (3)..(228): Pfam Name: Plant Basic Secretory Protein Pfam Description: Plant Basic Secretory Protein
  misc_feature (10)..(227): Homolog of NCBI NO: 37535610 NR Description: putative basic secretory protein
  misc_feature (5)..(226): Homolog of NCBI NO: 7489380 NR Description: hypothetical protein pBH6-12 - barley
  misc_feature (11)..(226): Homolog of NCBI NO: 14329814 NR Description: putative NtPRp27-like protein [Atropa belladonna]
  misc_feature (12)..(226): Homolog of NCBI NO: 5360263 NR Description: NtPRp27 [Nicotiana tabacum]
  misc_feature (10)..(227): Homolog of NCBI NO: 27803890 NR Description: NtPRp27-like protein [Solanum tuberosum]
  misc_feature (3)..(226): Homolog of NCBI NO: 7489663 NR Description: benzothiadiazole-induced protein (clone WCI-5) -
  misc_feature (8)..(227): Homolog of NCBI NO: 37535606 NR Description: putative secretory protein
  misc_feature (44)..(228): Homolog of NCBI NO: 37535608 NR Description: putative secretory protein
  misc_feature (3)..(228): Homolog of NCBI NO: 5669008 NR Description: secretory protein [Triticum aestivum]
  misc_feature (3)..(228): Homolog of NCBI NO: 7489381 NR Description: hypothetical protein pBH6-17 - barley
MNKRQVAAAVAALLALLAASSTAGAVTFDATNTASDTPGGQRFDQAVGLDYAKQVLSDASTFIWNTFDQPSPADRKPVDAVTLVVEDIGGVAFTSANGIHLSAQYVGGYSGDVKTEVTGVLYHETTHVWQWDGQGQANGGLIEGIADYVRLKAGYAPGHWVQPGQGDRWDQGYDVTARFLDYCDSLKPGFVALLNAKMKDGYTDDFFAQILGKTVQQLWQDYKAKYGG

SEQ ID NO: 2915 - DNA, 1713 bp, Zea mays subsp. mays
  misc_feature (1)..(1713): Ceres Seq. ID no. 13498435
  misc_feature: MA Experiment ID: 108504 Result: Down-regulated in Transcription
  misc_feature: MA Experiment 108504 PARAMETER Experiment Name: Zm_Drought_P Parameter: Age (day) Value: 8
  misc_feature: MA Experiment 108504 PARAMETER Experiment Name: Zm_Drought_P Parameter: Organism Value: Zea mays
  misc_feature: MA Experiment 108504 PARAMETER Experiment Name: Zm_Drought_P Parameter: Plant Line Value: 35A19
  misc_feature: MA Experiment 108504 PARAMETER Experiment Name: Zm_Drought_P Parameter: Timepoint (hr) Value: 12
  misc_feature: MA Experiment 108504 PARAMETER Experiment Name: Zm_Drought_P Parameter: Tissue Value: Aerial
  misc_feature: MA Experiment 108504 PARAMETER Experiment Name: Zm_Drought_P Parameter: Treatment Value: Drought vs. No Drought
  misc_feature: MA Experiment ID: 108522 Result: Down-regulated in Transcription
  misc_feature: MA Experiment 108522 PARAMETER Experiment Name: Zm_42deg_Heat_P Parameter: Age (day) Value: 8
  misc_feature: MA Experiment 108522 PARAMETER Experiment Name: Zm_42deg_Heat_P Parameter: Organism Value: Zea mays
  misc_feature: MA Experiment 108522 PARAMETER Experiment Name: Zm_42deg_Heat_P Parameter: Plant Line Value: 35A19
  misc_feature: MA Experiment 108522 PARAMETER Experiment Name: Zm_42deg_Heat_P Parameter: Temperature (deg C) Value: 42 vs. 22
  misc_feature: MA Experiment 108522 PARAMETER Experiment Name: Zm_42deg_Heat_P Parameter: Timepoint (hr) Value: 1
  misc_feature: MA Experiment 108522 PARAMETER Experiment Name: Zm_42deg_Heat_P Parameter: Tissue Value: Aerial
  misc_feature: MA Experiment ID: 108527 Result: Down-regulated in Transcription
  misc_feature: MA Experiment 108527 PARAMETER Experiment Name: Zm_5mM_NO_P Parameter: Age (day) Value: 8
  misc_feature: MA Experiment 108527 PARAMETER Experiment Name: Zm_5mM_NO_P Parameter: Organism Value: Zea mays
  misc_feature: MA Experiment 108527 PARAMETER Experiment Name: Zm_5mM_NO_P Parameter: Plant Line Value: 35A19
  misc_feature: MA Experiment 108527 PARAMETER Experiment Name: Zm_5mM_NO_P Parameter: Timepoint (hr) Value: 6
  misc_feature: MA Experiment 108527 PARAMETER Experiment Name: Zm_5mM_NO_P Parameter: Tissue Value: Aerial
  misc_feature: MA Experiment 108527 PARAMETER Experiment Name: Zm_5mM_NO_P Parameter: Treatment Value: 5mM NO vs. No Treatment
  misc_feature: MA Experiment ID: 108535 Result: Up-regulated in Transcription
  misc_feature: MA Experiment 108535 PARAMETER Experiment Name: Zm_Meristem_P Parameter: Age (day) Value: 8
  misc_feature: MA Experiment 108535 PARAMETER Experiment Name: Zm_Meristem_P Parameter: Organism Value: Zea mays
  misc_feature: MA Experiment 108535 PARAMETER Experiment Name: Zm_Meristem_P Parameter: Plant Line Value: 35A19
  misc_feature: MA Experiment 108535 PARAMETER Experiment Name: Zm_Meristem_P Parameter: Tissue Value: Root Meristem vs. Above Root Meristem
  misc_feature: MA Experiment ID: 108536 Result: Down-regulated in Transcription
  misc_feature: MA Experiment 108536 PARAMETER Experiment Name: Zm_Meristem_P Parameter: Age (day) Value: 8
  misc_feature: MA Experiment 108536 PARAMETER Experiment Name: Zm_Meristem_P Parameter: Organism Value: Zea mays
  misc_feature: MA Experiment 108536 PARAMETER Experiment Name: Zm_Meristem_P Parameter: Plant Line Value: 35A19
  misc_feature: MA Experiment 108536 PARAMETER Experiment Name: Zm_Meristem_P Parameter: Tissue Value: Shoot Meristem vs. Above Shoot Meristem
  misc_feature: MA Experiment ID: 108544 Result: Down-regulated in Transcription
  misc_feature: MA Experiment ID: 108547 Result: Up-regulated in Transcription
  misc_feature: MA Experiment 108547 PARAMETER Experiment Name: Zm_Imbibed_Seeds_P Parameter: Age (day) Value: 4 vs. 2
  misc_feature: MA Experiment 108547 PARAMETER Experiment Name: Zm_Imbibed_Seeds_P Parameter: Organism Value: Zea mays
  misc_feature: MA Experiment 108547 PARAMETER Experiment Name: Zm_Imbibed_Seeds_P Parameter: Plant Line Value: 35A19
  misc_feature: MA Experiment 108547 PARAMETER Experiment Name: Zm_Imbibed_Seeds_P Parameter: Tissue Value: Aerial vs. Embryo
  misc_feature: MA Experiment ID: 108556 Result: Down-regulated in Transcription
  misc_feature: MA Experiment 108556 PARAMETER Experiment Name: Zm_Drought_P Parameter: Age (day) Value: 9
  misc_feature: MA Experiment 108556 PARAMETER Experiment Name: Zm_Drought_P Parameter: Organism Value: Zea mays
  misc_feature: MA Experiment 108556 PARAMETER Experiment Name: Zm_Drought_P Parameter: Plant Line Value: 35A19
  misc_feature: MA Experiment 108556 PARAMETER Experiment Name: Zm_Drought_P Parameter: Timepoint (hr) Value: 24
  misc_feature: MA Experiment 108556 PARAMETER Experiment Name: Zm_Drought_P Parameter: Tissue Value: Aerial
  misc_feature: MA Experiment 108556 PARAMETER Experiment Name: Zm_Drought_P Parameter: Treatment Value: Drought vs. No Drought
  misc_feature: MA Experiment ID: 108689 Result: Down-regulated in Transcription
  misc_feature: MA Experiment 108689 PARAMETER Experiment Name: Zm_Drought_Roots_P Parameter: Age (day) Value: 9
  misc_feature: MA Experiment 108689 PARAMETER Experiment Name: Zm_Drought_Roots_P Parameter: Organism Value: Zea mays
  misc_feature: MA Experiment 108689 PARAMETER Experiment Name: Zm_Drought_Roots_P Parameter: Plant Line Value: 35A19
  misc_feature: MA Experiment 108689 PARAMETER Experiment Name: Zm_Drought_Roots_P Parameter: Timepoint (hr) Value: 24
  misc_feature: MA Experiment 108689 PARAMETER Experiment Name: Zm_Drought_Roots_P Parameter: Tissue Value: Roots
  misc_feature: MA Experiment 108689 PARAMETER Experiment Name: Zm_Drought_Roots_P Parameter: Treatment Value: Drought vs. No Drought
  misc_feature: MA Experiment ID: 20000477 Result: Down-regulated in Transcription
  misc_feature: MA Experiment 20000477 PARAMETER Experiment Name: Zm_5mM_SA_P Parameter: Age (day) Value: 10
  misc_feature: MA Experiment 20000477 PARAMETER Experiment Name: Zm_5mM_SA_P Parameter: Organism Value: Zea mays
  misc_feature: MA Experiment 20000477 PARAMETER Experiment Name: Zm_5mM_SA_P Parameter: Plant Line Value: 35A19
  misc_feature: MA Experiment 20000477 PARAMETER Experiment Name: Zm_5mM_SA_P Parameter: Timepoint (hr) Value: 48
  misc_feature: MA Experiment 20000477 PARAMETER Experiment Name: Zm_5mM_SA_P Parameter: Tissue Value: Aerial
  misc_feature: MA Experiment 20000477 PARAMETER Experiment Name: Zm_5mM_SA_P Parameter: Treatment Value: 5mM SA vs. No Treatment
  misc_feature: MA Experiment ID: 20000478 Result: Down-regulated in Transcription
  misc_feature: MA Experiment 20000478 PARAMETER Experiment Name: Zm_5mM_SA_P Parameter: Age (day) Value: 11
  misc_feature: MA Experiment 20000478 PARAMETER Experiment Name: Zm_5mM_SA_P Parameter: Organism Value: Zea mays
  misc_feature: MA Experiment 20000478 PARAMETER Experiment Name: Zm_5mM_SA_P Parameter: Plant Line Value: 35A19
  misc_feature: MA Experiment 20000478 PARAMETER Experiment Name: Zm_5mM_SA_P Parameter: Timepoint (hr) Value: 72
  misc_feature: MA Experiment 20000478 PARAMETER Experiment Name: Zm_5mM_SA_P Parameter: Tissue Value: Aerial
  misc_feature: MA Experiment 20000478 PARAMETER Experiment Name: Zm_5mM_SA_P Parameter: Treatment Value: 5mM SA vs. No Treatment
  misc_feature: MA Experiment ID: 20000479 Result: Down-regulated in Transcription
  misc_feature: MA Experiment 20000479 PARAMETER Experiment Name: Zm_Drought_P Parameter: Age (day) Value: 10
  misc_feature: MA Experiment 20000479 PARAMETER Experiment Name: Zm_Drought_P Parameter: Organism Value: Zea mays
  misc_feature: MA Experiment 20000479 PARAMETER Experiment Name: Zm_Drought_P Parameter: Plant Line Value: 35A19
  misc_feature: MA Experiment 20000479 PARAMETER Experiment Name: Zm_Drought_P Parameter: Timepoint (hr) Value: 48
  misc_feature: MA Experiment 20000479 PARAMETER Experiment Name: Zm_Drought_P Parameter: Tissue Value: Aerial
  misc_feature: MA Experiment 20000479 PARAMETER Experiment Name: Zm_Drought_P Parameter: Treatment Value: Drought vs. No Drought
  misc_feature: MA Experiment ID: 20000480 Result: Down-regulated in Transcription
  misc_feature: MA Experiment 20000480 PARAMETER Experiment Name: Zm_Drought_P Parameter: Age (day) Value: 11
  misc_feature: MA Experiment 20000480 PARAMETER Experiment Name: Zm_Drought_P Parameter: Organism Value: Zea mays
  misc_feature: MA Experiment 20000480 PARAMETER Experiment Name: Zm_Drought_P Parameter: Plant Line Value: 35A19
  misc_feature: MA Experiment 20000480 PARAMETER Experiment Name: Zm_Drought_P Parameter: Timepoint (hr) Value: 72
  misc_feature: MA Experiment 20000480 PARAMETER Experiment Name: Zm_Drought_P Parameter: Tissue Value: Aerial
  misc_feature: MA Experiment 20000480 PARAMETER Experiment Name: Zm_Drought_P Parameter: Treatment Value: Drought vs. No Drought
  misc_feature: MA Experiment ID: 20000535 Result: Down-regulated in Transcription
  misc_feature: MA Experiment 20000535 PARAMETER Experiment Name: Zm_Hybrid_Seed_Dev_P Parameter: DAP Value: 30 vs. 12
  misc_feature: MA Experiment 20000535 PARAMETER Experiment Name: Zm_Hybrid_Seed_Dev_P Parameter: Organism Value: Zea mays
  misc_feature: MA Experiment 20000535 PARAMETER Experiment Name: Zm_Hybrid_Seed_Dev_P Parameter: Plant Line Value: 35A19
  misc_feature: MA Experiment 20000535 PARAMETER Experiment Name: Zm_Hybrid_Seed_Dev_P Parameter: Tissue Value: Embryo vs. Unfert Floret
  misc_feature: MA Experiment ID: 20000626 Result: Down-regulated in Transcription
  misc_feature: MA Experiment 20000626 PARAMETER Experiment Name: Zm_Herbicide-Treatments_P Parameter: Timepoint (hr) Value: 12
  misc_feature: MA Experiment 20000626 PARAMETER Experiment Name: Zm_Herbicide-Treatments_P Parameter: Tissue Value: Aerial
  misc_feature: MA Experiment 20000626 PARAMETER Experiment Name: Zm_Herbicide-Treatments_P Parameter: Treatment Value: Roundup vs. No Treatment
  misc_feature: MA Experiment ID: 20001608 Result: Up-regulated in Transcription
  misc_feature: MA Experiment 20001608 PARAMETER Experiment Name: Zm_50ppm_KNO3_L-to-H_P Parameter: Age (day) Value: 21
  misc_feature: MA Experiment 20001608 PARAMETER Experiment Name: Zm_50ppm_KNO3_L-to-H_P Parameter: Organism Value: Zea mays
  misc_feature: MA Experiment 20001608 PARAMETER Experiment Name: Zm_50ppm_KNO3_L-to-H_P Parameter: Plant Line Value: 35A19
  misc_feature: MA Experiment 20001608 PARAMETER Experiment Name: Zm_50ppm_KNO3_L-to-H_P Parameter: Timepoint (hr) Value: 48
  misc_feature: MA Experiment 20001608 PARAMETER Experiment Name: Zm_50ppm_KNO3_L-to-H_P Parameter: Tissue Value: Shoots
  misc_feature: MA Experiment 20001608 PARAMETER Experiment Name: Zm_50ppm_KNO3_L-to-H_P Parameter: Treatment Value: 50ppm KNO3 vs. 50ppm KCl
  misc_feature: MA Experiment ID: 20001614 Result: Up-regulated in Transcription
  misc_feature: MA Experiment 20001614 PARAMETER Experiment Name: Zm_50ppm_KNO3_L-to-H_P Parameter: Age (day) Value: 21
  misc_feature: MA Experiment 20001614 PARAMETER Experiment Name: Zm_50ppm_KNO3_L-to-H_P Parameter: Organism Value: Zea mays
  misc_feature: MA Experiment 20001614 PARAMETER Experiment Name: Zm_50ppm_KNO3_L-to-H_P Parameter: Plant Line Value: 35A19
  misc_feature: MA Experiment 20001614 PARAMETER Experiment Name: Zm_50ppm_KNO3_L-to-H_P Parameter: Timepoint (hr) Value: 48
  misc_feature: MA Experiment 20001614 PARAMETER Experiment Name: Zm_50ppm_KNO3_L-to-H_P Parameter: Tissue Value: Roots
  misc_feature: MA Experiment 20001614 PARAMETER Experiment Name: Zm_50ppm_KNO3_L-to-H_P Parameter: Treatment Value: 50ppm KNO3 vs. 50ppm KCl
gcacgagaccattacctagaacatcctaatcgaaaagtccgtcgtctcgcgctctcgtttcgtcgctacgctagcttccagtcccgggcttagcaactgtgctgctgttgcactgcacccggcgcacgcagagatgcgccgtgtcgggacgggtgtgaggatgctttgcggcgcggcgctgtcggtgcttctgcttctcgcgggcggcgcggcggcgtcgcactcgcgctcgtcgtgccccgccacgccgccggacgcggggaacacgctgcaggtgtcgcacgcgttcgggccgtgctcgccgctgggccccgggacggcggcgccgtcgtgggcggggttcctggcggaccaggcgtcgcgtgacgcgtcgcggctgctgtacctggactcgctggcggtgcgtggccgcgcccgcgcgtacgcgcccatcgcgtcggggcggcagctgctgcagacgctgacgtacgtggtgcgggccagcctcggcacgccgccgcagcagctgctcctggccgtcgacaccagcaacgacgcctcgtggatcccttgcgccggctgcgcgggctgccccacgtcgtccgcggcgcccttcgacccggccgcgtccgcctcgtaccgcacggtgccctgcgggtcgccgctgtgcgcgcaggcacccaacgcggcgtgcccgcccggcggcaaggcctgcggcttcagcctcacctacgccgactcctcgctgcaggccgcgctgtcgcaggactccctcgccgtcgcaggcaacgccgtgaaggcctacaccttcgggtgcctgcagagggccactggcacggctgcgccgccgcaggggctgctgggtctcggccgcggcccgctgtcgttcctttcgcagaccaaggacatgtacgaggccaccttctcgtactgtctccccagcttcaagtcgctcaacttctctggaacgctccggctcgggcgcaacggccagccgcagcgcatcaagacgacgccgctgctggccaacccgcaccggtcgtcgctctactacgtgaacatgaccggcgtccgcgtgggcaggaaggtggtgcccatcccggcgttcgacccggcgacgggcgcgggcaccgtgctggactctggcaccatgttcacccggctggtggcgccggcgtacgtggccgtgcgggacgaggtccggcgccgcgtcggcgcgcccgtatcctcgctgggagggttcgacacgtgcttcaacaccaccgccgtcgcgtggccgcccatgacgctgctgttcgacggcatgcaggtgacgttgccggaggagaacgtggtcatccacagcacgtacgggaccatcagctgcctggccatggccgcggcgcccgacggcgtcaacaccgtgctcaacgtcatcgccagcatgcagcagcagaaccaccgtgtgctcttcgacgtgcccaacggacgcgtcggcttcgcgcgcgagcgctgcactgccgcttgatcagcttgctcgcgcgcctgcgcgcgggctcggattcgggttatatttagttaaacctacgttctacggttgtggacgtcatgcactgctgtcggagtgggtgattaataatttaactttccttttctttttaatctcgttgctcttcagatttaccatatgtgtttcacattcaccgcgttatgtggtttaggggctgaatgattggggtctaaataatgtactgt

SEQ ID NO: 2916 - protein, 450 aa, Zea mays subsp. mays
  peptide (1)..(450): Ceres Seq. ID no. 13498436
  misc_feature (71)..(445): Pfam Name: Eukaryotic aspartyl protease Pfam Description: Eukaryotic aspartyl protease
  misc_feature (112)..(447): Homolog of NCBI NO: 15231010 NR Description: expressed protein [Arabidopsis thaliana]
  misc_feature (72)..(447): Homolog of NCBI NO: 21594980 NR Description: chloroplast nucleoid DNA binding protein,
  misc_feature (72)..(447): Homolog of NCBI NO: 15223368 NR Description: chloroplast nucleoid DNA binding protein -related
  misc_feature (82)..(447): Homolog of NCBI NO: 21450872 NR Description: unknown protein [Arabidopsis thaliana]
  misc_feature (19)..(447): Homolog of NCBI NO: 18391062 NR Description: expressed protein [Arabidopsis thaliana]
  misc_feature (46)..(448): Homolog of NCBI NO: 15232503 NR Description: nucleoid DNA-binding - like protein [Arabidopsis
  misc_feature (34)..(448): Homolog of NCBI NO: 15240680 NR Description: nucleoid DNA-binding-related protein [Arabidopsis
  misc_feature (46)..(448): Homolog of NCBI NO: 21617933 NR Description: nucleoid DNA-binding-like protein [Arabidopsis
  misc_feature (38)..(449): Homolog of NCBI NO: 20161865 NR Description: putative nucleoid DNA-binding-like protein
  misc_feature (15)..(450): Homolog of NCBI NO: 34899068 NR Description: similar to nucleoid DNA-binding-like protein
MRRVGTGVRMLCGAALSVLLLLAGGAAASHSRSSCPATPPDAGNTLQVSHAFGPCSPLGPGTAAPSWAGFLADQASRDASRLLYLDSLAVRGRARAYAPIASGRQLLQTLTYVVRASLGTPPQQLLLAVDTSNDASWIPCAGCAGCPTSSAAPFDPAASASYRTVPCGSPLCAQAPNAACPPGGKACGFSLTYADSSLQAALSQDSLAVAGNAVKAYTFGCLQRATGTAAPPQGLLGLGRGPLSFLSQTKDMYEATFSYCLPSFKSLNFSGTLRLGRNGQPQRIKTTPLLANPHRSSLYYVNMTGVRVGRKVVPIPAFDPATGAGTVLDSGTMFTRLVAPAYVAVRDEVRRRVGAPVSSLGGFDTCFNTTAVAWPPMTLLFDGMQVTLPEENVVIHSTYGTISCLAMAAAPDGVNTVLNVIASMQQQNHRVLFDVPNGRVGFARERCTAA

SEQ ID NO: 2917 - protein, 441 aa, Zea mays subsp. mays
  peptide (1)..(441): Ceres Seq. ID no. 13498437
  misc_feature (62)..(436): Pfam Name: Eukaryotic aspartyl protease Pfam Description: Eukaryotic aspartyl protease
  misc_feature (103)..(438): Homolog of NCBI NO: 15231010 NR Description: expressed protein [Arabidopsis thaliana]
  misc_feature (63)..(438): Homolog of NCBI NO: 21594980 NR Description: chloroplast nucleoid DNA binding protein,
  misc_feature (63)..(438): Homolog of NCBI NO: 15223368 NR Description: chloroplast nucleoid DNA binding protein -related
  misc_feature (73)..(438): Homolog of NCBI NO: 21450872 NR Description: unknown protein [Arabidopsis thaliana]
  misc_feature (10)..(438): Homolog of NCBI NO: 18391062 NR Description: expressed protein [Arabidopsis thaliana]
  misc_feature (37)..(439): Homolog of NCBI NO: 15232503 NR Description: nucleoid DNA-binding - like protein [Arabidopsis
  misc_feature (25)..(439): Homolog of NCBI NO: 15240680 NR Description: nucleoid DNA-binding-related protein [Arabidopsis
  misc_feature (37)..(439): Homolog of NCBI NO: 21617933 NR Description: nucleoid DNA-binding-like protein [Arabidopsis
  misc_feature (29)..(440): Homolog of NCBI NO: 20161865 NR Description: putative nucleoid DNA-binding-like protein
  misc_feature (6)..(441): Homolog of NCBI NO: 34899068 NR Description: similar to nucleoid DNA-binding-like protein
MLCGAALSVLLLLAGGAAASHSRSSCPATPPDAGNTLQVSHAFGPCSPLGPGTAAPSWAGFLADQASRDASRLLYLDSLAVRGRARAYAPIASGRQLLQTLTYVVRASLGTPPQQLLLAVDTSNDASWIPCAGCAGCPTSSAAPFDPAASASYRTVPCGSPLCAQAPNAACPPGGKACGFSLTYADSSLQAALSQDSLAVAGNAVKAYTFGCLQRATGTAAPPQGLLGLGRGPLSFLSQTKDMYEATFSYCLPSFKSLNFSGTLRLGRNGQPQRIKTTPLLANPHRSSLYYVNMTGVRVGRKVVPIPAFDPATGAGTVLDSGTMFTRLVAPAYVAVRDEVRRRVGAPVSSLGGFDTCFNTTAVAWPPMTLLFDGMQVTLPEENVVIHSTYGTISCLAMAAAPDGVNTVLNVIASMQQQNHRVLFDVPNGRVGFARERCTAA

SEQ ID NO: 2918 - DNA, 1433 bp, Zea mays subsp. mays
  misc_feature (1)..(1433): Ceres Seq. ID no. 12350246
  misc_feature: MA Experiment ID: 108522 Result: Up-regulated in Transcription
  misc_feature: MA Experiment 108522 PARAMETER Experiment Name: Zm_42deg_Heat_P Parameter: Age (day) Value: 8
  misc_feature: MA Experiment 108522 PARAMETER Experiment Name: Zm_42deg_Heat_P Parameter: Organism Value: Zea mays
  misc_feature: MA Experiment 108522 PARAMETER Experiment Name: Zm_42deg_Heat_P Parameter: Plant Line Value: 35A19
  misc_feature: MA Experiment 108522 PARAMETER Experiment Name: Zm_42deg_Heat_P Parameter: Temperature (deg C) Value: 42 vs. 22
  misc_feature: MA Experiment 108522 PARAMETER Experiment Name: Zm_42deg_Heat_P Parameter: Timepoint (hr) Value: 1
  misc_feature: MA Experiment 108522 PARAMETER Experiment Name: Zm_42deg_Heat_P Parameter: Tissue Value: Aerial
gacacacgaaattctcaggtcccggtcccgggtccaggcacccttctcgctcggttgctcgggagctttccccttcctgttcctgaagcttccgacatccgaccgcctcctcctcctcgttctactcgccgccccttctaggatcatccagaggcgtgccggtgaaacgcgagagcggtgaggcatggcgatgcagacgggggtcgcgacctccaaggtcctcatcctcgtcggtgcagggatgacgggctcgatcctgctgcggaatggccgcttatctgatgtgttgggagaactccaggagattatgaagggtgtaaatcaaggaactgcttcgggtccctatgacattgcacttattcaagctcagattcggaatttagcccaagaagtcagagatttgacattgtcaaagcccattaccatactgaatggcaaatctgactcgggaggcagtttatcatcctacatactgccagcagcagcagttggagcaatgggttattgctacatgtgggaaggggttgtctctctcagatgtcatgtttgtcacaaaacacaacatggcaaatgctgttcagagcatgtcaaagcagttggagcaagtttcatcagcactagctgcaacaaaaagacatctaactcaacggcttgagaatttggatggcaaaatggatgaacaagtagaggtctccaaagctattagaaatgaggtcaatgatgttaaagatgacctgtctcaaattggatttgatgtcgaatcaattcagaaaatggttgctggattggagggaaagatcgagttacttgagaacaaacaggacgtggctaatactggtatctggtacctctgccaagtagcaggcggtttaaaagatggaataaacaccaggtttttccaggaaaccagtgagaagctgaagctctcacattcagctcaacctgaaaacaagccagtgaaggggcttgaatttttttcggaaagcgccatggaacagaaagtagctgactccaaaccaattgcggtgacagtcgacgctgagaagcctgagaaaaccgctgctgtaatgggcaccacagtgcacaggtctatcaggttctcatatcggaaggcaggccttgctttgtgatcaaatcctctccgcttgagatgcacgtggccttcctggttgcttttcttttttggcaacaaccttcctggttgctttgtctgatggtcagaaaacatggaagaataacctgcaactggagtgacagaatttcttttccccgcagtagcacaggtgtgcgttatttggtctgatttgaaactatcttcagtccgctatcaatttttttccttggattttgattcattttatgtttcgacttgttgccttgtatactgtaaaggcattggaaagaatacataaaacacgaatgttttttttgtc

SEQ ID NO: 2919 - protein, 232 aa, Zea mays subsp. mays
  peptide (1)..(232): Ceres Seq. ID no. 12350247
  misc_feature (30)..(130): Homolog of NCBI NO: 15128438 NR Description: contains EST D16001(C2001)~similar to Oryza
  misc_feature (30)..(142): Homolog of NCBI NO: 34906300 NR Description: unnamed protein product [Oryza sativa (japonica
  misc_feature (30)..(166): Homolog of NCBI NO: 7487252 NR Description: hypothetical protein At2g02730 [imported] -
  misc_feature (30)..(166): Homolog of NCBI NO: 15227027 NR Description: expressed protein
  misc_feature (30)..(146): Homolog of NCBI NO: 25361065 NR Description: protein T7N9.6 [imported] - Arabidopsis thaliana
  misc_feature (30)..(146): Homolog of NCBI NO: 21537323 NR Description: unknown [Arabidopsis thaliana]
  misc_feature (30)..(146): Homolog of NCBI NO: 18396143 NR Description: bZIP family transcription factor
  misc_feature (30)..(220): Homolog of NCBI NO: 18390460 NR Description: expressed protein
  misc_feature (30)..(130): Homolog of NCBI NO: 34894218 NR Description: P0439B06.30 [Oryza sativa (japonica
MANLTREAVYHPTYCQQQQLEQWVIATCGKGLSLSDVMFVTKHNMANAVQSMSKQLEQVSSALAATKRHLTQRLENLDGKMDEQVEVSKAIRNEVNDVKDDLSQIGFDVESIQKMVAGLEGKIELLENKQDVANTGIWYLCQVAGGLKDGINTRFFQETSEKLKLSHSAQPENKPVKGLEFFSESAMEQKVADSKPIAVTVDAEKPEKTAAVMGTTVHRSIRFSYRKAGLAL

SEQ ID NO: 2920 - protein, 195 aa, Zea mays subsp. mays
  peptide (1)..(195): Ceres Seq. ID no. 12350248
  misc_feature (1)..(93): Homolog of NCBI NO: 34894218 NR Description: P0439B06.30 [Oryza sativa (japonica
  misc_feature (1)..(93): Homolog of NCBI NO: 15128438 NR Description: contains EST D16001(C2001)~similar to Oryza
  misc_feature (1)..(105): Homolog of NCBI NO: 34906300 NR Description: unnamed protein product [Oryza sativa (japonica
  misc_feature (1)..(129): Homolog of NCBI NO: 7487252 NR Description: hypothetical protein At2g02730 [imported] -
  misc_feature (1)..(129): Homolog of NCBI NO: 15227027 NR Description: expressed protein
  misc_feature (1)..(109): Homolog of NCBI NO: 25361065 NR Description: protein T7N9.6 [imported] - Arabidopsis thaliana
  misc_feature (1)..(109): Homolog of NCBI NO: 21537323 NR Description: unknown [Arabidopsis thaliana]
  misc_feature (1)..(109): Homolog of NCBI NO: 18396143 NR Description: bZIP family transcription factor
  misc_feature (1)..(183): Homolog of NCBI NO: 18390460 NR Description: expressed protein
MFVTKHNMANAVQSMSKQLEQVSSALAATKRHLTQRLENLDGKMDEQVEVSKAIRNEVNDVKDDLSQIGFDVESIQKMVAGLEGKIELLENKQDVANTGIWYLCQVAGGLKDGINTRFFQETSEKLKLSHSAQPENKPVKGLEFFSESAMEQKVADSKPIAVTVDAEKPEKTAAVMGTTVHRSIRFSYRKAGLAL

SEQ ID NO: 2921 - protein, 188 aa, Zea mays subsp. mays
  peptide (1)..(188): Ceres Seq. ID no. 12350249
  misc_feature (1)..(86): Homolog of NCBI NO: 34894218 NR Description: P0439B06.30 [Oryza sativa (japonica
  misc_feature (1)..(86): Homolog of NCBI NO: 15128438 NR Description: contains EST D16001(C2001)~similar to Oryza
  misc_feature (1)..(98): Homolog of NCBI NO: 34906300 NR Description: unnamed protein product [Oryza sativa (japonica
  misc_feature (1)..(122): Homolog of NCBI NO: 7487252 NR Description: hypothetical protein At2g02730 [imported] -
  misc_feature (1)..(122): Homolog of NCBI NO: 15227027 NR Description: expressed protein
  misc_feature (1)..(102): Homolog of NCBI NO: 25361065 NR Description: protein T7N9.6 [imported] - Arabidopsis thaliana
  misc_feature (1)..(102): Homolog of NCBI NO: 21537323 NR Description: unknown [Arabidopsis thaliana]
  misc_feature (1)..(102): Homolog of NCBI NO: 18396143 NR Description: bZIP family transcription factor
  misc_feature (1)..(176): Homolog of NCBI NO: 18390460 NR Description: expressed protein
MANAVQSMSKQLEQVSSALAATKRHLTQRLENLDGKMDEQVEVSKAIRNEVNDVKDDLSQIGFDVESIQKMVAGLEGKIELLENKQDVANTGIWYLCQVAGGLKDGINTRFFQETSEKLKLSHSAQPENKPVKGLEFFSESAMEQKVADSKPIAVTVDAEKPEKTAAVMGTTVHRSIRFSYRKAGLAL

SEQ ID NO: 2922 - DNA, 1385 bp, Zea mays subsp. mays; identical to SEQ ID NO: 1445
  misc_feature (1)..(1385): Ceres Seq. ID no. 12349947
  misc_feature: MA Experiment ID: 20000535 Result: Up-regulated in Transcription
  misc_feature: MA Experiment 20000535 PARAMETER Experiment Name: Zm_Hybrid_Seed_Dev_P Parameter: DAP Value: 30 vs. 12
  misc_feature: MA Experiment 20000535 PARAMETER Experiment Name: Zm_Hybrid_Seed_Dev_P Parameter: Organism Value: Zea mays
  misc_feature: MA Experiment 20000535 PARAMETER Experiment Name: Zm_Hybrid_Seed_Dev_P Parameter: Plant Line Value: 35A19
  misc_feature: MA Experiment 20000535 PARAMETER Experiment Name: Zm_Hybrid_Seed_Dev_P Parameter: Tissue Value: Embryo vs. Unfert Floret

SEQ ID NO: 2923 - protein, 364 aa, Zea mays subsp. mays; identical to SEQ ID NO: 1446
  peptide (1)..(364): Ceres Seq. ID no. 12349948
  misc_feature (100)..(364): Homolog of NCBI NO: 19310928 NR Description: NADP dependent sorbitol 6-phosphate dehydrogenase
  misc_feature (100)..(364): Homolog of NCBI NO: 19310926 NR Description: NADP dependent sorbitol 6-phosphate dehydrogenase
  misc_feature (50)..(275): Homolog of NCBI NO: 32400786 NR Description: NADPH-dependent mannose 6-phosphate reductase
  misc_feature (56)..(364): Homolog of NCBI NO: 134153 NR Description: NADP-dependent D-sorbitol-6-phosphate
  misc_feature (57)..(364): Homolog of NCBI NO: 1835701 NR Description: NADPH-dependent mannose 6-phosphate reductase
  misc_feature (58)..(364): Homolog of NCBI NO: 21554266 NR Description: putative NADPH dependent mannose 6-phosphate
  misc_feature (58)..(364): Homolog of NCBI NO: 10334991 NR Description: NADPH-dependent mannose 6-phosphate reductase
  misc_feature (58)..(364): Homolog of NCBI NO: 15226502 NR Description: mannose 6-phosphate reductase (NADPH-dependent),
  misc_feature (58)..(364): Homolog of NCBI NO: 21592829 NR Description: putative NADPH dependent mannose 6-phosphate
  misc_feature (58)..(364): Homolog of NCBI NO: 15226489 NR Description: mannose 6-phosphate reductase (NADPH-dependent),
  misc_feature (100)..(364): Homolog of NCBI NO: 19310928 NR Description: NADP dependent sorbitol 6-phosphate dehydrogenase
  misc_feature (100)..(364): Homolog of NCBI NO: 19310926 NR Description: NADP dependent sorbitol 6-phosphate dehydrogenase
  misc_feature (50)..(275): Homolog of NCBI NO: 32400786 NR Description: NADPH-dependent mannose 6-phosphate reductase
  misc_feature (56)..(364): Homolog of NCBI NO: 134153 NR Description: NADP-dependent D-sorbitol-6-phosphate
  misc_feature (57)..(364): Homolog of NCBI NO: 1835701 NR Description: NADPH-dependent mannose 6-phosphate reductase
  misc_feature (58)..(364): Homolog of NCBI NO: 21554266 NR Description: putative NADPH dependent mannose 6-phosphate
  misc_feature (58)..(364): Homolog of NCBI NO: 10334991 NR Description: NADPH-dependent mannose 6-phosphate reductase
  misc_feature (58)..(364): Homolog of NCBI NO: 15226502 NR Description: mannose 6-phosphate reductase (NADPH-dependent),
  misc_feature (58)..(364): Homolog of NCBI NO: 21592829 NR Description: putative NADPH dependent mannose 6-phosphate
  misc_feature (58)..(364): Homolog of NCBI NO: 15226489 NR Description: mannose 6-phosphate reductase (NADPH-dependent),

SEQ ID NO: 2924 - protein, 311 aa, Zea mays subsp. mays; identical to SEQ ID NO: 1447
  peptide (1)..(311): Ceres Seq. ID no. 12349949
  misc_feature (1)..(222): Homolog of NCBI NO: 32400786 NR Description: NADPH-dependent mannose 6-phosphate reductase
  misc_feature (3)..(311): Homolog of NCBI NO: 134153 NR Description: NADP-dependent D-sorbitol-6-phosphate
  misc_feature (4)..(311): Homolog of NCBI NO: 1835701 NR Description: NADPH-dependent mannose 6-phosphate reductase
  misc_feature (5)..(311): Homolog of NCBI NO: 21554266 NR Description: putative NADPH dependent mannose 6-phosphate
  misc_feature (5)..(311): Homolog of NCBI NO: 10334991 NR Description: NADPH-dependent mannose 6-phosphate reductase
  misc_feature (5)..(311): Homolog of NCBI NO: 15226502 NR Description: mannose 6-phosphate reductase (NADPH-dependent),
  misc_feature (5)..(311): Homolog of NCBI NO: 21592829 NR Description: putative NADPH dependent mannose 6-phosphate
  misc_feature (5)..(311): Homolog of NCBI NO: 15226489 NR Description: mannose 6-phosphate reductase (NADPH-dependent),
  misc_feature (47)..(311): Homolog of NCBI NO: 19310928 NR Description: NADP dependent sorbitol 6-phosphate dehydrogenase
  misc_feature (47)..(311): Homolog of NCBI NO: 19310926 NR Description: NADP dependent sorbitol 6-phosphate dehydrogenase
  misc_feature (47)..(311): Homolog of NCBI NO: 19310928 NR Description: NADP dependent sorbitol 6-phosphate dehydrogenase
  misc_feature (47)..(311): Homolog of NCBI NO: 19310926 NR Description: NADP dependent sorbitol 6-phosphate dehydrogenase
  misc_feature (1)..(222): Homolog of NCBI NO: 32400786 NR Description: NADPH-dependent mannose 6-phosphate reductase
  misc_feature (3)..(311): Homolog of NCBI NO: 134153 NR Description: NADP-dependent D-sorbitol-6-phosphate
  misc_feature (4)..(311): Homolog of NCBI NO: 1835701 NR Description: NADPH-dependent mannose 6-phosphate reductase
  misc_feature (5)..(311): Homolog of NCBI NO: 21554266 NR Description: putative NADPH dependent mannose 6-phosphate
  misc_feature (5)..(311): Homolog of NCBI NO: 10334991 NR Description: NADPH-dependent mannose 6-phosphate reductase
  misc_feature (5)..(311): Homolog of NCBI NO: 15226502 NR Description: mannose 6-phosphate reductase (NADPH-dependent),
  misc_feature (5)..(311): Homolog of NCBI NO: 21592829 NR Description: putative NADPH dependent mannose 6-phosphate
  misc_feature (5)..(311): Homolog of NCBI NO: 15226489 NR Description: mannose 6-phosphate reductase (NADPH-dependent),

SEQ ID NO: 2925 - protein, 299 aa, Zea mays subsp. mays; identical to SEQ ID NO: 1448
  peptide (1)..(299): Ceres Seq. ID no. 12349950
  misc_feature (35)..(299): Homolog of NCBI NO: 19310928 NR Description: NADP dependent sorbitol 6-phosphate dehydrogenase
  misc_feature (35)..(299): Homolog of NCBI NO: 19310926 NR Description: NADP dependent sorbitol 6-phosphate dehydrogenase
  misc_feature (1)..(210): Homolog of NCBI NO: 32400786 NR Description: NADPH-dependent mannose 6-phosphate reductase
  misc_feature (1)..(299): Homolog of NCBI NO: 134153 NR Description: NADP-dependent D-sorbitol-6-phosphate
  misc_feature (1)..(299): Homolog of NCBI NO: 1835701 NR Description: NADPH-dependent mannose 6-phosphate reductase
  misc_feature (1)..(299): Homolog of NCBI NO: 21554266 NR Description: putative NADPH dependent mannose 6-phosphate
  misc_feature (1)..(299): Homolog of NCBI NO: 10334991 NR Description: NADPH-dependent mannose 6-phosphate reductase
  misc_feature (1)..(299): Homolog of NCBI NO: 15226502 NR Description: mannose 6-phosphate reductase (NADPH-dependent),
  misc_feature (1)..(299): Homolog of NCBI NO: 21592829 NR Description: putative NADPH dependent mannose 6-phosphate
  misc_feature (1)..(299): Homolog of NCBI NO: 15226489 NR Description: mannose 6-phosphate reductase (NADPH-dependent),
  misc_feature (35)..(299): Homolog of NCBI NO: 19310928 NR Description: NADP dependent sorbitol 6-phosphate dehydrogenase
  misc_feature (35)..(299): Homolog of NCBI NO: 19310926 NR Description: NADP dependent sorbitol 6-phosphate dehydrogenase
  misc_feature (1)..(210): Homolog of NCBI NO: 32400786 NR Description: NADPH-dependent mannose 6-phosphate reductase
  misc_feature (1)..(299): Homolog of NCBI NO: 134153 NR Description: NADP-dependent D-sorbitol-6-phosphate
  misc_feature (1)..(299): Homolog of NCBI NO: 1835701 NR Description: NADPH-dependent mannose 6-phosphate reductase
  misc_feature (1)..(299): Homolog of NCBI NO: 21554266 NR Description: putative NADPH dependent mannose 6-phosphate
  misc_feature (1)..(299): Homolog of NCBI NO: 10334991 NR Description: NADPH-dependent mannose 6-phosphate reductase
  misc_feature (1)..(299): Homolog of NCBI NO: 15226502 NR Description: mannose 6-phosphate reductase (NADPH-dependent),
  misc_feature (1)..(299): Homolog of NCBI NO: 21592829 NR Description: putative NADPH dependent mannose 6-phosphate
  misc_feature (1)..(299): Homolog of NCBI NO: 15226489 NR Description: mannose 6-phosphate reductase (NADPH-dependent),

SEQ ID NO: 2926 - DNA, 1496 bp, Zea mays subsp. mays
  misc_feature (1)..(1496): Ceres Seq. ID no. 12374344
  misc_feature: MA Experiment ID: 108503 Result: Up-regulated in Transcription
  misc_feature: MA Experiment 108503 PARAMETER Experiment Name: Zm_Drought_P Parameter: Age (day) Value: 8
  misc_feature: MA Experiment 108503 PARAMETER Experiment Name: Zm_Drought_P Parameter: Organism Value: Zea mays
  misc_feature: MA Experiment 108503 PARAMETER Experiment Name: Zm_Drought_P Parameter: Plant Line Value: 35A19
  misc_feature: MA Experiment 108503 PARAMETER Experiment Name: Zm_Drought_P Parameter: Timepoint (hr) Value: 6
  misc_feature: MA Experiment 108503 PARAMETER Experiment Name: Zm_Drought_P Parameter: Tissue Value: Aerial
  misc_feature: MA Experiment 108503 PARAMETER Experiment Name: Zm_Drought_P Parameter: Treatment Value: Drought vs. No Drought
  misc_feature: MA Experiment ID: 108504 Result: Up-regulated in Transcription
  misc_feature: MA Experiment 108504 PARAMETER Experiment Name: Zm_Drought_P Parameter: Age (day) Value: 8
  misc_feature: MA Experiment 108504 PARAMETER Experiment Name: Zm_Drought_P Parameter: Organism Value: Zea mays
  misc_feature: MA Experiment 108504 PARAMETER Experiment Name: Zm_Drought_P Parameter: Plant Line Value: 35A19
  misc_feature: MA Experiment 108504 PARAMETER Experiment Name: Zm_Drought_P Parameter: Timepoint (hr) Value: 12
  misc_feature: MA Experiment 108504 PARAMETER Experiment Name: Zm_Drought_P Parameter: Tissue Value: Aerial
  misc_feature: MA Experiment 108504 PARAMETER Experiment Name: Zm_Drought_P Parameter: Treatment Value: Drought vs. No Drought
  misc_feature: MA Experiment ID: 108534 Result: Up-regulated in Transcription
  misc_feature: MA Experiment 108534 PARAMETER Experiment Name: Zm_4deg_Cold_P Parameter: Age (hr) Value: 8
  misc_feature: MA Experiment 108534 PARAMETER Experiment Name: Zm_4deg_Cold_P Parameter: Organism Value: Zea mays
  misc_feature: MA Experiment 108534 PARAMETER Experiment Name: Zm_4deg_Cold_P Parameter: Plant Line Value: 35A19
  misc_feature: MA Experiment 108534 PARAMETER Experiment Name: Zm_4deg_Cold_P Parameter: Temperature (deg C) Value: 4 vs. 22
  misc_feature: MA Experiment 108534 PARAMETER Experiment Name: Zm_4deg_Cold_P Parameter: Timepoint (hr) Value: 6
  misc_feature: MA Experiment 108534 PARAMETER Experiment Name: Zm_4deg_Cold_P Parameter: Tissue Value: Aerial
  misc_feature: MA Experiment ID: 108536 Result: Up-regulated in Transcription
  misc_feature: MA Experiment 108536 PARAMETER Experiment Name: Zm_Meristem_P Parameter: Age (day) Value: 8
  misc_feature: MA Experiment 108536 PARAMETER Experiment Name: Zm_Meristem_P Parameter: Organism Value: Zea mays
  misc_feature: MA Experiment 108536 PARAMETER Experiment Name: Zm_Meristem_P Parameter: Plant Line Value: 35A19
  misc_feature: MA Experiment 108536 PARAMETER Experiment Name: Zm_Meristem_P Parameter: Tissue Value: Shoot Meristem vs. Above Shoot Meristem
  misc_feature: MA Experiment ID: 108539 Result: Up-regulated in Transcription
  misc_feature: MA Experiment 108539 PARAMETER Experiment Name: Zm_20percent_PEG_P Parameter: Age (day) Value: 8
  misc_feature: MA Experiment 108539 PARAMETER Experiment Name: Zm_20percent_PEG_P Parameter: Organism Value: Zea mays
  misc_feature: MA Experiment 108539 PARAMETER Experiment Name: Zm_20percent_PEG_P Parameter: Plant Line Value: 35A19
  misc_feature: MA Experiment 108539 PARAMETER Experiment Name: Zm_20percent_PEG_P Parameter: Timepoint (hr) Value: 1
  misc_feature: MA Experiment 108539 PARAMETER Experiment Name: Zm_20percent_PEG_P Parameter: Tissue Value: Aerial
  misc_feature: MA Experiment 108539 PARAMETER Experiment Name: Zm_20percent_PEG_P Parameter: Treatment Value: 20percent PEG vs. No Treatment
  misc_feature: MA Experiment ID: 108540 Result: Up-regulated in Transcription
  misc_feature: MA Experiment 108540 PARAMETER Experiment Name: Zm_20percent_PEG_P Parameter: Age (day) Value: 8
  misc_feature: MA Experiment 108540 PARAMETER Experiment Name: Zm_20percent_PEG_P Parameter: Organism Value: Zea mays
  misc_feature: MA Experiment 108540 PARAMETER Experiment Name: Zm_20percent_PEG_P Parameter: Plant Line Value: 35A19
  misc_feature: MA Experiment 108540 PARAMETER Experiment Name: Zm_20percent_PEG_P Parameter: Timepoint (hr) Value: 6
  misc_feature: MA Experiment 108540 PARAMETER Experiment Name: Zm_20percent_PEG_P Parameter: Tissue Value: Aerial
  misc_feature: MA Experiment 108540 PARAMETER Experiment Name: Zm_20percent_PEG_P Parameter: Treatment Value: 20percent PEG vs. No Treatment
  misc_feature: MA Experiment ID: 108542 Result: Up-regulated in Transcription
  misc_feature: MA Experiment 108542 PARAMETER Experiment Name: Zm_150mM_NaCl_P Parameter: Age (day) Value: 8
  misc_feature: MA Experiment 108542 PARAMETER Experiment Name: Zm_150mM_NaCl_P Parameter: Organism Value: Zea mays
  misc_feature: MA Experiment 108542 PARAMETER Experiment Name: Zm_150mM_NaCl_P Parameter: Plant Line Value: 35A19
  misc_feature: MA Experiment 108542 PARAMETER Experiment Name: Zm_150mM_NaCl_P Parameter: Timepoint (hr) Value: 6
  misc_feature: MA Experiment 108542 PARAMETER Experiment Name: Zm_150mM_NaCl_P Parameter: Tissue Value: Aerial
  misc_feature: MA Experiment 108542 PARAMETER Experiment Name: Zm_150mM_NaCl_P Parameter: Treatment Value: 150mM NaCl vs. No Treatment
  misc_feature: MA Experiment ID: 108556 Result: Up-regulated in Transcription
  misc_feature: MA Experiment 108556 PARAMETER Experiment Name: Zm_Drought_P Parameter: Age (day) Value: 9
  misc_feature: MA Experiment 108556 PARAMETER Experiment Name: Zm_Drought_P Parameter: Organism Value: Zea mays
  misc_feature: MA Experiment 108556 PARAMETER Experiment Name: Zm_Drought_P Parameter: Plant Line Value: 35A19
  misc_feature: MA Experiment 108556 PARAMETER Experiment Name: Zm_Drought_P Parameter: Timepoint (hr) Value: 24
  misc_feature: MA Experiment 108556 PARAMETER Experiment Name: Zm_Drought_P Parameter: Tissue Value: Aerial
  misc_feature: MA Experiment 108556 PARAMETER Experiment Name: Zm_Drought_P Parameter: Treatment Value: Drought vs. No Drought
  misc_feature: MA Experiment ID: 108597 Result: Up-regulated in Transcription
  misc_feature: MA Experiment 108597 PARAMETER Experiment Name: Zm_100uM_ABA_P Parameter: Age (day) Value: 9
  misc_feature: MA Experiment 108597 PARAMETER Experiment Name: Zm_100uM_ABA_P Parameter: Organism Value: Zea mays
  misc_feature: MA Experiment 108597 PARAMETER Experiment Name: Zm_100uM_ABA_P Parameter: Plant Line Value: 35A19
  misc_feature: MA Experiment 108597 PARAMETER Experiment Name: Zm_100uM_ABA_P Parameter: Timepoint (hr) Value: 24
  misc_feature: MA Experiment 108597 PARAMETER Experiment Name: Zm_100uM_ABA_P Parameter: Tissue Value: Aerial
  misc_feature: MA Experiment 108597 PARAMETER Experiment Name: Zm_100uM_ABA_P Parameter: Treatment Value: 100uM ABA vs. No Treatment
  misc_feature: MA Experiment ID: 108688 Result: Down-regulated in Transcription
  misc_feature: MA Experiment 108688 PARAMETER Experiment Name: Zm_Embryos-Flowers__P Parameter: Tissue Value: Immature Flowers vs. Aerial+
  misc_feature: MA Experiment ID: 20000108 Result: Down-regulated in Transcription
  misc_feature: MA Experiment 20000108 PARAMETER Experiment Name: Zm_Root-Tips_P Parameter: Age (day) Value: 12
  misc_feature: MA Experiment 20000108 PARAMETER Experiment Name: Zm_Root-Tips_P Parameter: Organism Value: Zea mays
  misc_feature: MA Experiment 20000108 PARAMETER Experiment Name: Zm_Root-Tips_P Parameter: Tissue Value: Root tips vs. Root mid region    35
  misc_feature: MA Experiment 20000108 PARAMETER Experiment Name: Zm_Root-Tips_P Parameter: Tissue Value: Root tips vs. Root mid region   Sequence Listing-Misc Features (4)
  misc_feature: MA Experiment ID: 20000479 Result: Up-regulated in Transcription
  misc_feature: MA Experiment 20000479 PARAMETER Experiment Name: Zm_Drought_P Parameter: Age (day) Value: 10
  misc_feature: MA Experiment 20000479 PARAMETER Experiment Name: Zm_Drought_P Parameter: Organism Value: Zea mays
  misc_feature: MA Experiment 20000479 PARAMETER Experiment Name: Zm_Drought_P Parameter: Plant Line Value: 35A19
  misc_feature: MA Experiment 20000479 PARAMETER Experiment Name: Zm_Drought_P Parameter: Timepoint (hr) Value: 48
  misc_feature: MA Experiment 20000479 PARAMETER Experiment Name: Zm_Drought_P Parameter: Tissue Value: Aerial
  misc_feature: MA Experiment 20000479 PARAMETER Experiment Name: Zm_Drought_P Parameter: Treatment Value: Drought vs. No Drought
  misc_feature: MA Experiment ID: 20000480 Result: Up-regulated in Transcription
  misc_feature: MA Experiment 20000480 PARAMETER Experiment Name: Zm_Drought_P Parameter: Age (day) Value: 11
  misc_feature: MA Experiment 20000480 PARAMETER Experiment Name: Zm_Drought_P Parameter: Organism Value: Zea mays
  misc_feature: MA Experiment 20000480 PARAMETER Experiment Name: Zm_Drought_P Parameter: Plant Line Value: 35A19
  misc_feature: MA Experiment 20000480 PARAMETER Experiment Name: Zm_Drought_P Parameter: Timepoint (hr) Value: 72
  misc_feature: MA Experiment 20000480 PARAMETER Experiment Name: Zm_Drought_P Parameter: Tissue Value: Aerial
  misc_feature: MA Experiment 20000480 PARAMETER Experiment Name: Zm_Drought_P Parameter: Treatment Value: Drought vs. No Drought
  misc_feature: MA Experiment ID: 20000534 Result: Down-regulated in Transcription
  misc_feature: MA Experiment 20000534 PARAMETER Experiment Name: Zm_Hybrid_Pollen_P Parameter: Age (day) Value: 8
  misc_feature: MA Experiment 20000534 PARAMETER Experiment Name: Zm_Hybrid_Pollen_P Parameter: Organism Value: Zea mays
  misc_feature: MA Experiment 20000534 PARAMETER Experiment Name: Zm_Hybrid_Pollen_P Parameter: Plant Line Value: 35A19
  misc_feature: MA Experiment 20000534 PARAMETER Experiment Name: Zm_Hybrid_Pollen_P Parameter: Tissue Value: Pollen vs. Aerial
  misc_feature: MA Experiment ID: 20000626 Result: Up-regulated in Transcription
  misc_feature: MA Experiment 20000626 PARAMETER Experiment Name: Zm_Herbicide-Treatments_P Parameter: Timepoint (hr) Value: 12
  misc_feature: MA Experiment 20000626 PARAMETER Experiment Name: Zm_Herbicide-Treatments_P Parameter: Tissue Value: Aerial
  misc_feature: MA Experiment 20000626 PARAMETER Experiment Name: Zm_Herbicide-Treatments_P Parameter: Treatment Value: Roundup vs. No Treatment
  misc_feature: MA Experiment ID: 20000629 Result: Up-regulated in Transcription
  misc_feature: MA Experiment 20000629 PARAMETER Experiment Name: Zm_Herbicide-Treatments_P Parameter: Timepoint (hr) Value: 12
  misc_feature: MA Experiment 20000629 PARAMETER Experiment Name: Zm_Herbicide-Treatments_P Parameter: Tissue Value: Aerial
  misc_feature: MA Experiment 20000629 PARAMETER Experiment Name: Zm_Herbicide-Treatments_P Parameter: Treatment Value: Trimec vs. No Treatment
  misc_feature: MA Experiment ID: 20001612 Result: Down-regulated in Transcription
  misc_feature: MA Experiment 20001612 PARAMETER Experiment Name: Zm_50ppm_KNO3_L-to-H_P Parameter: Age (day) Value: 19
  misc_feature: MA Experiment 20001612 PARAMETER Experiment Name: Zm_50ppm_KNO3_L-to-H_P Parameter: Organism Value: Zea mays
  misc_feature: MA Experiment 20001612 PARAMETER Experiment Name: Zm_50ppm_KNO3_L-to-H_P Parameter: Plant Line Value: 35A19
  misc_feature: MA Experiment 20001612 PARAMETER Experiment Name: Zm_50ppm_KNO3_L-to-H_P Parameter: Timepoint (hr) Value: 8
  misc_feature: MA Experiment 20001612 PARAMETER Experiment Name: Zm_50ppm_KNO3_L-to-H_P Parameter: Tissue Value: Roots
  misc_feature: MA Experiment 20001612 PARAMETER Experiment Name: Zm_50ppm_KNO3_L-to-H_P Parameter: Treatment Value: 50ppm KNO3 vs. 50ppm KCl
aacccaaacaccacaatccccttcaacaaacgcaccgcactccacggcagccagaaaacacaatccacagagtctccgtgaggtctgagcgaggtaggactagctctgagcgagttcttccgtcttccaggtataatcctagcaactctcactatcctcttcgcatcgctcgtctctttttgagaccagttggatttctcttatttttccttggatcctactacctaatagaacagagctccggagccttttagtttctggtctctgatctactcattttcttttcttccccttttggtgacataggtaggtctagttaagatctgtcgtgcctgttctttgattttagctaagaaccaggcgatttagtcttcttcttccttacaaaaaaaatccccagaaaaaaaaagttgtgagtagtatattcttgtaccatttgatggccgctgctataaatctccccgggcccagcgaggatctgatgcgagcgatggagtccttcatgcaagacgacgccccatcccctctggccatgccgccggcgccgtctttcccagcggccgcagcccacggggcccagtacccggcgacccacctgagcccggcgcagatgcagttcatccaggcccagctccacctgcagcggaacccggggctgggcccgcgggcgcagcccatgaagcccgccgtcccagtgccgccggcgccggcgccgcagcggcctgtgaagctgtaccgcggcgtgcggcagcgtcactggggcaagtgggtggccgagatccggctcccccggaaccgcacccgcctgtggctcgggaccttcgacaccgccgagcaggcggcgctggcctacgaccaggcggcgtaccgcctccgcggggacgcggcgcggctcaacttccccgacaacgcggagtccagggcgccgctcgaccccgccgtggacgccaagctgcaggccatctgcgccaccatcgccgccgcgtcgtcgtcatccaagaattccaaggccaagagcaaggcgatgccaatcaacgcgtccgttctggaagcggcagcggcgtctccgagcaacagctcctccgacgaaggttccggctccgggttcgggtcggacgacgagatgtcctcgtcctccccgacgccggtggtggcgccgccggtggcggacatgggacagctggatttcagcgaggttccgtgggacgaggacgagagcttcgtgctccgcaagtacccgtcctacgagatcgactgggacgcgctgctctccaactagtcgcccttcgccgacagatgtgctgttgtagttcagtagtggcagtatctctggccgccgcagatgaggttttaggcaatctgcaggccgccggcccatgtgtattaagtaggttttgctcagttgttggccctggacttcgccggcgtttttgtgaccggcgtccccgagtgcactgcattggtgtactggtctgtctgtaaaaaaaatggatctg

SEQ ID NO: 2927 - protein, 279 aa, Zea mays subsp. mays
  peptide (1)..(279): Ceres Seq. ID no. 12374345
  misc_feature (96)..(160): Pfam Name: AP2 domain Pfam Description: AP2 domain
  misc_feature (97)..(278): Homolog of NCBI NO: 12324244 NR Description: putative AP2 domain transcriptional regulator, 5'
  misc_feature (53)..(276): Homolog of NCBI NO: 27436378 NR Description: dehydration-responsive element binding protein 3
  misc_feature (37)..(278): Homolog of NCBI NO: 18400001 NR Description: AP2 domain transcription factor RAP2, putative
  misc_feature (92)..(278): Homolog of NCBI NO: 15218204 NR Description: AP2 domain protein RAP2.4
  misc_feature (92)..(278): Homolog of NCBI NO: 13877779 NR Description: putative AP2 domain-containing protein
  misc_feature (92)..(278): Homolog of NCBI NO: 6573771 NR Description: F28K19.29 [Arabidopsis thaliana]
  misc_feature (92)..(278): Homolog of NCBI NO: 2281633 NR Description: AP2 domain containing protein RAP2.4 [Arabidopsis
  misc_feature (81)..(277): Homolog of NCBI NO: 15219839 NR Description: AP2 domain transcription factor RAP2, putative
  misc_feature (1)..(279): Homolog of NCBI NO: 37572971 NR Description: AP2-domain DRE binding factor DBF1
  misc_feature (58)..(279): Homolog of NCBI NO: 21908036 NR Description: DRE binding factor 1 [Zea mays]
MAAAINLPGPSEDLMRAMESFMQDDAPSPLAMPPAPSFPAAAAHGAQYPATHLSPAQMQFIQAQLHLQRNPGLGPRAQPMKPAVPVPPAPAPQRPVKLYRGVRQRHWGKWVAEIRLPRNRTRLWLGTFDTAEQAALAYDQAAYRLRGDAARLNFPDNAESRAPLDPAVDAKLQAICATIAAASSSSKNSKAKSKAMPINASVLEAAAASPSNSSSDEGSGSGFGSDDEMSSSSPTPVVAPPVADMGQLDFSEVPWDEDESFVLRKYPSYEIDWDALLSN

SEQ ID NO: 2928 - protein, 265 aa, Zea mays subsp. mays
  peptide (1)..(265): Ceres Seq. ID no. 12374346
  misc_feature (82)..(146): Pfam Name: AP2 domain Pfam Description: AP2 domain
  misc_feature (83)..(264): Homolog of NCBI NO: 12324244 NR Description: putative AP2 domain transcriptional regulator, 5'
  misc_feature (39)..(262): Homolog of NCBI NO: 27436378 NR Description: dehydration-responsive element binding protein 3
  misc_feature (23)..(264): Homolog of NCBI NO: 18400001 NR Description: AP2 domain transcription factor RAP2, putative
  misc_feature (78)..(264): Homolog of NCBI NO: 15218204 NR Description: AP2 domain protein RAP2.4
  misc_feature (78)..(264): Homolog of NCBI NO: 13877779 NR Description: putative AP2 domain-containing protein
  misc_feature (78)..(264): Homolog of NCBI NO: 6573771 NR Description: F28K19.29 [Arabidopsis thaliana]
  misc_feature (78)..(264): Homolog of NCBI NO: 2281633 NR Description: AP2 domain containing protein RAP2.4 [Arabidopsis
  misc_feature (67)..(263): Homolog of NCBI NO: 15219839 NR Description: AP2 domain transcription factor RAP2, putative
  misc_feature (1)..(265): Homolog of NCBI NO: 37572971 NR Description: AP2-domain DRE binding factor DBF1
  misc_feature (44)..(265): Homolog of NCBI NO: 21908036 NR Description: DRE binding factor 1 [Zea mays]
MRAMESFMQDDAPSPLAMPPAPSFPAAAAHGAQYPATHLSPAQMQFIQAQLHLQRNPGLGPRAQPMKPAVPVPPAPAPQRPVKLYRGVRQRHWGKWVAEIRLPRNRTRLWLGTFDTAEQAALAYDQAAYRLRGDAARLNFPDNAESRAPLDPAVDAKLQAICATIAAASSSSKNSKAKSKAMPINASVLEAAAASPSNSSSDEGSGSGFGSDDEMSSSSPTPVVAPPVADMGQLDFSEVPWDEDESFVLRKYPSYEIDWDALLSN

SEQ ID NO: 2929 - protein, 262 aa, Zea mays subsp. mays
  peptide (1)..(262): Ceres Seq. ID no. 12374347
  misc_feature (79)..(143): Pfam Name: AP2 domain Pfam Description: AP2 domain
  misc_feature (80)..(261): Homolog of NCBI NO: 12324244 NR Description: putative AP2 domain transcriptional regulator, 5'
  misc_feature (36)..(259): Homolog of NCBI NO: 27436378 NR Description: dehydration-responsive element binding protein 3
  misc_feature (20)..(261): Homolog of NCBI NO: 18400001 NR Description: AP2 domain transcription factor RAP2, putative
  misc_feature (75)..(261): Homolog of NCBI NO: 15218204 NR Description: AP2 domain protein RAP2.4
  misc_feature (75)..(261): Homolog of NCBI NO: 13877779 NR Description: putative AP2 domain-containing protein
  misc_feature (75)..(261): Homolog of NCBI NO: 6573771 NR Description: F28K19.29 [Arabidopsis thaliana]
  misc_feature (75)..(261): Homolog of NCBI NO: 2281633 NR Description: AP2 domain containing protein RAP2.4 [Arabidopsis
  misc_feature (64)..(260): Homolog of NCBI NO: 15219839 NR Description: AP2 domain transcription factor RAP2, putative
  misc_feature (1)..(262): Homolog of NCBI NO: 37572971 NR Description: AP2-domain DRE binding factor DBF1
  misc_feature (41)..(262): Homolog of NCBI NO: 21908036 NR Description: DRE binding factor 1 [Zea mays]
MESFMQDDAPSPLAMPPAPSFPAAAAHGAQYPATHLSPAQMQFIQAQLHLQRNPGLGPRAQPMKPAVPVPPAPAPQRPVKLYRGVRQRHWGKWVAEIRLPRNRTRLWLGTFDTAEQAALAYDQAAYRLRGDAARLNFPDNAESRAPLDPAVDAKLQAICATIAAASSSSKNSKAKSKAMPINASVLEAAAASPSNSSSDEGSGSGFGSDDEMSSSSPTPVVAPPVADMGQLDFSEVPWDEDESFVLRKYPSYEIDWDALLSN

SEQ ID NO: 2930 - DNA, 1642 bp, Zea mays subsp. mays
  misc_feature (1)..(1642): Ceres Seq. ID no. 12423800
  misc_feature: MA Experiment ID: 108559 Result: Down-regulated in Transcription
  misc_feature: MA Experiment 108559 PARAMETER Experiment Name: Zm_5mM_NO_P Parameter: Age (day) Value: 8
  misc_feature: MA Experiment 108559 PARAMETER Experiment Name: Zm_5mM_NO_P Parameter: Organism Value: Zea mays
  misc_feature: MA Experiment 108559 PARAMETER Experiment Name: Zm_5mM_NO_P Parameter: Plant Line Value: 35A19
  misc_feature: MA Experiment 108559 PARAMETER Experiment Name: Zm_5mM_NO_P Parameter: Timepoint (hr) Value: 12
  misc_feature: MA Experiment 108559 PARAMETER Experiment Name: Zm_5mM_NO_P Parameter: Tissue Value: Aerial
  misc_feature: MA Experiment 108559 PARAMETER Experiment Name: Zm_5mM_NO_P Parameter: Treatment Value: 5mM NO vs. No Treatment
  misc_feature: MA Experiment ID: 20000477 Result: Down-regulated in Transcription
  misc_feature: MA Experiment 20000477 PARAMETER Experiment Name: Zm_5mM_SA_P Parameter: Age (day) Value: 10
  misc_feature: MA Experiment 20000477 PARAMETER Experiment Name: Zm_5mM_SA_P Parameter: Organism Value: Zea mays
  misc_feature: MA Experiment 20000477 PARAMETER Experiment Name: Zm_5mM_SA_P Parameter: Plant Line Value: 35A19
  misc_feature: MA Experiment 20000477 PARAMETER Experiment Name: Zm_5mM_SA_P Parameter: Timepoint (hr) Value: 48
  misc_feature: MA Experiment 20000477 PARAMETER Experiment Name: Zm_5mM_SA_P Parameter: Tissue Value: Aerial
  misc_feature: MA Experiment 20000477 PARAMETER Experiment Name: Zm_5mM_SA_P Parameter: Treatment Value: 5mM SA vs. No Treatment
atttctgggctggccggaaagcgagcgctcgagagcgaggggaaatcaggtggaggaagcttaaaattagaagtccagcgcaataattgagcaggcggcggcaggcccctcctaatcactgccctaaacacatgtgtgccgggccgaggtcacaatcgatgcacggaggaggatgccgccgtagctgcggagattgataatataaagcgggcggagacncggncccctctggcctcgctgctcctccccccttcctccccccacatgcgctgcccccgcccggccctgccctgccctgccctgctgcgcccaagcagctgaatctccgcacagacaattagagtagctgcattggcggggaaagcgcaagaagctcagcagaaatggcggagcaggcaggcgccggaaggtactggtgccacatgtgcgccgcggtcgtgagccccgcggagggcgaggcggaggtgaagtgcccgcattgccacagcggcttccttgaggagatggagaccgtccgcggcacgcccgcggccgatgacggcgacggtgacggcgcggtggctcaagtgtaccccggcgccgaccgcccgagctccatctgggcgcacgctatcctcagcacggtcgacagctccgtccgccgccgccgcaaccggcggcagacggaggccgccggcgacgtctacgacgggaacgaccccgagttcgccctgcgccggcgtcgcgtcaccgcgttcctgcggctcctgcacgagctccgggaccgccagctgcagcggctggaggctgctgccggggtcgccctcgaaggcgaccagctgacccctttcggccggagcctcttcatcggcgcagctggcggcggcgagcatggcgtggcgctgggcgactacttcctcggccccagcctcgacgcactggtgcagcagctcgccgagaacgacgcgggacggcacgggacgccgccggccaagaaggaggccgtggaggcaatgccgaccgtggaaatcgccggtggcaatggcaacgatgacgacacggccagctgccccgtctgcctggaggactacgcggccggcgagcgcgctcgggagatgccctgcaggcacaggttccactccaattgcatcgttccgtggctcgagatgcacagctcctgccctgtctgccggttgcagctgccggccaccgacgacaagggctcatgcagcagcggcgacggtggttttgtcagtgtcgatgcggatggtgaaggcaatgacaacggcggcggtgatggtagggcaagtattccaggcaatgcggagccagccgaagccgaagagaacggcagccggttgccgccatccttgcagtggctcaacagcctgttctcgccatcggcgcagtcctccggtagcggcagcggcagttcgcatcattgggagaattgagcaataatgcaatataaggatggatgattgttgctgcttgagcccattggtgccaatgtacataggaagagcaggagcatgccggcatgaaaatttggagcctttttttcagtgtgtcaatttggctcatgtaacgttctctctgatatagttgtcatggctataaaaagaacaaaaattggcaagtatatgaacttgcctcttgcgtg

SEQ ID NO: 2931 - protein, 349 aa, Zea mays subsp. mays
  peptide (1)..(349): Ceres Seq. ID no. 12423801
  misc_feature (222)..(262): Pfam Name: Zinc finger, C3HC4 type (RING finger) Pfam Description: Zinc finger, C3HC4 type (RING finger)
  misc_feature (166)..(317): Homolog of NCBI NO: 38454178 NR Description: At3g13430 [Arabidopsis thaliana]
  misc_feature (166)..(317): Homolog of NCBI NO: 15231238 NR Description: unknown protein; protein id: At3g13430.1
  misc_feature (9)..(344): Homolog of NCBI NO: 37535546 NR Description: putative zinc finger protein
  misc_feature (3)..(344): Homolog of NCBI NO: 18405411 NR Description: expressed protein
  misc_feature (168)..(320): Homolog of NCBI NO: 15231003 NR Description: unknown protein
  misc_feature (168)..(320): Homolog of NCBI NO: 11994207 NR Description: gene_id:MPN9.20~unknown protein [Arabidopsis
  misc_feature (81)..(271): Homolog of NCBI NO: 7486783 NR Description: hypothetical protein M3E9.170 - Arabidopsis
  misc_feature (3)..(104): Homolog of NCBI NO: 15241188 NR Description: putative protein
  misc_feature (89)..(343): Homolog of NCBI NO: 15241188 NR Description: putative protein
  misc_feature (1)..(346): Homolog of NCBI NO: 34903272 NR Description: unnamed protein product [Oryza sativa (japonica
MAEQAGAGRYWCHMCAAVVSPAEGEAEVKCPHCHSGFLEEMETVRGTPAADDGDGDGAVAQVYPGADRPSSIWAHAILSTVDSSVRRRRNRRQTEAAGDVYDGNDPEFALRRRRVTAFLRLLHELRDRQLQRLEAAAGVALEGDQLTPFGRSLFIGAAGGGEHGVALGDYFLGPSLDALVQQLAENDAGRHGTPPAKKEAVEAMPTVEIAGGNGNDDDTASCPVCLEDYAAGERAREMPCRHRFHSNCIVPWLEMHSSCPVCRLQLPATDDKGSCSSGDGGFVSVDADGEGNDNGGGDGRASIPGNAEPAEAEENGSRLPPSLQWLNSLFSPSAQSSGSGSGSSHHWEN

SEQ ID NO: 2932 - protein, 336 aa, Zea mays subsp. mays
  peptide (1)..(336): Ceres Seq. ID no. 12423802
  misc_feature (209)..(249): Pfam Name: Zinc finger, C3HC4 type (RING finger) Pfam Description: Zinc finger, C3HC4 type (RING finger)
  misc_feature (68)..(258): Homolog of NCBI NO: 7486783 NR Description: hypothetical protein M3E9.170 - Arabidopsis
  misc_feature (155)..(307): Homolog of NCBI NO: 15231003 NR Description: unknown protein
  misc_feature (155)..(307): Homolog of NCBI NO: 11994207 NR Description: gene_id:MPN9.20~unknown protein [Arabidopsis
  misc_feature (153)..(304): Homolog of NCBI NO: 38454178 NR Description: At3g13430 [Arabidopsis thaliana]
  misc_feature (153)..(304): Homolog of NCBI NO: 15231238 NR Description: unknown protein; protein id: At3g13430.1
  misc_feature (1)..(331): Homolog of NCBI NO: 37535546 NR Description: putative zinc finger protein
  misc_feature (1)..(331): Homolog of NCBI NO: 18405411 NR Description: expressed protein
  misc_feature (1)..(91): Homolog of NCBI NO: 15241188 NR Description: putative protein
  misc_feature (76)..(330): Homolog of NCBI NO: 15241188 NR Description: putative protein
  misc_feature (1)..(333): Homolog of NCBI NO: 34903272 NR Description: unnamed protein product [Oryza sativa (japonica
MCAAVVSPAEGEAEVKCPHCHSGFLEEMETVRGTPAADDGDGDGAVAQVYPGADRPSSIWAHAILSTVDSSVRRRRNRRQTEAAGDVYDGNDPEFALRRRRVTAFLRLLHELRDRQLQRLEAAAGVALEGDQLTPFGRSLFIGAAGGGEHGVALGDYFLGPSLDALVQQLAENDAGRHGTPPAKKEAVEAMPTVEIAGGNGNDDDTASCPVCLEDYAAGERAREMPCRHRFHSNCIVPWLEMHSSCPVCRLQLPATDDKGSCSSGDGGFVSVDADGEGNDNGGGDGRASIPGNAEPAEAEENGSRLPPSLQWLNSLFSPSAQSSGSGSGSSHHWEN

SEQ ID NO: 2933 - protein, 309 aa, Zea mays subsp. mays
  peptide (1)..(309): Ceres Seq. ID no. 12423803
  misc_feature (182)..(222): Pfam Name: Zinc finger, C3HC4 type (RING finger) Pfam Description: Zinc finger, C3HC4 type (RING finger)
  misc_feature (41)..(231): Homolog of NCBI NO: 7486783 NR Description: hypothetical protein M3E9.170 - Arabidopsis
  misc_feature (128)..(280): Homolog of NCBI NO: 15231003 NR Description: unknown protein
  misc_feature (128)..(280): Homolog of NCBI NO: 11994207 NR Description: gene_id:MPN9.20~unknown protein [Arabidopsis
  misc_feature (126)..(277): Homolog of NCBI NO: 38454178 NR Description: At3g13430 [Arabidopsis thaliana]
  misc_feature (126)..(277): Homolog of NCBI NO: 15231238 NR Description: unknown protein; protein id: At3g13430.1
  misc_feature (1)..(304): Homolog of NCBI NO: 37535546 NR Description: putative zinc finger protein
  misc_feature (1)..(304): Homolog of NCBI NO: 18405411 NR Description: expressed protein
  misc_feature (1)..(64): Homolog of NCBI NO: 15241188 NR Description: putative protein
  misc_feature (49)..(303): Homolog of NCBI NO: 15241188 NR Description: putative protein
  misc_feature (1)..(306): Homolog of NCBI NO: 34903272 NR Description: unnamed protein product [Oryza sativa (japonica
METVRGTPAADDGDGDGAVAQVYPGADRPSSIWAHAILSTVDSSVRRRRNRRQTEAAGDVYDGNDPEFALRRRRVTAFLRLLHELRDRQLQRLEAAAGVALEGDQLTPFGRSLFIGAAGGGEHGVALGDYFLGPSLDALVQQLAENDAGRHGTPPAKKEAVEAMPTVEIAGGNGNDDDTASCPVCLEDYAAGERAREMPCRHRFHSNCIVPWLEMHSSCPVCRLQLPATDDKGSCSSGDGGFVSVDADGEGNDNGGGDGRASIPGNAEPAEAEENGSRLPPSLQWLNSLFSPSAQSSGSGSGSSHHWEN

SEQ ID NO: 2934 - DNA, 1507 bp, Zea mays subsp. mays
  misc_feature (1)..(1507): Ceres Seq. ID no. 12410492
  misc_feature: MA Experiment ID: 108522 Result: Down-regulated in Transcription
  misc_feature: MA Experiment 108522 PARAMETER Experiment Name: Zm_42deg_Heat_P Parameter: Age (day) Value: 8
  misc_feature: MA Experiment 108522 PARAMETER Experiment Name: Zm_42deg_Heat_P Parameter: Organism Value: Zea mays
  misc_feature: MA Experiment 108522 PARAMETER Experiment Name: Zm_42deg_Heat_P Parameter: Plant Line Value: 35A19
  misc_feature: MA Experiment 108522 PARAMETER Experiment Name: Zm_42deg_Heat_P Parameter: Temperature (deg C) Value: 42 vs. 22
  misc_feature: MA Experiment 108522 PARAMETER Experiment Name: Zm_42deg_Heat_P Parameter: Timepoint (hr) Value: 1
  misc_feature: MA Experiment 108522 PARAMETER Experiment Name: Zm_42deg_Heat_P Parameter: Tissue Value: Aerial
  misc_feature: MA Experiment ID: 108523 Result: Down-regulated in Transcription
  misc_feature: MA Experiment 108523 PARAMETER Experiment Name: Zm_42deg_Heat_P Parameter: Age (day) Value: 8
  misc_feature: MA Experiment 108523 PARAMETER Experiment Name: Zm_42deg_Heat_P Parameter: Organism Value: Zea mays
  misc_feature: MA Experiment 108523 PARAMETER Experiment Name: Zm_42deg_Heat_P Parameter: Plant Line Value: 35A19
  misc_feature: MA Experiment 108523 PARAMETER Experiment Name: Zm_42deg_Heat_P Parameter: Temperature (deg C) Value: 42 vs. 22
  misc_feature: MA Experiment 108523 PARAMETER Experiment Name: Zm_42deg_Heat_P Parameter: Timepoint (hr) Value: 6
  misc_feature: MA Experiment 108523 PARAMETER Experiment Name: Zm_42deg_Heat_P Parameter: Tissue Value: Aerial
  misc_feature: MA Experiment ID: 20000534 Result: Down-regulated in Transcription
  misc_feature: MA Experiment 20000534 PARAMETER Experiment Name: Zm_Hybrid_Pollen_P Parameter: Age (day) Value: 8
  misc_feature: MA Experiment 20000534 PARAMETER Experiment Name: Zm_Hybrid_Pollen_P Parameter: Organism Value: Zea mays
  misc_feature: MA Experiment 20000534 PARAMETER Experiment Name: Zm_Hybrid_Pollen_P Parameter: Plant Line Value: 35A19
  misc_feature: MA Experiment 20000534 PARAMETER Experiment Name: Zm_Hybrid_Pollen_P Parameter: Tissue Value: Pollen vs. Aerial
cttctagggtttctctctgtttcgtcctcatcgaatcggagtttcgcatggagtcatcgcggtctcggaagcggacgcgccaggcgcatgactgtgccgccgcgccgccaccagagcgagaagtggtagcgaggggtggcgcgtcgccaccatggagggaggatgaccgtgatggacacttcgtattcgaccttggcgagaacttgacccgccgatataaaatcttgagcaaaatgggagaaggtacatttgggcgtgttttggaatgctgggaccgtgaaacacatgaatatgttgccataaaagttgttcgcagtatccgcaagtaccgtgatgctgcaatgattgagatagatgtgctcaatcgccttgcagaaaatgaaaagtacagatctctttgtgttcaaattcagagatggtttgactatcgtaatcatatatgcattgtttttgagaagcttgggccaagcttgtatgattttctaaagagaaatagataccaacctttccctgtggaacttgtgcgggagtttggacggcaactgttggaatctgtagcatatatgcatgagttgcggcttatccacactgatctgaagccagaaaacatactacttgtctcttctgagtatataaaagttccaagtacaaagaagaattcgcaaggtgagatgcatttcaagtgcttgccgaagtccagtgccataaagctgatagattttggcagtaccgcctttgataatcgggaccataactcgattgtttctacgaggcattatagggcacctgaaataatattaggtttaggctggagttttccatgtgatatttggagtgttggctgtattcttgttgagctatgctctggggaagcattgtttcagacacacgagaatctggaacacctagcaatgatggagagggttttgggacctctaccagaggatatgatacggaaagcaagctcttcagctcagaaatattttaggagagcaacacgattaaattggcctgaaggtgctgtttcaagagaaagcatcagagctgtgaggaaactggatcgactaaaggacttggtatcgaggaacgctgaccattcaaaggtggcactggtggacttgctatacggtctcctacggttcgagccatcggaacgcctgacagcagaagaagctctggaccatccattcttcaggaacccaacatgacttgttgagcaggcttgactcatgtgtaactctactgaaggtggtggtgggaagcaggcagagctgtccattgcaaagctgaaagcattttgctcctctataccagagagtttgtgtaaggcctgtcaatggggcttcttgtggtgataaaactgatggctttagtcacccaatgtcatgtacactagcatttttcctagggagcttagttcgccagatggcgcttgtatgttgttaaccgggatacactatgagctgtgccccgatgccctggtgccataatccaatcgcaaatgttg

SEQ ID NO: 2935 - protein, 401 aa, Zea mays subsp. mays
  peptide (1)..(401): Ceres Seq. ID no. 12410493
  misc_feature (72)..(397): Pfam Name: Protein kinase domain Pfam Description: Protein kinase domain
  misc_feature (42)..(397): Homolog of NCBI NO: 7211773 NR Description: protein kinase MK5 [Mesembryanthemum crystallinum]
  misc_feature (42)..(397): Homolog of NCBI NO: 7489189 NR Description: protein kinase PK12 (EC 2.7.1.-),
  misc_feature (42)..(397): Homolog of NCBI NO: 15233948 NR Description: protein kinase (AFC2)
  misc_feature (48)..(397): Homolog of NCBI NO: 601787 NR Description: protein kinase
  misc_feature (48)..(397): Homolog of NCBI NO: 30693861 NR Description: protein kinase (AME2/AFC1) [Arabidopsis thaliana]
  misc_feature (48)..(397): Homolog of NCBI NO: 15231839 NR Description: protein kinase (AME2/AFC1)
  misc_feature (35)..(397): Homolog of NCBI NO: 34908100 NR Description: putative protein kinase AFC1
  misc_feature (16)..(399): Homolog of NCBI NO: 601791 NR Description: protein kinase
  misc_feature (9)..(399): Homolog of NCBI NO: 15233872 NR Description: protein kinase AME3
  misc_feature (10)..(401): Homolog of NCBI NO: 34912246 NR Description: putative protein kinase AFC3
SRVSLCFVLIESEFRMESSRSRKRTRQAHDCAAAPPPEREVVARGGASPPWREDDRDGHFVFDLGENLTRRYKILSKMGEGTFGRVLECWDRETHEYVAIKVVRSIRKYRDAAMIEIDVLNRLAENEKYRSLCVQIQRWFDYRNHICIVFEKLGPSLYDFLKRNRYQPFPVELVREFGRQLLESVAYMHELRLIHTDLKPENILLVSSEYIKVPSTKKNSQGEMHFKCLPKSSAIKLIDFGSTAFDNRDHNSIVSTRHYRAPEIILGLGWSFPCDIWSVGCILVELCSGEALFQTHENLEHLAMMERVLGPLPEDMIRKASSSAQKYFRRATRLNWPEGAVSRESIRAVRKLDRLKDLVSRNADHSKVALVDLLYGLLRFEPSERLTAEEALDHPFFRNPT

SEQ ID NO: 2936 - protein, 386 aa, Zea mays subsp. mays
  peptide (1)..(386): Ceres Seq. ID no. 12410494
  misc_feature (57)..(382): Pfam Name: Protein kinase domain Pfam Description: Protein kinase domain
  misc_feature (27)..(382): Homolog of NCBI NO: 7211773 NR Description: protein kinase MK5 [Mesembryanthemum crystallinum]
  misc_feature (27)..(382): Homolog of NCBI NO: 7489189 NR Description: protein kinase PK12 (EC 2.7.1.-),
  misc_feature (27)..(382): Homolog of NCBI NO: 15233948 NR Description: protein kinase (AFC2)
  misc_feature (33)..(382): Homolog of NCBI NO: 601787 NR Description: protein kinase
  misc_feature (33)..(382): Homolog of NCBI NO: 30693861 NR Description: protein kinase (AME2/AFC1) [Arabidopsis thaliana]
  misc_feature (33)..(382): Homolog of NCBI NO: 15231839 NR Description: protein kinase (AME2/AFC1)
  misc_feature (20)..(382): Homolog of NCBI NO: 34908100 NR Description: putative protein kinase AFC1
  misc_feature (1)..(384): Homolog of NCBI NO: 601791 NR Description: protein kinase
  misc_feature (1)..(384): Homolog of NCBI NO: 15233872 NR Description: protein kinase AME3
  misc_feature (1)..(386): Homolog of NCBI NO: 34912246 NR Description: putative protein kinase AFC3
MESSRSRKRTRQAHDCAAAPPPEREVVARGGASPPWREDDRDGHFVFDLGENLTRRYKILSKMGEGTFGRVLECWDRETHEYVAIKVVRSIRKYRDAAMIEIDVLNRLAENEKYRSLCVQIQRWFDYRNHICIVFEKLGPSLYDFLKRNRYQPFPVELVREFGRQLLESVAYMHELRLIHTDLKPENILLVSSEYIKVPSTKKNSQGEMHFKCLPKSSAIKLIDFGSTAFDNRDHNSIVSTRHYRAPEIILGLGWSFPCDIWSVGCILVELCSGEALFQTHENLEHLAMMERVLGPLPEDMIRKASSSAQKYFRRATRLNWPEGAVSRESIRAVRKLDRLKDLVSRNADHSKVALVDLLYGLLRFEPSERLTAEEALDHPFFRNPT

SEQ ID NO: 2937 - protein, 324 aa, Zea mays subsp. mays
  peptide (1)..(324): Ceres Seq. ID no. 12410495
  misc_feature (1)..(320): Pfam Name: Protein kinase domain Pfam Description: Protein kinase domain
  misc_feature (1)..(320): Homolog of NCBI NO: 7211773 NR Description: protein kinase MK5 [Mesembryanthemum crystallinum]
  misc_feature (1)..(320): Homolog of NCBI NO: 7489189 NR Description: protein kinase PK12 (EC 2.7.1.-),
  misc_feature (1)..(320): Homolog of NCBI NO: 15233948 NR Description: protein kinase (AFC2)
  misc_feature (1)..(320): Homolog of NCBI NO: 601787 NR Description: protein kinase
  misc_feature (1)..(320): Homolog of NCBI NO: 30693861 NR Description: protein kinase (AME2/AFC1) [Arabidopsis thaliana]
  misc_feature (1)..(320): Homolog of NCBI NO: 15231839 NR Description: protein kinase (AME2/AFC1)
  misc_feature (1)..(320): Homolog of NCBI NO: 34908100 NR Description: putative protein kinase AFC1
  misc_feature (1)..(322): Homolog of NCBI NO: 601791 NR Description: protein kinase
  misc_feature (1)..(322): Homolog of NCBI NO: 15233872 NR Description: protein kinase AME3
  misc_feature (1)..(324): Homolog of NCBI NO: 34912246 NR Description: putative protein kinase AFC3
MGEGTFGRVLECWDRETHEYVAIKVVRSIRKYRDAAMIEIDVLNRLAENEKYRSLCVQIQRWFDYRNHICIVFEKLGPSLYDFLKRNRYQPFPVELVREFGRQLLESVAYMHELRLIHTDLKPENILLVSSEYIKVPSTKKNSQGEMHFKCLPKSSAIKLIDFGSTAFDNRDHNSIVSTRHYRAPEIILGLGWSFPCDIWSVGCILVELCSGEALFQTHENLEHLAMMERVLGPLPEDMIRKASSSAQKYFRRATRLNWPEGAVSRESIRAVRKLDRLKDLVSRNADHSKVALVDLLYGLLRFEPSERLTAEEALDHPFFRNPT

SEQ ID NO: 2938 - DNA, 1536 bp, Zea mays subsp. mays
  misc_feature (1)..(1536): Ceres Seq. ID no. 12361389
  misc_feature: MA Experiment ID: 108527 Result: Down-regulated in Transcription
  misc_feature: MA Experiment 108527 PARAMETER Experiment Name: Zm_5mM_NO_P Parameter: Age (day) Value: 8
  misc_feature: MA Experiment 108527 PARAMETER Experiment Name: Zm_5mM_NO_P Parameter: Organism Value: Zea mays
  misc_feature: MA Experiment 108527 PARAMETER Experiment Name: Zm_5mM_NO_P Parameter: Plant Line Value: 35A19
  misc_feature: MA Experiment 108527 PARAMETER Experiment Name: Zm_5mM_NO_P Parameter: Timepoint (hr) Value: 6
  misc_feature: MA Experiment 108527 PARAMETER Experiment Name: Zm_5mM_NO_P Parameter: Tissue Value: Aerial
  misc_feature: MA Experiment 108527 PARAMETER Experiment Name: Zm_5mM_NO_P Parameter: Treatment Value: 5mM NO vs. No Treatment
  misc_feature: MA Experiment ID: 108528 Result: Up-regulated in Transcription
  misc_feature: MA Experiment 108528 PARAMETER Experiment Name: Zm_Imbibed_Seeds_P Parameter: Age (day) Value: 5 vs. 2
  misc_feature: MA Experiment 108528 PARAMETER Experiment Name: Zm_Imbibed_Seeds_P Parameter: Organism Value: Zea mays
  misc_feature: MA Experiment 108528 PARAMETER Experiment Name: Zm_Imbibed_Seeds_P Parameter: Plant Line Value: 35A19
  misc_feature: MA Experiment 108528 PARAMETER Experiment Name: Zm_Imbibed_Seeds_P Parameter: Tissue Value: Aerial vs. Embryo
  misc_feature: MA Experiment ID: 108529 Result: Up-regulated in Transcription
  misc_feature: MA Experiment 108529 PARAMETER Experiment Name: Zm_Imbibed_Seeds_P Parameter: Age (day) Value: 5 vs. 2
  misc_feature: MA Experiment 108529 PARAMETER Experiment Name: Zm_Imbibed_Seeds_P Parameter: Organism Value: Zea mays
  misc_feature: MA Experiment 108529 PARAMETER Experiment Name: Zm_Imbibed_Seeds_P Parameter: Plant Line Value: 35A19
  misc_feature: MA Experiment 108529 PARAMETER Experiment Name: Zm_Imbibed_Seeds_P Parameter: Tissue Value: Roots vs. Embryo
  misc_feature: MA Experiment ID: 108530 Result: Up-regulated in Transcription
  misc_feature: MA Experiment 108530 PARAMETER Experiment Name: Zm_Imbibed_Seeds_P Parameter: Age (day) Value: 6 vs. 2
  misc_feature: MA Experiment 108530 PARAMETER Experiment Name: Zm_Imbibed_Seeds_P Parameter: Organism Value: Zea mays
  misc_feature: MA Experiment 108530 PARAMETER Experiment Name: Zm_Imbibed_Seeds_P Parameter: Plant Line Value: 35A19
  misc_feature: MA Experiment 108530 PARAMETER Experiment Name: Zm_Imbibed_Seeds_P Parameter: Tissue Value: Aerial vs. Embryo
  misc_feature: MA Experiment ID: 108535 Result: Down-regulated in Transcription
  misc_feature: MA Experiment 108535 PARAMETER Experiment Name: Zm_Meristem_P Parameter: Age (day) Value: 8
  misc_feature: MA Experiment 108535 PARAMETER Experiment Name: Zm_Meristem_P Parameter: Organism Value: Zea mays
  misc_feature: MA Experiment 108535 PARAMETER Experiment Name: Zm_Meristem_P Parameter: Plant Line Value: 35A19
  misc_feature: MA Experiment 108535 PARAMETER Experiment Name: Zm_Meristem_P Parameter: Tissue Value: Root Meristem vs. Above Root Meristem
  misc_feature: MA Experiment ID: 108546 Result: Up-regulated in Transcription
  misc_feature: MA Experiment 108546 PARAMETER Experiment Name: Zm_Imbibed_Seeds_P Parameter: Age (day) Value: 3 vs. 2
  misc_feature: MA Experiment 108546 PARAMETER Experiment Name: Zm_Imbibed_Seeds_P Parameter: Organism Value: Zea mays
  misc_feature: MA Experiment 108546 PARAMETER Experiment Name: Zm_Imbibed_Seeds_P Parameter: Plant Line Value: 35A19
  misc_feature: MA Experiment 108546 PARAMETER Experiment Name: Zm_Imbibed_Seeds_P Parameter: Tissue Value: Roots vs. Embryo
  misc_feature: MA Experiment ID: 108559 Result: Down-regulated in Transcription
  misc_feature: MA Experiment 108559 PARAMETER Experiment Name: Zm_5mM_NO_P Parameter: Age (day) Value: 8
  misc_feature: MA Experiment 108559 PARAMETER Experiment Name: Zm_5mM_NO_P Parameter: Organism Value: Zea mays
  misc_feature: MA Experiment 108559 PARAMETER Experiment Name: Zm_5mM_NO_P Parameter: Plant Line Value: 35A19
  misc_feature: MA Experiment 108559 PARAMETER Experiment Name: Zm_5mM_NO_P Parameter: Timepoint (hr) Value: 12
  misc_feature: MA Experiment 108559 PARAMETER Experiment Name: Zm_5mM_NO_P Parameter: Tissue Value: Aerial
  misc_feature: MA Experiment 108559 PARAMETER Experiment Name: Zm_5mM_NO_P Parameter: Treatment Value: 5mM NO vs. No Treatment
  misc_feature: MA Experiment ID: 108688 Result: Down-regulated in Transcription
  misc_feature: MA Experiment 108688 PARAMETER Experiment Name: Zm_Embryos-Flowers__P Parameter: Tissue Value: Immature Flowers vs. Aerial+
  misc_feature: MA Experiment ID: 20000492 Result: Down-regulated in Transcription
  misc_feature: MA Experiment 20000492 PARAMETER Experiment Name: Zm_Hybrid_Seed_Dev_P Parameter: DAP Value: 12
  misc_feature: MA Experiment 20000492 PARAMETER Experiment Name: Zm_Hybrid_Seed_Dev_P Parameter: Organism Value: Zea mays
  misc_feature: MA Experiment 20000492 PARAMETER Experiment Name: Zm_Hybrid_Seed_Dev_P Parameter: Plant Line Value: 35A19
  misc_feature: MA Experiment 20000492 PARAMETER Experiment Name: Zm_Hybrid_Seed_Dev_P Parameter: Tissue Value: Fert Kernel vs. Unfert Floret
  misc_feature: MA Experiment ID: 20000535 Result: Up-regulated in Transcription
  misc_feature: MA Experiment 20000535 PARAMETER Experiment Name: Zm_Hybrid_Seed_Dev_P Parameter: DAP Value: 30 vs. 12
  misc_feature: MA Experiment 20000535 PARAMETER Experiment Name: Zm_Hybrid_Seed_Dev_P Parameter: Organism Value: Zea mays
  misc_feature: MA Experiment 20000535 PARAMETER Experiment Name: Zm_Hybrid_Seed_Dev_P Parameter: Plant Line Value: 35A19
  misc_feature: MA Experiment 20000535 PARAMETER Experiment Name: Zm_Hybrid_Seed_Dev_P Parameter: Tissue Value: Embryo vs. Unfert Floret
  misc_feature: MA Experiment ID: 20000626 Result: Up-regulated in Transcription
  misc_feature: MA Experiment 20000626 PARAMETER Experiment Name: Zm_Herbicide-Treatments_P Parameter: Timepoint (hr) Value: 12
  misc_feature: MA Experiment 20000626 PARAMETER Experiment Name: Zm_Herbicide-Treatments_P Parameter: Tissue Value: Aerial
  misc_feature: MA Experiment 20000626 PARAMETER Experiment Name: Zm_Herbicide-Treatments_P Parameter: Treatment Value: Roundup vs. No Treatment
gcacgagaccattacctagaacatcctaatcgaaaacccctcatcgccttcgtggcctggcctgcccgtcgtgtgcggctctgcgcctctccctccctccctcccttccccgatcgtaaccgccgcctccgatcgatcgccacgatgcggctcttctgacgtaccgccgggcgtcaccgtcaccgaccgagacccgcgcccctcgcctggactccatggccgcgtcctccccgctggtgctgtcgctgctcctcttcgcgtcgctgacggcgctgctggtcctcgcgccgcgcctatccccgccgcagccgccggcggccgccggtggtggtggtggcgaggaggccgacgacctccgcctgttccgccgcgcgactctggagtcgtcggcggcggacggccctcccaaggtggccttcctgttcctgaccaactccgacctcaccttcgcccctctctgggagcgcttcttcgcggggaacgaggcgcggctgcgcgtgtacgtccacgcggacccgtccgcgcgcctgcttcttccacgcgtgcacgcagcagctacatcgaggtgctggagggcgagccgcagatggcgtcgcgctacgcggcgcgcggcggcgaggagggcatgctcccggaggtgccgtacgagcggttccgcatcgggtcgcagttcttcgcgctggcccggcgccacgccgtgctggtggtccgggagcgccggctgtggcgcaagttccgcgcgccctgcgtccccgagatggcgcaggactcgtgctaccccgaggagcactacttcccgacgctgctggacatggcggaccccggcggcgtggcgcggtacacgctcacgcgcgtcaactggacgggtagcgtcgcgggccacccgcacacgtacgccgcgccggaggtctcgccaaggctcatcgcagacctccgcgcctccaaccacacccaccacccccacatgttcgcgcgcaagttcgcgcccgactgcctcggcccgctcctcgccatcgccgacaccgtcatcttcaaggactgatggcgggcggctccatccaggtactacttactactcggcagcagagggctgggcctggggctagtcaaggccgccgacgacggacggcgcggcaccggaatcagtggcgttcttctcccgtttggaccccccctgcagcgtcatgcatgttcatcagctccagtgtttctgtgtagtagattaggagtgtagagaagaggaggacgacgacgacgacagcacgcggcgacctaatgcgaagcggcaggttgtggttgcgtgcgtgtacgcgtcctcgatcgtcgtccatccgtgaaaaaaaaagaagaaaaaatatcgcgcgcgtgtgtggcttttgcctagcgtagccagccaaataaggttctactgcaagtaataaatcctagtgttgtacagcataggtagccgccactcctgctctgtgggtttcgtgtctcgatgtttttgtgctttgcagtgtactacgtacatactaatacgtgcttccaacttcc

SEQ ID NO: 2939 - protein, 296 aa, Zea mays subsp. mays
  peptide (1)..(296): Ceres Seq. ID no. 12361390
  misc_feature (65)..(136): Homolog of NCBI NO: 17065016 NR Description: Unknown protein [Arabidopsis thaliana]
  misc_feature (64)..(99): Homolog of NCBI NO: 38637182 NR Description: unknown protein [Oryza sativa (japonica
  misc_feature (45)..(101): Homolog of NCBI NO: 15218485 NR Description: unknown protein; protein id: At1g10280.1
  misc_feature (46)..(101): Homolog of NCBI NO: 34907318 NR Description: contains ESTs
  misc_feature (40)..(108): Homolog of NCBI NO: 18402952 NR Description: expressed protein
  misc_feature (40)..(108): Homolog of NCBI NO: 21554566 NR Description: unknown [Arabidopsis thaliana]
  misc_feature (26)..(105): Homolog of NCBI NO: 38344090 NR Description: OSJNBb0056F09.13 [Oryza sativa (japonica
  misc_feature (64)..(99): Homolog of NCBI NO: 26452247 NR Description: unknown protein [Arabidopsis thaliana]
  misc_feature (3)..(136): Homolog of NCBI NO: 34394888 NR Description: unknown protein [Oryza sativa (japonica
  misc_feature (7)..(134): Homolog of NCBI NO: 30688302 NR Description: expressed protein [Arabidopsis thaliana]
MAASSPLVLSLLLFASLTALLVLAPRLSPPQPPAAAGGGGGEEADDLRLFRRATLESSAADGPPKVAFLFLTNSDLTFAPLWERFFAGNEARLRVYVHADPSARLLLPRVHAAATSRCWRASRRWRRATRRAAARRACSRRCRTSGSASGRSSSRWPGATPCWWSGSAGCGASSARPASPRWRRTRATPRSTTSRRCWTWRTPAAWRGTRSRASTGRVASRATRTRTPRRRSRQGSSQTSAPPTTPTTPTCSRASSRPTASARSSPSPTPSSSRTDGGRLHPGTTYYSAAEGWAWG

SEQ ID NO: 2940 - protein, 151 aa, Zea mays subsp. mays
  peptide (1)..(151): Ceres Seq. ID no. 12361391
  misc_feature (1)..(148): Homolog of NCBI NO: 34907318 NR Description: contains ESTs
  misc_feature (1)..(148): Homolog of NCBI NO: 18402952 NR Description: expressed protein
  misc_feature (1)..(148): Homolog of NCBI NO: 21554566 NR Description: unknown [Arabidopsis thaliana]
  misc_feature (1)..(148): Homolog of NCBI NO: 38344090 NR Description: OSJNBb0056F09.13 [Oryza sativa (japonica
  misc_feature (1)..(124): Homolog of NCBI NO: 26452247 NR Description: unknown protein [Arabidopsis thaliana]
  misc_feature (1)..(151): Homolog of NCBI NO: 15239393 NR Description: putative protein; protein id: At5g25330.1
  misc_feature (1)..(151): Homolog of NCBI NO: 15236739 NR Description: putative protein; protein id: At4g32290.1
  misc_feature (1)..(151): Homolog of NCBI NO: 15231121 NR Description: putative protein
  misc_feature (1)..(151): Homolog of NCBI NO: 34394888 NR Description: unknown protein [Oryza sativa (japonica
  misc_feature (1)..(151): Homolog of NCBI NO: 30688302 NR Description: expressed protein [Arabidopsis thaliana]
MASRYAARGGEEGMLPEVPYERFRIGSQFFALARRHAVLVVRERRLWRKFRAPCVPEMAQDSCYPEEHYFPTLLDMADPGGVARYTLTRVNWTGSVAGHPHTYAAPEVSPRLIADLRASNHTHHPHMFARKFAPDCLGPLLAIADTVIFKD

SEQ ID NO: 2941 - DNA, 1736 bp, Zea mays subsp. mays
  misc_feature (1)..(1736): Ceres Seq. ID no. 12374455
  misc_feature: MA Experiment ID: 108527 Result: Down-regulated in Transcription
  misc_feature: MA Experiment 108527 PARAMETER Experiment Name: Zm_5mM_NO_P Parameter: Age (day) Value: 8
  misc_feature: MA Experiment 108527 PARAMETER Experiment Name: Zm_5mM_NO_P Parameter: Organism Value: Zea mays
  misc_feature: MA Experiment 108527 PARAMETER Experiment Name: Zm_5mM_NO_P Parameter: Plant Line Value: 35A19
  misc_feature: MA Experiment 108527 PARAMETER Experiment Name: Zm_5mM_NO_P Parameter: Timepoint (hr) Value: 6
  misc_feature: MA Experiment 108527 PARAMETER Experiment Name: Zm_5mM_NO_P Parameter: Tissue Value: Aerial
  misc_feature: MA Experiment 108527 PARAMETER Experiment Name: Zm_5mM_NO_P Parameter: Treatment Value: 5mM NO vs. No Treatment
  misc_feature: MA Experiment ID: 108528 Result: Up-regulated in Transcription
  misc_feature: MA Experiment 108528 PARAMETER Experiment Name: Zm_Imbibed_Seeds_P Parameter: Age (day) Value: 5 vs. 2
  misc_feature: MA Experiment 108528 PARAMETER Experiment Name: Zm_Imbibed_Seeds_P Parameter: Organism Value: Zea mays
  misc_feature: MA Experiment 108528 PARAMETER Experiment Name: Zm_Imbibed_Seeds_P Parameter: Plant Line Value: 35A19
  misc_feature: MA Experiment 108528 PARAMETER Experiment Name: Zm_Imbibed_Seeds_P Parameter: Tissue Value: Aerial vs. Embryo
  misc_feature: MA Experiment ID: 108530 Result: Up-regulated in Transcription
  misc_feature: MA Experiment 108530 PARAMETER Experiment Name: Zm_Imbibed_Seeds_P Parameter: Age (day) Value: 6 vs. 2
  misc_feature: MA Experiment 108530 PARAMETER Experiment Name: Zm_Imbibed_Seeds_P Parameter: Organism Value: Zea mays
  misc_feature: MA Experiment 108530 PARAMETER Experiment Name: Zm_Imbibed_Seeds_P Parameter: Plant Line Value: 35A19
  misc_feature: MA Experiment 108530 PARAMETER Experiment Name: Zm_Imbibed_Seeds_P Parameter: Tissue Value: Aerial vs. Embryo
  misc_feature: MA Experiment ID: 108536 Result: Down-regulated in Transcription
  misc_feature: MA Experiment 108536 PARAMETER Experiment Name: Zm_Meristem_P Parameter: Age (day) Value: 8
  misc_feature: MA Experiment 108536 PARAMETER Experiment Name: Zm_Meristem_P Parameter: Organism Value: Zea mays
  misc_feature: MA Experiment 108536 PARAMETER Experiment Name: Zm_Meristem_P Parameter: Plant Line Value: 35A19
  misc_feature: MA Experiment 108536 PARAMETER Experiment Name: Zm_Meristem_P Parameter: Tissue Value: Shoot Meristem vs. Above Shoot Meristem
  misc_feature: MA Experiment ID: 108545 Result: Up-regulated in Transcription
  misc_feature: MA Experiment 108545 PARAMETER Experiment Name: Zm_Imbibed_Seeds_P Parameter: Age (day) Value: 3 vs. 2
  misc_feature: MA Experiment 108545 PARAMETER Experiment Name: Zm_Imbibed_Seeds_P Parameter: Organism Value: Zea mays
  misc_feature: MA Experiment 108545 PARAMETER Experiment Name: Zm_Imbibed_Seeds_P Parameter: Plant Line Value: 35A19
  misc_feature: MA Experiment 108545 PARAMETER Experiment Name: Zm_Imbibed_Seeds_P Parameter: Tissue Value: Aerial vs. Embryo
  misc_feature: MA Experiment ID: 108546 Result: Up-regulated in Transcription
  misc_feature: MA Experiment 108546 PARAMETER Experiment Name: Zm_Imbibed_Seeds_P Parameter: Age (day) Value: 3 vs. 2
  misc_feature: MA Experiment 108546 PARAMETER Experiment Name: Zm_Imbibed_Seeds_P Parameter: Organism Value: Zea mays
  misc_feature: MA Experiment 108546 PARAMETER Experiment Name: Zm_Imbibed_Seeds_P Parameter: Plant Line Value: 35A19
  misc_feature: MA Experiment 108546 PARAMETER Experiment Name: Zm_Imbibed_Seeds_P Parameter: Tissue Value: Roots vs. Embryo
  misc_feature: MA Experiment ID: 108547 Result: Up-regulated in Transcription
  misc_feature: MA Experiment 108547 PARAMETER Experiment Name: Zm_Imbibed_Seeds_P Parameter: Age (day) Value: 4 vs. 2
  misc_feature: MA Experiment 108547 PARAMETER Experiment Name: Zm_Imbibed_Seeds_P Parameter: Organism Value: Zea mays
  misc_feature: MA Experiment 108547 PARAMETER Experiment Name: Zm_Imbibed_Seeds_P Parameter: Plant Line Value: 35A19
  misc_feature: MA Experiment 108547 PARAMETER Experiment Name: Zm_Imbibed_Seeds_P Parameter: Tissue Value: Aerial vs. Embryo
  misc_feature: MA Experiment ID: 108556 Result: Down-regulated in Transcription
  misc_feature: MA Experiment 108556 PARAMETER Experiment Name: Zm_Drought_P Parameter: Age (day) Value: 9
  misc_feature: MA Experiment 108556 PARAMETER Experiment Name: Zm_Drought_P Parameter: Organism Value: Zea mays
  misc_feature: MA Experiment 108556 PARAMETER Experiment Name: Zm_Drought_P Parameter: Plant Line Value: 35A19
  misc_feature: MA Experiment 108556 PARAMETER Experiment Name: Zm_Drought_P Parameter: Timepoint (hr) Value: 24
  misc_feature: MA Experiment 108556 PARAMETER Experiment Name: Zm_Drought_P Parameter: Tissue Value: Aerial
  misc_feature: MA Experiment 108556 PARAMETER Experiment Name: Zm_Drought_P Parameter: Treatment Value: Drought vs. No Drought
  misc_feature: MA Experiment ID: 108559 Result: Down-regulated in Transcription
  misc_feature: MA Experiment 108559 PARAMETER Experiment Name: Zm_5mM_NO_P Parameter: Age (day) Value: 8
  misc_feature: MA Experiment 108559 PARAMETER Experiment Name: Zm_5mM_NO_P Parameter: Organism Value: Zea mays
  misc_feature: MA Experiment 108559 PARAMETER Experiment Name: Zm_5mM_NO_P Parameter: Plant Line Value: 35A19
  misc_feature: MA Experiment 108559 PARAMETER Experiment Name: Zm_5mM_NO_P Parameter: Timepoint (hr) Value: 12
  misc_feature: MA Experiment 108559 PARAMETER Experiment Name: Zm_5mM_NO_P Parameter: Tissue Value: Aerial
  misc_feature: MA Experiment 108559 PARAMETER Experiment Name: Zm_5mM_NO_P Parameter: Treatment Value: 5mM NO vs. No Treatment
  misc_feature: MA Experiment ID: 108687 Result: Down-regulated in Transcription
  misc_feature: MA Experiment 108687 PARAMETER Experiment Name: Zm_Embryos-Flowers__P Parameter: Tissue Value: Embryo vs. Aerial+
  misc_feature: MA Experiment ID: 20000479 Result: Down-regulated in Transcription
  misc_feature: MA Experiment 20000479 PARAMETER Experiment Name: Zm_Drought_P Parameter: Age (day) Value: 10
  misc_feature: MA Experiment 20000479 PARAMETER Experiment Name: Zm_Drought_P Parameter: Organism Value: Zea mays
  misc_feature: MA Experiment 20000479 PARAMETER Experiment Name: Zm_Drought_P Parameter: Plant Line Value: 35A19
  misc_feature: MA Experiment 20000479 PARAMETER Experiment Name: Zm_Drought_P Parameter: Timepoint (hr) Value: 48
  misc_feature: MA Experiment 20000479 PARAMETER Experiment Name: Zm_Drought_P Parameter: Tissue Value: Aerial
  misc_feature: MA Experiment 20000479 PARAMETER Experiment Name: Zm_Drought_P Parameter: Treatment Value: Drought vs. No Drought
  misc_feature: MA Experiment ID: 20000488 Result: Down-regulated in Transcription
  misc_feature: MA Experiment 20000488 PARAMETER Experiment Name: Zm_50mM_NH4NO3_L_to_H_P Parameter: Organism Value: Zea mays
  misc_feature: MA Experiment 20000488 PARAMETER Experiment Name: Zm_50mM_NH4NO3_L_to_H_P Parameter: Timepoint (hr) Value: 8
  misc_feature: MA Experiment 20000488 PARAMETER Experiment Name: Zm_50mM_NH4NO3_L_to_H_P Parameter: Tissue Value: Leaves
  misc_feature: MA Experiment 20000488 PARAMETER Experiment Name: Zm_50mM_NH4NO3_L_to_H_P Parameter: Treatment Value: 50mM NH4NO3 vs. 100mM Mannitol
  misc_feature: MA Experiment ID: 20000492 Result: Down-regulated in Transcription
  misc_feature: MA Experiment 20000492 PARAMETER Experiment Name: Zm_Hybrid_Seed_Dev_P Parameter: DAP Value: 12
  misc_feature: MA Experiment 20000492 PARAMETER Experiment Name: Zm_Hybrid_Seed_Dev_P Parameter: Organism Value: Zea mays
  misc_feature: MA Experiment 20000492 PARAMETER Experiment Name: Zm_Hybrid_Seed_Dev_P Parameter: Plant Line Value: 35A19
  misc_feature: MA Experiment 20000492 PARAMETER Experiment Name: Zm_Hybrid_Seed_Dev_P Parameter: Tissue Value: Fert Kernel vs. Unfert Floret
  misc_feature: MA Experiment ID: 20000535 Result: Down-regulated in Transcription
  misc_feature: MA Experiment 20000535 PARAMETER Experiment Name: Zm_Hybrid_Seed_Dev_P Parameter: DAP Value: 30 vs. 12
  misc_feature: MA Experiment 20000535 PARAMETER Experiment Name: Zm_Hybrid_Seed_Dev_P Parameter: Organism Value: Zea mays
  misc_feature: MA Experiment 20000535 PARAMETER Experiment Name: Zm_Hybrid_Seed_Dev_P Parameter: Plant Line Value: 35A19
  misc_feature: MA Experiment 20000535 PARAMETER Experiment Name: Zm_Hybrid_Seed_Dev_P Parameter: Tissue Value: Embryo vs. Unfert Floret
  misc_feature: MA Experiment ID: 20001606 Result: Down-regulated in Transcription
  misc_feature: MA Experiment 20001606 PARAMETER Experiment Name: Zm_50ppm_KNO3_L-to-H_P Parameter: Age (day) Value: 19
  misc_feature: MA Experiment 20001606 PARAMETER Experiment Name: Zm_50ppm_KNO3_L-to-H_P Parameter: Organism Value: Zea mays
  misc_feature: MA Experiment 20001606 PARAMETER Experiment Name: Zm_50ppm_KNO3_L-to-H_P Parameter: Plant Line Value: 35A19
  misc_feature: MA Experiment 20001606 PARAMETER Experiment Name: Zm_50ppm_KNO3_L-to-H_P Parameter: Timepoint (hr) Value: 8
  misc_feature: MA Experiment 20001606 PARAMETER Experiment Name: Zm_50ppm_KNO3_L-to-H_P Parameter: Tissue Value: Shoots
  misc_feature: MA Experiment 20001606 PARAMETER Experiment Name: Zm_50ppm_KNO3_L-to-H_P Parameter: Treatment Value: 50ppm KNO3 vs. 50ppm KCl
gcatcggcggacatggtggtggccgtgcagctggccgctcttctcgcgctgctgctcgcgctgtggcgcctggtgtggcggccgcacgccgtggcgcggtcgttcgccaggcagggcatccggggcccgccctacacgttcctggcagggtccttgccggaggcgaagcggctgctgatggctggccggagagggacggcgcccctggacgccggctgccacgacatcatgcccgtactcctgccgcagtttctcagatgggtcgcggactatgggagaacgttgctgttctggatcgggccgattcccgctgtcttgtctactgatctacagctgattaagcaggttctgacagacaggacgggcctgtatcagaaggacttcatgatccccgtgctcaagttcctcttcggcaacggtgtcatattgataaacggagacgattggaagcggcaccgcaaagtggtcctccctgcgttcaaccatgagacgatcaagagcatgtcggcggtgacggcagaggtaacggagcagatgatgcagcaatggcgcggccagatacacggaagcgaagaggaatccgccgagatagacatgatccacgccttcaacgacctgacctccaaggtcaacggccgcgtcgccttcggcaccagccaccgggaagtcgaggaggtcatcgtactgatgcgggagatgcagaagctcgccactgcggccacgctcgatgctccaatactctggtatctgccaactcggcgtaacctgcacgtccggcgtctgaacaaacagctgagaagcaagatcatgtccatcatgcaggcgcggctggccgccgacggagctgataggcgtggtgggcgcggcggcgccgtttccggcggaggcgacctacttgggctgttgctagaggcgtggacgccgcagccgcagcagcacgggaacggcggcgagacgctgacaaccgacgaggtgatcgacgagtgcaagaccttcttcgccgcggggcaggaaaccacagctaccctcctggtctgggccatgttcctgctcgccgtgcacccggaatggcaggacaaagtcagggaggaggtcgtcagggaattctgcaccggcgacgacggcgaggttccccatgccgatgtcctcgccaagctcaagctgctatacatggtgttgctggagacgtcgcgcctctacccgccgatcgtgtacatacagcggagggctgcctgggacgccgtccttggaggcatcaaggtgccccagggcaccgtcatctccatccccattgccatgctgcaccgggacaagcaggtctggggccccgacgccgatgagttcaacccgatgaggttcgagcatggcctcacaaaggccgccaaggatcccaaggcgctgctgtctttctccctgggcccaagagtgtgcactggccagagcttcggcatcgtagaagtgcaggtcgtcatggcgatgatcctcaggaggttctccttctccctctccccaaagtatgttcacaagcccaagtatctcctgtccttgacacccaagcttgggatgcctctcatcgtcaggaatgtggatggctgagagagataatattgtaagagctcgttttgtgtgtgaaaatgaatacatgactagtgtgtgataaatggtactctctttgttttaaagtataaattgtttcaatttttctatgtatattgctttaacgactatacatttag

SEQ ID NO: 2942 - protein, 531 aa, Zea mays subsp. mays
  peptide (1)..(531): Ceres Seq. ID no. 12374456
  misc_feature (5)..(530): Homolog of NCBI NO: 34896952 NR Description: putative cytochrome P450-related protein [Oryza
  misc_feature (6)..(527): Homolog of NCBI NO: 14719280 NR Description: cytochrome P450 [Zea mays]
  misc_feature (69)..(529): Homolog of NCBI NO: 22324446 NR Description: putative cytochrome P450 [Oryza sativa (japonica
  misc_feature (69)..(529): Homolog of NCBI NO: 34913354 NR Description: putative cytochrome P450 [Oryza sativa (japonica
  misc_feature (11)..(529): Homolog of NCBI NO: 34913362 NR Description: putative cytochrome P450 [Oryza sativa (japonica
  misc_feature (6)..(531): Homolog of NCBI NO: 34895168 NR Description: putative cytochrome P450 [Oryza sativa (japonica
  misc_feature (88)..(527): Homolog of NCBI NO: 34896248 NR Description: OSJNBb0008D07.14 [Oryza sativa (japonica
  misc_feature (5)..(530): Homolog of NCBI NO: 18407219 NR Description: cytochrome P450, putative
  misc_feature (69)..(529): Homolog of NCBI NO: 34913350 NR Description: putative cytochrome P450 [Oryza sativa (japonica
  misc_feature (69)..(529): Homolog of NCBI NO: 34913346 NR Description: putative cytochrome P450 [Oryza sativa (japonica
ASADMVVAVQLAALLALLLALWRLVWRPHAVARSFARQGIRGPPYTFLAGSLPEAKRLLMAGRRGTAPLDAGCHDIMPVLLPQFLRWVADYGRTLLFWIGPIPAVLSTDLQLIKQVLTDRTGLYQKDFMIPVLKFLFGNGVILINGDDWKRHRKVVLPAFNHETIKSMSAVTAEVTEQMMQQWRGQIHGSEEESAEIDMIHAFNDLTSKVNGRVAFGTSHREVEEVIVLMREMQKLATAATLDAPILWYLPTRRNLHVRRLNKQLRSKIMSIMQARLAADGADRRGGRGGAVSGGGDLLGLLLEAWTPQPQQHGNGGETLTTDEVIDECKTFFAAGQETTATLLVWAMFLLAVHPEWQDKVREEVVREFCTGDDGEVPHADVLAKLKLLYMVLLETSRLYPPIVYIQRRAAWDAVLGGIKVPQGTVISIPIAMLHRDKQVWGPDADEFNPMRFEHGLTKAAKDPKALLSFSLGPRVCTGQSFGIVEVQVVMAMILRRFSFSLSPKYVHKPKYLLSLTPKLGMPLIVRNVDG

SEQ ID NO: 2943 - protein, 527 aa, Zea mays subsp. mays
  peptide (1)..(527): Ceres Seq. ID no. 12374457
  misc_feature (84)..(523): Homolog of NCBI NO: 34896248 NR Description: OSJNBb0008D07.14 [Oryza sativa (japonica
  misc_feature (1)..(526): Homolog of NCBI NO: 18407219 NR Description: cytochrome P450, putative
  misc_feature (65)..(525): Homolog of NCBI NO: 34913350 NR Description: putative cytochrome P450 [Oryza sativa (japonica
  misc_feature (65)..(525): Homolog of NCBI NO: 34913346 NR Description: putative cytochrome P450 [Oryza sativa (japonica
  misc_feature (1)..(526): Homolog of NCBI NO: 34896952 NR Description: putative cytochrome P450-related protein [Oryza
  misc_feature (2)..(523): Homolog of NCBI NO: 14719280 NR Description: cytochrome P450 [Zea mays]
  misc_feature (65)..(525): Homolog of NCBI NO: 22324446 NR Description: putative cytochrome P450 [Oryza sativa (japonica
  misc_feature (65)..(525): Homolog of NCBI NO: 34913354 NR Description: putative cytochrome P450 [Oryza sativa (japonica
  misc_feature (7)..(525): Homolog of NCBI NO: 34913362 NR Description: putative cytochrome P450 [Oryza sativa (japonica
  misc_feature (2)..(527): Homolog of NCBI NO: 34895168 NR Description: putative cytochrome P450 [Oryza sativa (japonica
MVVAVQLAALLALLLALWRLVWRPHAVARSFARQGIRGPPYTFLAGSLPEAKRLLMAGRRGTAPLDAGCHDIMPVLLPQFLRWVADYGRTLLFWIGPIPAVLSTDLQLIKQVLTDRTGLYQKDFMIPVLKFLFGNGVILINGDDWKRHRKVVLPAFNHETIKSMSAVTAEVTEQMMQQWRGQIHGSEEESAEIDMIHAFNDLTSKVNGRVAFGTSHREVEEVIVLMREMQKLATAATLDAPILWYLPTRRNLHVRRLNKQLRSKIMSIMQARLAADGADRRGGRGGAVSGGGDLLGLLLEAWTPQPQQHGNGGETLTTDEVIDECKTFFAAGQETTATLLVWAMFLLAVHPEWQDKVREEVVREFCTGDDGEVPHADVLAKLKLLYMVLLETSRLYPPIVYIQRRAAWDAVLGGIKVPQGTVISIPIAMLHRDKQVWGPDADEFNPMRFEHGLTKAAKDPKALLSFSLGPRVCTGQSFGIVEVQVVMAMILRRFSFSLSPKYVHKPKYLLSLTPKLGMPLIVRNVDG

SEQ ID NO: 2944 - protein, 472 aa, Zea mays subsp. mays
  peptide (1)..(472): Ceres Seq. ID no. 12374458
  misc_feature (29)..(468): Homolog of NCBI NO: 34896248 NR Description: OSJNBb0008D07.14 [Oryza sativa (japonica
  misc_feature (1)..(471): Homolog of NCBI NO: 18407219 NR Description: cytochrome P450, putative
  misc_feature (10)..(470): Homolog of NCBI NO: 34913350 NR Description: putative cytochrome P450 [Oryza sativa (japonica
  misc_feature (10)..(470): Homolog of NCBI NO: 34913346 NR Description: putative cytochrome P450 [Oryza sativa (japonica
  misc_feature (1)..(471): Homolog of NCBI NO: 34896952 NR Description: putative cytochrome P450-related protein [Oryza
  misc_feature (1)..(468): Homolog of NCBI NO: 14719280 NR Description: cytochrome P450 [Zea mays]
  misc_feature (10)..(470): Homolog of NCBI NO: 22324446 NR Description: putative cytochrome P450 [Oryza sativa (japonica
  misc_feature (10)..(470): Homolog of NCBI NO: 34913354 NR Description: putative cytochrome P450 [Oryza sativa (japonica
  misc_feature (1)..(470): Homolog of NCBI NO: 34913362 NR Description: putative cytochrome P450 [Oryza sativa (japonica
  misc_feature (1)..(472): Homolog of NCBI NO: 34895168 NR Description: putative cytochrome P450 [Oryza sativa (japonica
MAGRRGTAPLDAGCHDIMPVLLPQFLRWVADYGRTLLFWIGPIPAVLSTDLQLIKQVLTDRTGLYQKDFMIPVLKFLFGNGVILINGDDWKRHRKVVLPAFNHETIKSMSAVTAEVTEQMMQQWRGQIHGSEEESAEIDMIHAFNDLTSKVNGRVAFGTSHREVEEVIVLMREMQKLATAATLDAPILWYLPTRRNLHVRRLNKQLRSKIMSIMQARLAADGADRRGGRGGAVSGGGDLLGLLLEAWTPQPQQHGNGGETLTTDEVIDECKTFFAAGQETTATLLVWAMFLLAVHPEWQDKVREEVVREFCTGDDGEVPHADVLAKLKLLYMVLLETSRLYPPIVYIQRRAAWDAVLGGIKVPQGTVISIPIAMLHRDKQVWGPDADEFNPMRFEHGLTKAAKDPKALLSFSLGPRVCTGQSFGIVEVQVVMAMILRRFSFSLSPKYVHKPKYLLSLTPKLGMPLIVRNVDG

SEQ ID NO: 2945 - DNA, 1785 bp, Zea mays subsp. mays
  misc_feature (1)..(1785): Ceres Seq. ID no. 12408251
  misc_feature: MA Experiment ID: 108527 Result: Down-regulated in Transcription
  misc_feature: MA Experiment 108527 PARAMETER Experiment Name: Zm_5mM_NO_P Parameter: Age (day) Value: 8
  misc_feature: MA Experiment 108527 PARAMETER Experiment Name: Zm_5mM_NO_P Parameter: Organism Value: Zea mays
  misc_feature: MA Experiment 108527 PARAMETER Experiment Name: Zm_5mM_NO_P Parameter: Plant Line Value: 35A19
  misc_feature: MA Experiment 108527 PARAMETER Experiment Name: Zm_5mM_NO_P Parameter: Timepoint (hr) Value: 6
  misc_feature: MA Experiment 108527 PARAMETER Experiment Name: Zm_5mM_NO_P Parameter: Tissue Value: Aerial
  misc_feature: MA Experiment 108527 PARAMETER Experiment Name: Zm_5mM_NO_P Parameter: Treatment Value: 5mM NO vs. No Treatment
  misc_feature: MA Experiment ID: 108528 Result: Up-regulated in Transcription
  misc_feature: MA Experiment 108528 PARAMETER Experiment Name: Zm_Imbibed_Seeds_P Parameter: Age (day) Value: 5 vs. 2
  misc_feature: MA Experiment 108528 PARAMETER Experiment Name: Zm_Imbibed_Seeds_P Parameter: Organism Value: Zea mays
  misc_feature: MA Experiment 108528 PARAMETER Experiment Name: Zm_Imbibed_Seeds_P Parameter: Plant Line Value: 35A19
  misc_feature: MA Experiment 108528 PARAMETER Experiment Name: Zm_Imbibed_Seeds_P Parameter: Tissue Value: Aerial vs. Embryo
  misc_feature: MA Experiment ID: 108529 Result: Up-regulated in Transcription
  misc_feature: MA Experiment 108529 PARAMETER Experiment Name: Zm_Imbibed_Seeds_P Parameter: Age (day) Value: 5 vs. 2
  misc_feature: MA Experiment 108529 PARAMETER Experiment Name: Zm_Imbibed_Seeds_P Parameter: Organism Value: Zea mays
  misc_feature: MA Experiment 108529 PARAMETER Experiment Name: Zm_Imbibed_Seeds_P Parameter: Plant Line Value: 35A19
  misc_feature: MA Experiment 108529 PARAMETER Experiment Name: Zm_Imbibed_Seeds_P Parameter: Tissue Value: Roots vs. Embryo
  misc_feature: MA Experiment ID: 108530 Result: Up-regulated in Transcription
  misc_feature: MA Experiment 108530 PARAMETER Experiment Name: Zm_Imbibed_Seeds_P Parameter: Age (day) Value: 6 vs. 2
  misc_feature: MA Experiment 108530 PARAMETER Experiment Name: Zm_Imbibed_Seeds_P Parameter: Organism Value: Zea mays
  misc_feature: MA Experiment 108530 PARAMETER Experiment Name: Zm_Imbibed_Seeds_P Parameter: Plant Line Value: 35A19
  misc_feature: MA Experiment 108530 PARAMETER Experiment Name: Zm_Imbibed_Seeds_P Parameter: Tissue Value: Aerial vs. Embryo
  misc_feature: MA Experiment ID: 108559 Result: Down-regulated in Transcription
  misc_feature: MA Experiment 108559 PARAMETER Experiment Name: Zm_5mM_NO_P Parameter: Age (day) Value: 8
  misc_feature: MA Experiment 108559 PARAMETER Experiment Name: Zm_5mM_NO_P Parameter: Organism Value: Zea mays
  misc_feature: MA Experiment 108559 PARAMETER Experiment Name: Zm_5mM_NO_P Parameter: Plant Line Value: 35A19
  misc_feature: MA Experiment 108559 PARAMETER Experiment Name: Zm_5mM_NO_P Parameter: Timepoint (hr) Value: 12
  misc_feature: MA Experiment 108559 PARAMETER Experiment Name: Zm_5mM_NO_P Parameter: Tissue Value: Aerial
  misc_feature: MA Experiment 108559 PARAMETER Experiment Name: Zm_5mM_NO_P Parameter: Treatment Value: 5mM NO vs. No Treatment
  misc_feature: MA Experiment ID: 108689 Result: Up-regulated in Transcription
  misc_feature: MA Experiment 108689 PARAMETER Experiment Name: Zm_Drought_Roots_P Parameter: Age (day) Value: 9
  misc_feature: MA Experiment 108689 PARAMETER Experiment Name: Zm_Drought_Roots_P Parameter: Organism Value: Zea mays
  misc_feature: MA Experiment 108689 PARAMETER Experiment Name: Zm_Drought_Roots_P Parameter: Plant Line Value: 35A19
  misc_feature: MA Experiment 108689 PARAMETER Experiment Name: Zm_Drought_Roots_P Parameter: Timepoint (hr) Value: 24
  misc_feature: MA Experiment 108689 PARAMETER Experiment Name: Zm_Drought_Roots_P Parameter: Tissue Value: Roots
  misc_feature: MA Experiment 108689 PARAMETER Experiment Name: Zm_Drought_Roots_P Parameter: Treatment Value: Drought vs. No Drought
atatttaattatttattgctgcgaacatatgggatgccagagtcgcagcaaaccacggttcggcggcgtccaattccccttcctcgccgatgccgatgccgatgccgatgccgatgccgatgccacgggcgcggacgcggtggtcggcgctagccgccagcgcgctcatccaatgctgcgcggggagctcctactgcttcggcgtctactctcagacgctcaaggcctcgcagcgctacgaccagtccgcgctcgacgccgtcgccttcttcaaggacgtcggcgccaacgccggggtcctctcgggcttcctcgtcgcttgggcgccggggggccgcaggcgcccctggattgtcctcctcgccggctccctgctctgcgccgcgggctacctccccatgtggctagccgtcgcgggggtcgcgcccgcgccgctcccgctcgtctgcctctacatgctgctcgccgcgcaggcgcagaccttcttcaacaccgccgatgttgtctccgccgtcgagaacttccccgaccgacgaggcactgtcatcggcatcatgaagggttttctaggcctaagtggggcaatacttgtcgaaatttaccgcactcttggcattgatcccagctctttcatactgatgctggcagttttacccacgtccgtcaccttggtgctcatgtattttgtggatgtccacaatccacatgaacggtatgagaagaaattcctagacgctttctccctcattgctgttactgttgctggatacttgatgattctcataatctatggtcaagttttcccaataagctcagctgtgcagagcgtttgtttcgtggtactcctgctactagtgatgtctccaatagctgtggctgcaaaggcccagacgccagaatcaatagctcatcaaggatcaatctcagaacaaagggctggactgctccgcaaagaggtcacagaggattctgaaaatgctagctcaagcactactgcgcttgggggatctaaccaagacctgtcttcaggcaaagaaaacctgaacgtattacaggccatgtgcaagctcaacttctggttgctcttcctggcaatggcttgtggaatgggatcaggtctggccacggtgaacaatatcagccagatcggcggctcccttggctacacgaccaaggagaccagcacactcgtgtctctatggagcatatggaacttttcagggcggtttggtgcaggcttcatatccgaccatttccttcgcctgcgaggagttggcaggccattctttataagcatcacgctgctggtcatgagcgtcggccatgccatcatctcctccggtctccctgcgtcgctctacattgggtcggtgctcatcggcatgtgctatgggtgtcagtgggccctgatgccgagcataacatctgagatctttgggctgagccatttcggcaccatattcaacatggtggctgttgcaagccctgttgggtcctacatcctctcggtgcgcatcgtgggctacatatacgatattgaatcgccaccggacgagcactcttgtgtaggtaagcaatgctttgcactctctttcatgatcatggccggtgtctgtatgtttgggtccgctgtggcatttgtgttgtttatcagaacaaggacgttctataggcgtgtcgtatatgcaaggttgcaatcttttctagacaagtaacaagtctttatgtaagatggctatataacttggaataatgtttgtacatgtatattatgtcagtgtttcc

SEQ ID NO: 2946 - protein, 541 aa, Zea mays subsp. mays
  peptide (1)..(541): Ceres Seq. ID no. 12408252
  misc_feature (322)..(479): Pfam Name: Sugar (and other) transporter Pfam Description: Sugar (and other) transporter
  misc_feature (316)..(536): Homolog of NCBI NO: 34897160 NR Description: putative nodule-specific protein
  misc_feature (17)..(267): Homolog of NCBI NO: 34897160 NR Description: putative nodule-specific protein
  misc_feature (1)..(536): Homolog of NCBI NO: 34394606 NR Description: putative nodule-specific protein
  misc_feature (11)..(540): Homolog of NCBI NO: 7485467 NR Description: nodulin-like protein [imported] - Arabidopsis
  misc_feature (11)..(534): Homolog of NCBI NO: 30686022 NR Description: 68409.m03800 nodulin-related protein [Arabidopsis
  misc_feature (11)..(535): Homolog of NCBI NO: 7485467 NR Description: nodulin-like protein [imported] - Arabidopsis
  misc_feature (15)..(530): Homolog of NCBI NO: 15221898 NR Description: hypothetical protein; protein id: At1g18940.1
  misc_feature (11)..(535): Homolog of NCBI NO: 30686019 NR Description: nodulin-related protein [Arabidopsis thaliana]
  misc_feature (15)..(535): Homolog of NCBI NO: 29824365 NR Description: unknown protein [Arabidopsis thaliana]
  misc_feature (15)..(535): Homolog of NCBI NO: 15221382 NR Description: hypothetical protein; protein id: At1g74780.1
MPMPMPMPMPMPRARTRWSALAASALIQCCAGSSYCFGVYSQTLKASQRYDQSALDAVAFFKDVGANAGVLSGFLVAWAPGGRRRPWIVLLAGSLLCAAGYLPMWLAVAGVAPAPLPLVCLYMLLAAQAQTFFNTADVVSAVENFPDRRGTVIGIMKGFLGLSGAILVEIYRTLGIDPSSFILMLAVLPTSVTLVLMYFVDVHNPHERYEKKFLDAFSLIAVTVAGYLMILIIYGQVFPISSAVQSVCFVVLLLLVMSPIAVAAKAQTPESIAHQGSISEQRAGLLRKEVTEDSENASSSTTALGGSNQDLSSGKENLNVLQAMCKLNFWLLFLAMACGMGSGLATVNNISQIGGSLGYTTKETSTLVSLWSIWNFSGRFGAGFISDHFLRLRGVGRPFFISITLLVMSVGHAIISSGLPASLYIGSVLIGMCYGCQWALMPSITSEIFGLSHFGTIFNMVAVASPVGSYILSVRIVGYIYDIESPPDEHSCVGKQCFALSFMIMAGVCMFGSAVAFVLFIRTRTFYRRVVYARLQSFLDK

SEQ ID NO: 2947 - protein, 539 aa, Zea mays subsp. mays
  peptide (1)..(539): Ceres Seq. ID no. 12408253
  misc_feature (320)..(477): Pfam Name: Sugar (and other) transporter Pfam Description: Sugar (and other) transporter
  misc_feature (314)..(534): Homolog of NCBI NO: 34897160 NR Description: putative nodule-specific protein
  misc_feature (15)..(265): Homolog of NCBI NO: 34897160 NR Description: putative nodule-specific protein
  misc_feature (1)..(534): Homolog of NCBI NO: 34394606 NR Description: putative nodule-specific protein
  misc_feature (9)..(538): Homolog of NCBI NO: 7485467 NR Description: nodulin-like protein [imported] - Arabidopsis
  misc_feature (9)..(532): Homolog of NCBI NO: 30686022 NR Description: 68409.m03800 nodulin-related protein [Arabidopsis
  misc_feature (9)..(533): Homolog of NCBI NO: 7485467 NR Description: nodulin-like protein [imported] - Arabidopsis
  misc_feature (13)..(528): Homolog of NCBI NO: 15221898 NR Description: hypothetical protein; protein id: At1g18940.1
  misc_feature (9)..(533): Homolog of NCBI NO: 30686019 NR Description: nodulin-related protein [Arabidopsis thaliana]
  misc_feature (13)..(533): Homolog of NCBI NO: 29824365 NR Description: unknown protein [Arabidopsis thaliana]
  misc_feature (13)..(533): Homolog of NCBI NO: 15221382 NR Description: hypothetical protein; protein id: At1g74780.1
MPMPMPMPMPRARTRWSALAASALIQCCAGSSYCFGVYSQTLKASQRYDQSALDAVAFFKDVGANAGVLSGFLVAWAPGGRRRPWIVLLAGSLLCAAGYLPMWLAVAGVAPAPLPLVCLYMLLAAQAQTFFNTADVVSAVENFPDRRGTVIGIMKGFLGLSGAILVEIYRTLGIDPSSFILMLAVLPTSVTLVLMYFVDVHNPHERYEKKFLDAFSLIAVTVAGYLMILIIYGQVFPISSAVQSVCFVVLLLLVMSPIAVAAKAQTPESIAHQGSISEQRAGLLRKEVTEDSENASSSTTALGGSNQDLSSGKENLNVLQAMCKLNFWLLFLAMACGMGSGLATVNNISQIGGSLGYTTKETSTLVSLWSIWNFSGRFGAGFISDHFLRLRGVGRPFFISITLLVMSVGHAIISSGLPASLYIGSVLIGMCYGCQWALMPSITSEIFGLSHFGTIFNMVAVASPVGSYILSVRIVGYIYDIESPPDEHSCVGKQCFALSFMIMAGVCMFGSAVAFVLFIRTRTFYRRVVYARLQSFLDK

SEQ ID NO: 2948 - protein, 537 aa, Zea mays subsp. mays
  peptide (1)..(537): Ceres Seq. ID no. 12408254
  misc_feature (318)..(475): Pfam Name: Sugar (and other) transporter Pfam Description: Sugar (and other) transporter
  misc_feature (312)..(532): Homolog of NCBI NO: 34897160 NR Description: putative nodule-specific protein
  misc_feature (13)..(263): Homolog of NCBI NO: 34897160 NR Description: putative nodule-specific protein
  misc_feature (1)..(532): Homolog of NCBI NO: 34394606 NR Description: putative nodule-specific protein
  misc_feature (7)..(536): Homolog of NCBI NO: 7485467 NR Description: nodulin-like protein [imported] - Arabidopsis
  misc_feature (7)..(530): Homolog of NCBI NO: 30686022 NR Description: 68409.m03800 nodulin-related protein [Arabidopsis
  misc_feature (7)..(531): Homolog of NCBI NO: 7485467 NR Description: nodulin-like protein [imported] - Arabidopsis
  misc_feature (11)..(526): Homolog of NCBI NO: 15221898 NR Description: hypothetical protein; protein id: At1g18940.1
  misc_feature (7)..(531): Homolog of NCBI NO: 30686019 NR Description: nodulin-related protein [Arabidopsis thaliana]
  misc_feature (11)..(531): Homolog of NCBI NO: 29824365 NR Description: unknown protein [Arabidopsis thaliana]
  misc_feature (11)..(531): Homolog of NCBI NO: 15221382 NR Description: hypothetical protein; protein id: At1g74780.1
MPMPMPMPRARTRWSALAASALIQCCAGSSYCFGVYSQTLKASQRYDQSALDAVAFFKDVGANAGVLSGFLVAWAPGGRRRPWIVLLAGSLLCAAGYLPMWLAVAGVAPAPLPLVCLYMLLAAQAQTFFNTADVVSAVENFPDRRGTVIGIMKGFLGLSGAILVEIYRTLGIDPSSFILMLAVLPTSVTLVLMYFVDVHNPHERYEKKFLDAFSLIAVTVAGYLMILIIYGQVFPISSAVQSVCFVVLLLLVMSPIAVAAKAQTPESIAHQGSISEQRAGLLRKEVTEDSENASSSTTALGGSNQDLSSGKENLNVLQAMCKLNFWLLFLAMACGMGSGLATVNNISQIGGSLGYTTKETSTLVSLWSIWNFSGRFGAGFISDHFLRLRGVGRPFFISITLLVMSVGHAIISSGLPASLYIGSVLIGMCYGCQWALMPSITSEIFGLSHFGTIFNMVAVASPVGSYILSVRIVGYIYDIESPPDEHSCVGKQCFALSFMIMAGVCMFGSAVAFVLFIRTRTFYRRVVYARLQSFLDK

SEQ ID NO: 2949 - DNA, 1513 bp, Zea mays subsp. mays
  misc_feature (1)..(1513): Ceres Seq. ID no. 12408247
  misc_feature: MA Experiment ID: 108535 Result: Up-regulated in Transcription
  misc_feature: MA Experiment 108535 PARAMETER Experiment Name: Zm_Meristem_P Parameter: Age (day) Value: 8
  misc_feature: MA Experiment 108535 PARAMETER Experiment Name: Zm_Meristem_P Parameter: Organism Value: Zea mays
  misc_feature: MA Experiment 108535 PARAMETER Experiment Name: Zm_Meristem_P Parameter: Plant Line Value: 35A19
  misc_feature: MA Experiment 108535 PARAMETER Experiment Name: Zm_Meristem_P Parameter: Tissue Value: Root Meristem vs. Above Root Meristem
  misc_feature: MA Experiment ID: 20000492 Result: Up-regulated in Transcription
  misc_feature: MA Experiment 20000492 PARAMETER Experiment Name: Zm_Hybrid_Seed_Dev_P Parameter: DAP Value: 12
  misc_feature: MA Experiment 20000492 PARAMETER Experiment Name: Zm_Hybrid_Seed_Dev_P Parameter: Organism Value: Zea mays
  misc_feature: MA Experiment 20000492 PARAMETER Experiment Name: Zm_Hybrid_Seed_Dev_P Parameter: Plant Line Value: 35A19
  misc_feature: MA Experiment 20000492 PARAMETER Experiment Name: Zm_Hybrid_Seed_Dev_P Parameter: Tissue Value: Fert Kernel vs. Unfert Floret
gtccgaacactgggccggccggttgtccgccgcatccccttgcgttgcgttcacggttctcctctctgtctctcgcgcaagggatctcgttctccgcggcagctggtgtttcgctcccttctcgccctccgacggctggttggcagccggcgccggcgccgccaaacgctaggtgctgaggccttcgccagtgtcttcgacggcgacgagcacgtaccagcatcatgtcggaaagaggtcgcctggcaggacgattgattgataaccgcagcagagggtaccatgtagtccctctagttgaggatcccagaggccatcctgaagtcctcgtggatggggatcggaggggctactctgacattcgtggggttcagcaacgtcggggctaccctgacacccatctgcttgaggaacctaggggctaccctggtgttcgtgtggtcgaccataggggctatcctggcagtcgtggggttgatgaacgcagggcctatcctgagctccatcaaggctcacgcatgagggcggctcctcccccttacccagctgccttcgaggatgagctcgagttacaggaagttgaactccggaggctttcggcacataaccgcgctctagttgaggagcgtgaactgttaagcagggaaatacaagctggaaaagatgaggtccgccacttgaatgtgatcattgctgacattaacactgagaaagaagcttatatcagtaagcttatggacaagaggaggaagcttgaagctgaacttggagcaagtgagcacttgcgtgatgaggtcaggcatcttcgtggtgaaattgacaagctcgttaccgctcggaaagaactatctgcagaggctgcatctctcgtggaagagctgaacagggagcaatctgttaaacagcagctacctgtgctgaaaacagaaattgacggtctgcaacaggaacttgttcacgtgaggactgcttgcgggttagagcagaaggggaatttggaattgctggaacaaaggaaggcaatggagaagaatatgctttctatggcacaagagatcgagcagatgcgaggcgaattagctaattttgaagttagaccaaggggcccaggtggagcatatgggatgcagattgggagttcggaagtgaccttcactaagaacccatatgaagatggttataatgcttatgtgggggttcctgagaaagatcctttgcatcctcctgaatatgcttcatgggggacatatgacaggagtcgccttcagtaccgctaagaccagaacttagtcattggagaaagaattgccttctaggttttaatggacatgtcttgtcgtttacagtaccgaagctttatgcctgctgcttggttttccattaagagttgtcctttttaatgcttctaatcgtaactttttccattacaaactggctagattattaaactattggtaccaagatgtccagcaatgtgcggaaagcaccttacatacatgtgattttgcgtgtc

SEQ ID NO: 2950 - protein, 350 aa, Zea mays subsp. mays
  peptide (1)..(350): Ceres Seq. ID no. 12408248
  misc_feature (111)..(309): Homolog of NCBI NO: 38605778 NR Description: OSJNBa0044K18.21 [Oryza sativa (japonica
  misc_feature (102)..(291): Homolog of NCBI NO: 28876008 NR Description: hypothetical protein [Oryza sativa (japonica
  misc_feature (84)..(346): Homolog of NCBI NO: 33146484 NR Description: myosin-like protein [Oryza sativa (japonica
  misc_feature (104)..(319): Homolog of NCBI NO: 25404669 NR Description: hypothetical protein F5A8.8 [imported] -
  misc_feature (53)..(319): Homolog of NCBI NO: 30697468 NR Description: expressed protein [Arabidopsis thaliana]
  misc_feature (84)..(319): Homolog of NCBI NO: 9294396 NR Description: gb|AAD10662.1~gene_id:MIE1.26~similar to unknown
  misc_feature (85)..(319): Homolog of NCBI NO: 38175471 NR Description: myosin-like protein [Oryza sativa (japonica
  misc_feature (84)..(348): Homolog of NCBI NO: 18400511 NR Description: expressed protein
  misc_feature (103)..(310): Homolog of NCBI NO: 25405799 NR Description: myosin-like protein, 97843-94399
  misc_feature (103)..(347): Homolog of NCBI NO: 18405242 NR Description: expressed protein
MSERGRLAGRLIDNRSRGYHVVPLVEDPRGHPEVLVDGDRRGYSDIRGVQQRRGYPDTHLLEEPRGYPGVRVVDHRGYPGSRGVDERRAYPELHQGSRMRAAPPPYPAAFEDELELQEVELRRLSAHNRALVEERELLSREIQAGKDEVRHLNVIIADINTEKEAYISKLMDKRRKLEAELGASEHLRDEVRHLRGEIDKLVTARKELSAEAASLVEELNREQSVKQQLPVLKTEIDGLQQELVHVRTACGLEQKGNLELLEQRKAMEKNMLSMAQEIEQMRGELANFEVRPRGPGGAYGMQIGSSEVTFTKNPYEDGYNAYVGVPEKDPLHPPEYASWGTYDRSRLQYR

SEQ ID NO: 2951 - protein, 252 aa, Zea mays subsp. mays
  peptide (1)..(252): Ceres Seq. ID no. 12408249
  misc_feature (13)..(211): Homolog of NCBI NO: 38605778 NR Description: OSJNBa0044K18.21 [Oryza sativa (japonica
  misc_feature (4)..(193): Homolog of NCBI NO: 28876008 NR Description: hypothetical protein [Oryza sativa (japonica
  misc_feature (1)..(248): Homolog of NCBI NO: 33146484 NR Description: myosin-like protein [Oryza sativa (japonica
  misc_feature (6)..(221): Homolog of NCBI NO: 25404669 NR Description: hypothetical protein F5A8.8 [imported] -
  misc_feature (1)..(221): Homolog of NCBI NO: 30697468 NR Description: expressed protein [Arabidopsis thaliana]
  misc_feature (1)..(221): Homolog of NCBI NO: 9294396 NR Description: gb|AAD10662.1~gene_id:MIE1.26~similar to unknown
  misc_feature (1)..(221): Homolog of NCBI NO: 38175471 NR Description: myosin-like protein [Oryza sativa (japonica
  misc_feature (1)..(250): Homolog of NCBI NO: 18400511 NR Description: expressed protein
  misc_feature (5)..(212): Homolog of NCBI NO: 25405799 NR Description: myosin-like protein, 97843-94399
  misc_feature (5)..(249): Homolog of NCBI NO: 18405242 NR Description: expressed protein
MRAAPPPYPAAFEDELELQEVELRRLSAHNRALVEERELLSREIQAGKDEVRHLNVIIADINTEKEAYISKLMDKRRKLEAELGASEHLRDEVRHLRGEIDKLVTARKELSAEAASLVEELNREQSVKQQLPVLKTEIDGLQQELVHVRTACGLEQKGNLELLEQRKAMEKNMLSMAQEIEQMRGELANFEVRPRGPGGAYGMQIGSSEVTFTKNPYEDGYNAYVGVPEKDPLHPPEYASWGTYDRSRLQYR

SEQ ID NO: 2952 - protein, 180 aa, Zea mays subsp. mays
  peptide (1)..(180): Ceres Seq. ID no. 12408250
  misc_feature (1)..(139): Homolog of NCBI NO: 38605778 NR Description: OSJNBa0044K18.21 [Oryza sativa (japonica
  misc_feature (1)..(121): Homolog of NCBI NO: 28876008 NR Description: hypothetical protein [Oryza sativa (japonica
  misc_feature (1)..(176): Homolog of NCBI NO: 33146484 NR Description: myosin-like protein [Oryza sativa (japonica
  misc_feature (1)..(149): Homolog of NCBI NO: 25404669 NR Description: hypothetical protein F5A8.8 [imported] -
  misc_feature (1)..(149): Homolog of NCBI NO: 30697468 NR Description: expressed protein [Arabidopsis thaliana]
  misc_feature (1)..(149): Homolog of NCBI NO: 9294396 NR Description: gb|AAD10662.1~gene_id:MIE1.26~similar to unknown
  misc_feature (1)..(149): Homolog of NCBI NO: 38175471 NR Description: myosin-like protein [Oryza sativa (japonica
  misc_feature (1)..(178): Homolog of NCBI NO: 18400511 NR Description: expressed protein
  misc_feature (1)..(140): Homolog of NCBI NO: 25405799 NR Description: myosin-like protein, 97843-94399
  misc_feature (1)..(177): Homolog of NCBI NO: 18405242 NR Description: expressed protein
MDKRRKLEAELGASEHLRDEVRHLRGEIDKLVTARKELSAEAASLVEELNREQSVKQQLPVLKTEIDGLQQELVHVRTACGLEQKGNLELLEQRKAMEKNMLSMAQEIEQMRGELANFEVRPRGPGGAYGMQIGSSEVTFTKNPYEDGYNAYVGVPEKDPLHPPEYASWGTYDRSRLQYR

SEQ ID NO: 2953 - DNA, 1869 bp, Zea mays subsp. mays
  misc_feature (1)..(1869): Ceres Seq. ID no. 12364442
  misc_feature: MA Experiment ID: 108528 Result: Down-regulated in Transcription
  misc_feature: MA Experiment 108528 PARAMETER Experiment Name: Zm_Imbibed_Seeds_P Parameter: Age (day) Value: 5 vs. 2
  misc_feature: MA Experiment 108528 PARAMETER Experiment Name: Zm_Imbibed_Seeds_P Parameter: Organism Value: Zea mays
  misc_feature: MA Experiment 108528 PARAMETER Experiment Name: Zm_Imbibed_Seeds_P Parameter: Plant Line Value: 35A19
  misc_feature: MA Experiment 108528 PARAMETER Experiment Name: Zm_Imbibed_Seeds_P Parameter: Tissue Value: Aerial vs. Embryo
  misc_feature: MA Experiment ID: 108530 Result: Down-regulated in Transcription
  misc_feature: MA Experiment 108530 PARAMETER Experiment Name: Zm_Imbibed_Seeds_P Parameter: Age (day) Value: 6 vs. 2
  misc_feature: MA Experiment 108530 PARAMETER Experiment Name: Zm_Imbibed_Seeds_P Parameter: Organism Value: Zea mays
  misc_feature: MA Experiment 108530 PARAMETER Experiment Name: Zm_Imbibed_Seeds_P Parameter: Plant Line Value: 35A19
  misc_feature: MA Experiment 108530 PARAMETER Experiment Name: Zm_Imbibed_Seeds_P Parameter: Tissue Value: Aerial vs. Embryo
  misc_feature: MA Experiment ID: 108535 Result: Down-regulated in Transcription
  misc_feature: MA Experiment 108535 PARAMETER Experiment Name: Zm_Meristem_P Parameter: Age (day) Value: 8
  misc_feature: MA Experiment 108535 PARAMETER Experiment Name: Zm_Meristem_P Parameter: Organism Value: Zea mays
  misc_feature: MA Experiment 108535 PARAMETER Experiment Name: Zm_Meristem_P Parameter: Plant Line Value: 35A19
  misc_feature: MA Experiment 108535 PARAMETER Experiment Name: Zm_Meristem_P Parameter: Tissue Value: Root Meristem vs. Above Root Meristem
  misc_feature: MA Experiment ID: 108543 Result: Up-regulated in Transcription
  misc_feature: MA Experiment ID: 108545 Result: Down-regulated in Transcription
  misc_feature: MA Experiment 108545 PARAMETER Experiment Name: Zm_Imbibed_Seeds_P Parameter: Age (day) Value: 3 vs. 2
  misc_feature: MA Experiment 108545 PARAMETER Experiment Name: Zm_Imbibed_Seeds_P Parameter: Organism Value: Zea mays
  misc_feature: MA Experiment 108545 PARAMETER Experiment Name: Zm_Imbibed_Seeds_P Parameter: Plant Line Value: 35A19
  misc_feature: MA Experiment 108545 PARAMETER Experiment Name: Zm_Imbibed_Seeds_P Parameter: Tissue Value: Aerial vs. Embryo
  misc_feature: MA Experiment ID: 108547 Result: Down-regulated in Transcription
  misc_feature: MA Experiment 108547 PARAMETER Experiment Name: Zm_Imbibed_Seeds_P Parameter: Age (day) Value: 4 vs. 2
  misc_feature: MA Experiment 108547 PARAMETER Experiment Name: Zm_Imbibed_Seeds_P Parameter: Organism Value: Zea mays
  misc_feature: MA Experiment 108547 PARAMETER Experiment Name: Zm_Imbibed_Seeds_P Parameter: Plant Line Value: 35A19
  misc_feature: MA Experiment 108547 PARAMETER Experiment Name: Zm_Imbibed_Seeds_P Parameter: Tissue Value: Aerial vs. Embryo
  misc_feature: MA Experiment ID: 108556 Result: Up-regulated in Transcription
  misc_feature: MA Experiment 108556 PARAMETER Experiment Name: Zm_Drought_P Parameter: Age (day) Value: 9
  misc_feature: MA Experiment 108556 PARAMETER Experiment Name: Zm_Drought_P Parameter: Organism Value: Zea mays
  misc_feature: MA Experiment 108556 PARAMETER Experiment Name: Zm_Drought_P Parameter: Plant Line Value: 35A19
  misc_feature: MA Experiment 108556 PARAMETER Experiment Name: Zm_Drought_P Parameter: Timepoint (hr) Value: 24
  misc_feature: MA Experiment 108556 PARAMETER Experiment Name: Zm_Drought_P Parameter: Tissue Value: Aerial
  misc_feature: MA Experiment 108556 PARAMETER Experiment Name: Zm_Drought_P Parameter: Treatment Value: Drought vs. No Drought
  misc_feature: MA Experiment ID: 20000477 Result: Up-regulated in Transcription
  misc_feature: MA Experiment 20000477 PARAMETER Experiment Name: Zm_5mM_SA_P Parameter: Age (day) Value: 10
  misc_feature: MA Experiment 20000477 PARAMETER Experiment Name: Zm_5mM_SA_P Parameter: Organism Value: Zea mays
  misc_feature: MA Experiment 20000477 PARAMETER Experiment Name: Zm_5mM_SA_P Parameter: Plant Line Value: 35A19
  misc_feature: MA Experiment 20000477 PARAMETER Experiment Name: Zm_5mM_SA_P Parameter: Timepoint (hr) Value: 48
  misc_feature: MA Experiment 20000477 PARAMETER Experiment Name: Zm_5mM_SA_P Parameter: Tissue Value: Aerial
  misc_feature: MA Experiment 20000477 PARAMETER Experiment Name: Zm_5mM_SA_P Parameter: Treatment Value: 5mM SA vs. No Treatment
  misc_feature: MA Experiment ID: 20000480 Result: Up-regulated in Transcription
  misc_feature: MA Experiment 20000480 PARAMETER Experiment Name: Zm_Drought_P Parameter: Age (day) Value: 11
  misc_feature: MA Experiment 20000480 PARAMETER Experiment Name: Zm_Drought_P Parameter: Organism Value: Zea mays
  misc_feature: MA Experiment 20000480 PARAMETER Experiment Name: Zm_Drought_P Parameter: Plant Line Value: 35A19
  misc_feature: MA Experiment 20000480 PARAMETER Experiment Name: Zm_Drought_P Parameter: Timepoint (hr) Value: 72
  misc_feature: MA Experiment 20000480 PARAMETER Experiment Name: Zm_Drought_P Parameter: Tissue Value: Aerial
  misc_feature: MA Experiment 20000480 PARAMETER Experiment Name: Zm_Drought_P Parameter: Treatment Value: Drought vs. No Drought
  misc_feature: MA Experiment ID: 20000487 Result: Up-regulated in Transcription
  misc_feature: MA Experiment 20000487 PARAMETER Experiment Name: Zm_50mM_NH4NO3_L_to_H_P Parameter: Organism Value: Zea mays
  misc_feature: MA Experiment 20000487 PARAMETER Experiment Name: Zm_50mM_NH4NO3_L_to_H_P Parameter: Timepoint (hr) Value: 4
  misc_feature: MA Experiment 20000487 PARAMETER Experiment Name: Zm_50mM_NH4NO3_L_to_H_P Parameter: Tissue Value: Leaves
  misc_feature: MA Experiment 20000487 PARAMETER Experiment Name: Zm_50mM_NH4NO3_L_to_H_P Parameter: Treatment Value: 50mM NH4NO3 vs. 100mM Mannitol
  misc_feature: MA Experiment ID: 20000492 Result: Down-regulated in Transcription
  misc_feature: MA Experiment 20000492 PARAMETER Experiment Name: Zm_Hybrid_Seed_Dev_P Parameter: DAP Value: 12
  misc_feature: MA Experiment 20000492 PARAMETER Experiment Name: Zm_Hybrid_Seed_Dev_P Parameter: Organism Value: Zea mays
  misc_feature: MA Experiment 20000492 PARAMETER Experiment Name: Zm_Hybrid_Seed_Dev_P Parameter: Plant Line Value: 35A19
  misc_feature: MA Experiment 20000492 PARAMETER Experiment Name: Zm_Hybrid_Seed_Dev_P Parameter: Tissue Value: Fert Kernel vs. Unfert Floret
  misc_feature: MA Experiment ID: 20000534 Result: Down-regulated in Transcription
  misc_feature: MA Experiment 20000534 PARAMETER Experiment Name: Zm_Hybrid_Pollen_P Parameter: Age (day) Value: 8
  misc_feature: MA Experiment 20000534 PARAMETER Experiment Name: Zm_Hybrid_Pollen_P Parameter: Organism Value: Zea mays
  misc_feature: MA Experiment 20000534 PARAMETER Experiment Name: Zm_Hybrid_Pollen_P Parameter: Plant Line Value: 35A19
  misc_feature: MA Experiment 20000534 PARAMETER Experiment Name: Zm_Hybrid_Pollen_P Parameter: Tissue Value: Pollen vs. Aerial
  misc_feature: MA Experiment ID: 20000535 Result: Down-regulated in Transcription
  misc_feature: MA Experiment 20000535 PARAMETER Experiment Name: Zm_Hybrid_Seed_Dev_P Parameter: DAP Value: 30 vs. 12
  misc_feature: MA Experiment 20000535 PARAMETER Experiment Name: Zm_Hybrid_Seed_Dev_P Parameter: Organism Value: Zea mays
  misc_feature: MA Experiment 20000535 PARAMETER Experiment Name: Zm_Hybrid_Seed_Dev_P Parameter: Plant Line Value: 35A19
  misc_feature: MA Experiment 20000535 PARAMETER Experiment Name: Zm_Hybrid_Seed_Dev_P Parameter: Tissue Value: Embryo vs. Unfert Floret
gcacgagaccattacctagaacatcctaatcgcaaaataaagcgacggggcccttgcgctgggcgcggagactggagagggcgagagtcctcccatccacaagttcttagcttttgcgagattgagatccggctggggacagaccgacagaggaaggtgaattgtgggaaagaggacagaaaaatggggattggagatggatcttcaaatgggaaccagcaaccggtgcataaggaaatacgagatgagaccacaccacttcttccagtcaaggtggaggaggacgaggggtttcatgagttcaatggagcttcattctctggggcagttttcaatctgtcgaccaccatagttggggctggaattatggctcttccagcaagtatcaagatgctgggcatcatcccggggattctgttgatcatccttgtggcactgctcacagaggcatccatcgacatgcttgtaaggtgcagccaccagggcaagattacatcatatgggtggctgatgggcgaggttttcgggcagtgggggagaattgcgctgcaggcctccgtcatcataaacaatgttggcgtgctaattgtttacatgattatcattggtgatgtattatctggaacaacatcaggcgatgttcatcatcgtggtatattggagggctggtttggagctcatttgtggaattctcgtgccattgttcttcttgccacagctcttttggtgttcgctccgttggtgagctttaagcgcttggattcattaagatacacatctgcgctatcagttgccctggcagtagtttttgtcgtaattactgctgggattgccatcatcaaactcttcaatggaactgtagcgatgcccaaactttttccagaattagatggtcttaattctatctggaatctttttacagctgtccctgttcttgttacggcctatatctgccactataacgttcacagcattgacaatgaacttgaagacagaacacagatcaagccgattgtgcgaacatcgctgttcctgtgctccagtgtttacattgccacaagtttctttgcttatctcctcttcggtgaaggcacactggacgacgtgctcgccaactttgacgcaaatcttggcattccattcagttcagtcttcgatgacatagtgcgagtgagctatgcagcacatgtcatgcttgtctttcccattgtcttctttgccctccggctcaacttggatgggttgctcttccccacgtcaaggcacatctctcgtgacaacaagagattcgccatcatcaccgtctctctcctcgcagtaatttatcttgctgccattctcataccaagcatctgggacgcgttccagtttactggtgccacagctgctgtcctgattggttttatatttcctgccatggtcatacttagggattcttacggaatcgcgagcaagcgcgacaagattctggctgtaaccatgatcgtgcttgctgtcctgtcaaattctgtcgccctatacagtgacgcgatgaacatcttccgtaagaaggaagtggcctgatctcagatttcaaaagtagtcagtgctggatgaagaatggtctcgcaatgcaagactcgatggtacgaaggaaaacgatgcgcttggattccgtgaaggaacgatttctttgtcagcacctcagaatttggccacttgaaagaatctgatgcttgaagtttcctggttctgtgtacacaagtcggctcaatgtcagaattgagccgcttgaaatatatttagttatattctatgcggagagtaggtcttggaaacagccttttccacaataatgtacagttattatgccaatttctgagttcagtt

SEQ ID NO: 2954 - protein, 520 aa, Zea mays subsp. mays
  peptide (1)..(520): Ceres Seq. ID no. 12364443
  misc_feature (86)..(517): Homolog of NCBI NO: 34898706 NR Description: hypothetical protein [Oryza sativa (japonica
  misc_feature (86)..(132): Homolog of NCBI NO: 25408697 NR Description: hypothetical protein At2g40420 [imported] -
  misc_feature (155)..(506): Homolog of NCBI NO: 25408697 NR Description: hypothetical protein At2g40420 [imported] -
  misc_feature (103)..(518): Homolog of NCBI NO: 18412864 NR Description: expressed protein
  misc_feature (104)..(477): Homolog of NCBI NO: 34907894 NR Description: P0439E11.11 [Oryza sativa (japonica
  misc_feature (86)..(506): Homolog of NCBI NO: 30688270 NR Description: amino acid transporter family [Arabidopsis
  misc_feature (85)..(512): Homolog of NCBI NO: 15228851 NR Description: putative protein
  misc_feature (72)..(516): Homolog of NCBI NO: 15241555 NR Description: transporter -like protein; protein id:
  misc_feature (72)..(516): Homolog of NCBI NO: 9758059 NR Description: amino acid transporter-like protein [Arabidopsis
  misc_feature (82)..(516): Homolog of NCBI NO: 18406463 NR Description: expressed protein
ARDHYLEHPNRKIKRRGPCAGRGDWRGRESSHPQVLSFCEIEIRLGTDRQRKVNCGKEDRKMGIGDGSSNGNQQPVHKEIRDETTPLLPVKVEEDEGFHEFNGASFSGAVFNLSTTIVGAGIMALPASIKMLGIIPGILLIILVALLTEASIDMLVRCSHQGKITSYGWLMGEVFGQWGRIALQASVIINNVGVLIVYMIIIGDVLSGTTSGDVHHRGILEGWFGAHLWNSRAIVLLATALLVFAPLVSFKRLDSLRYTSALSVALAVVFVVITAGIAIIKLFNGTVAMPKLFPELDGLNSIWNLFTAVPVLVTAYICHYNVHSIDNELEDRTQIKPIVRTSLFLCSSVYIATSFFAYLLFGEGTLDDVLANFDANLGIPFSSVFDDIVRVSYAAHVMLVFPIVFFALRLNLDGLLFPTSRHISRDNKRFAIITVSLLAVIYLAAILIPSIWDAFQFTGATAAVLIGFIFPAMVILRDSYGIASKRDKILAVTMIVLAVLSNSVALYSDAMNIFRKKEVA

SEQ ID NO: 2955 - protein, 459 aa, Zea mays subsp. mays
  peptide (1)..(459): Ceres Seq. ID no. 12364444
  misc_feature (25)..(71): Homolog of NCBI NO: 25408697 NR Description: hypothetical protein At2g40420 [imported] -
  misc_feature (94)..(445): Homolog of NCBI NO: 25408697 NR Description: hypothetical protein At2g40420 [imported] -
  misc_feature (42)..(457): Homolog of NCBI NO: 18412864 NR Description: expressed protein
  misc_feature (43)..(416): Homolog of NCBI NO: 34907894 NR Description: P0439E11.11 [Oryza sativa (japonica
  misc_feature (25)..(445): Homolog of NCBI NO: 30688270 NR Description: amino acid transporter family [Arabidopsis
  misc_feature (24)..(451): Homolog of NCBI NO: 15228851 NR Description: putative protein
  misc_feature (11)..(455): Homolog of NCBI NO: 15241555 NR Description: transporter -like protein; protein id:
  misc_feature (11)..(455): Homolog of NCBI NO: 9758059 NR Description: amino acid transporter-like protein [Arabidopsis
  misc_feature (21)..(455): Homolog of NCBI NO: 18406463 NR Description: expressed protein
  misc_feature (25)..(456): Homolog of NCBI NO: 34898706 NR Description: hypothetical protein [Oryza sativa (japonica
MGIGDGSSNGNQQPVHKEIRDETTPLLPVKVEEDEGFHEFNGASFSGAVFNLSTTIVGAGIMALPASIKMLGIIPGILLIILVALLTEASIDMLVRCSHQGKITSYGWLMGEVFGQWGRIALQASVIINNVGVLIVYMIIIGDVLSGTTSGDVHHRGILEGWFGAHLWNSRAIVLLATALLVFAPLVSFKRLDSLRYTSALSVALAVVFVVITAGIAIIKLFNGTVAMPKLFPELDGLNSIWNLFTAVPVLVTAYICHYNVHSIDNELEDRTQIKPIVRTSLFLCSSVYIATSFFAYLLFGEGTLDDVLANFDANLGIPFSSVFDDIVRVSYAAHVMLVFPIVFFALRLNLDGLLFPTSRHISRDNKRFAIITVSLLAVIYLAAILIPSIWDAFQFTGATAAVLIGFIFPAMVILRDSYGIASKRDKILAVTMIVLAVLSNSVALYSDAMNIFRKKEVA

SEQ ID NO: 2956 - protein, 398 aa, Zea mays subsp. mays
  peptide (1)..(398): Ceres Seq. ID no. 12364445
  misc_feature (1)..(270): Homolog of NCBI NO: 24461850 NR Description: CTV.3 [Poncirus trifoliata]
  misc_feature (33)..(384): Homolog of NCBI NO: 25408697 NR Description: hypothetical protein At2g40420 [imported] -
  misc_feature (1)..(396): Homolog of NCBI NO: 18412864 NR Description: expressed protein
  misc_feature (1)..(355): Homolog of NCBI NO: 34907894 NR Description: P0439E11.11 [Oryza sativa (japonica
  misc_feature (1)..(384): Homolog of NCBI NO: 30688270 NR Description: amino acid transporter family [Arabidopsis
  misc_feature (1)..(390): Homolog of NCBI NO: 15228851 NR Description: putative protein
  misc_feature (1)..(394): Homolog of NCBI NO: 15241555 NR Description: transporter -like protein; protein id:
  misc_feature (1)..(394): Homolog of NCBI NO: 9758059 NR Description: amino acid transporter-like protein [Arabidopsis
  misc_feature (1)..(394): Homolog of NCBI NO: 18406463 NR Description: expressed protein
  misc_feature (1)..(395): Homolog of NCBI NO: 34898706 NR Description: hypothetical protein [Oryza sativa (japonica
MALPASIKMLGIIPGILLIILVALLTEASIDMLVRCSHQGKITSYGWLMGEVFGQWGRIALQASVIINNVGVLIVYMIIIGDVLSGTTSGDVHHRGILEGWFGAHLWNSRAIVLLATALLVFAPLVSFKRLDSLRYTSALSVALAVVFVVITAGIAIIKLFNGTVAMPKLFPELDGLNSIWNLFTAVPVLVTAYICHYNVHSIDNELEDRTQIKPIVRTSLFLCSSVYIATSFFAYLLFGEGTLDDVLANFDANLGIPFSSVFDDIVRVSYAAHVMLVFPIVFFALRLNLDGLLFPTSRHISRDNKRFAIITVSLLAVIYLAAILIPSIWDAFQFTGATAAVLIGFIFPAMVILRDSYGIASKRDKILAVTMIVLAVLSNSVALYSDAMNIFRKKEVA

SEQ ID NO: 2957 - DNA, 1596 bp, Zea mays subsp. mays
  misc_feature (1)..(1596): Ceres Seq. ID no. 12345281
  misc_feature: MA Experiment ID: 108528 Result: Down-regulated in Transcription
  misc_feature: MA Experiment 108528 PARAMETER Experiment Name: Zm_Imbibed_Seeds_P Parameter: Age (day) Value: 5 vs. 2
  misc_feature: MA Experiment 108528 PARAMETER Experiment Name: Zm_Imbibed_Seeds_P Parameter: Organism Value: Zea mays
  misc_feature: MA Experiment 108528 PARAMETER Experiment Name: Zm_Imbibed_Seeds_P Parameter: Plant Line Value: 35A19
  misc_feature: MA Experiment 108528 PARAMETER Experiment Name: Zm_Imbibed_Seeds_P Parameter: Tissue Value: Aerial vs. Embryo
  misc_feature: MA Experiment ID: 108529 Result: Down-regulated in Transcription
  misc_feature: MA Experiment 108529 PARAMETER Experiment Name: Zm_Imbibed_Seeds_P Parameter: Age (day) Value: 5 vs. 2
  misc_feature: MA Experiment 108529 PARAMETER Experiment Name: Zm_Imbibed_Seeds_P Parameter: Organism Value: Zea mays
  misc_feature: MA Experiment 108529 PARAMETER Experiment Name: Zm_Imbibed_Seeds_P Parameter: Plant Line Value: 35A19
  misc_feature: MA Experiment 108529 PARAMETER Experiment Name: Zm_Imbibed_Seeds_P Parameter: Tissue Value: Roots vs. Embryo
  misc_feature: MA Experiment ID: 108689 Result: Down-regulated in Transcription
  misc_feature: MA Experiment 108689 PARAMETER Experiment Name: Zm_Drought_Roots_P Parameter: Age (day) Value: 9
  misc_feature: MA Experiment 108689 PARAMETER Experiment Name: Zm_Drought_Roots_P Parameter: Organism Value: Zea mays
  misc_feature: MA Experiment 108689 PARAMETER Experiment Name: Zm_Drought_Roots_P Parameter: Plant Line Value: 35A19
  misc_feature: MA Experiment 108689 PARAMETER Experiment Name: Zm_Drought_Roots_P Parameter: Timepoint (hr) Value: 24
  misc_feature: MA Experiment 108689 PARAMETER Experiment Name: Zm_Drought_Roots_P Parameter: Tissue Value: Roots
  misc_feature: MA Experiment 108689 PARAMETER Experiment Name: Zm_Drought_Roots_P Parameter: Treatment Value: Drought vs. No Drought
acgaactggaatcatctccgcctcgccacctcttcatcttcttccccagtagccgccgccaccaccactgcagcagccaaaccacgtgacacctcccgcgccgctcaaccccacagcatccgttgccaccgccgctcacctccccggcgctcccggctacaaccactgcaagcatgaggcagccaaccagcgcgggcggcgacgctgggttcttgcgcgcggaccagatcgacctcaagagcctggacgagcagctcgagcgccacctcggacatcccgcggagcgggtagttggcccagtctctgggacagggagccgccgcggcgaaacggccaagctgggtccggaggagctgacgccactgcagcggtgccgtgaggactgggagatcgaccctaccaagctcatcatcaagggcgtcatcgcgcgcggcacctttggcaccgtccaccgcggcgtctacgacggccaggacgtcgctgtaaaattgcttgactggggcgaagatggccatagatcagaacaagaaattggtgcactaagagcagcgtttgcacaagaggtcgctgtctggcataagcttgagcatccaaacgttactaagtttattggggctataatgggcgcaagagatttaaatatacaaacggaacatggacagcttggcatgccaagcaatatttgctgtgttgttgttgagtaccttgctggaggtgcgctgaaaaattttctgataaagaacaggagaaggaaacttgcctttaaagttgtggtccaaatagctcttgaccttgccaggggattatgctacctccactcaaagaaaatagtgcaccgtgatgtcaagactgaaaacatgcttctggacaagacgagaacggtaaagatcgctgattttggtgttgctcgagtcgaggcttcaaatcctagcgatatgacgggagaaacagggacgcttggttacatggctcctgaggttctcaatggccatgcttacaacaggaagtgtgacgtgtacagctttgggatctgcctgtgggagatatactgctgtgacatgccgtaccctgatctcagtttttctgaggtcacctctgccgtcgttcgccagaatctgaggcctgagataccgcgctgctgcccgagctcgctagcgaatgtgatgaagcgatgctgggacgcgaacccggacaagcgtcccgagatggcggaggtggtgtccatgctggaggcgatcgacacgtccaagggtggcggcatgatccctaaggaccagacgcagggctgcctctcgtgcttccgccagtaccgaggtccctaacgcagggttgtttatttatacccggtgaaatgatgatattggtctctacactacaactcagtgtaatctaatcgcagaagtggctatataatggagaagcttatcattgcttgccatgggtgtaaatggatggggcggggtggttgacgattggtgtgcttgtatgctcgcttcgagttataatgcttgctgtaagttaaggtgtggacggagttgctgttgccgtttgctcacatcgttaaattcgtgggcgtgacatgaagcaaggttatgt

SEQ ID NO: 2958 - protein, 382 aa, Zea mays subsp. mays
  peptide (1)..(382): Ceres Seq. ID no. 12345282
  misc_feature (78)..(352): Pfam Name: Protein kinase domain Pfam Description: Protein kinase domain
  misc_feature (69)..(382): Homolog of NCBI NO: 15229398 NR Description: ATMRK1
  misc_feature (68)..(382): Homolog of NCBI NO: 18403507 NR Description: expressed protein
  misc_feature (15)..(32): Homolog of NCBI NO: 15233574 NR Description: kinase like protein; protein id: At4g14780.1
  misc_feature (60)..(382): Homolog of NCBI NO: 15233574 NR Description: kinase like protein; protein id: At4g14780.1
  misc_feature (9)..(382): Homolog of NCBI NO: 21553402 NR Description: protein kinase [Arabidopsis thaliana]
  misc_feature (9)..(382): Homolog of NCBI NO: 15240597 NR Description: protein kinase
  misc_feature (1)..(32): Homolog of NCBI NO: 15232131 NR Description: putative protein kinase
  misc_feature (29)..(382): Homolog of NCBI NO: 15232131 NR Description: putative protein kinase
  misc_feature (8)..(382): Homolog of NCBI NO: 29367399 NR Description: putative protein kinase [Oryza sativa (japonica
  misc_feature (1)..(382): Homolog of NCBI NO: 34911620 NR Description: protein kinase -like [Oryza sativa (japonica
MRQPTSAGGDAGFLRADQIDLKSLDEQLERHLGHPAERVVGPVSGTGSRRGETAKLGPEELTPLQRCREDWEIDPTKLIIKGVIARGTFGTVHRGVYDGQDVAVKLLDWGEDGHRSEQEIGALRAAFAQEVAVWHKLEHPNVTKFIGAIMGARDLNIQTEHGQLGMPSNICCVVVEYLAGGALKNFLIKNRRRKLAFKVVVQIALDLARGLCYLHSKKIVHRDVKTENMLLDKTRTVKIADFGVARVEASNPSDMTGETGTLGYMAPEVLNGHAYNRKCDVYSFGICLWEIYCCDMPYPDLSFSEVTSAVVRQNLRPEIPRCCPSSLANVMKRCWDANPDKRPEMAEVVSMLEAIDTSKGGGMIPKDQTQGCLSCFRQYRGP

SEQ ID NO: 2959 - protein, 233 aa, Zea mays subsp. mays
  peptide (1)..(233): Ceres Seq. ID no. 12345283
  misc_feature (1)..(203): Pfam Name: Protein kinase domain Pfam Description: Protein kinase domain
  misc_feature (1)..(232): Homolog of NCBI NO: 14626298 NR Description: putative protein kinase [Oryza sativa (japonica
  misc_feature (1)..(233): Homolog of NCBI NO: 21554375 NR Description: ATMRK1 [Arabidopsis thaliana]
  misc_feature (1)..(233): Homolog of NCBI NO: 15229398 NR Description: ATMRK1
  misc_feature (1)..(233): Homolog of NCBI NO: 18403507 NR Description: expressed protein
  misc_feature (1)..(233): Homolog of NCBI NO: 15233574 NR Description: kinase like protein; protein id: At4g14780.1
  misc_feature (1)..(233): Homolog of NCBI NO: 21553402 NR Description: protein kinase [Arabidopsis thaliana]
  misc_feature (1)..(233): Homolog of NCBI NO: 15240597 NR Description: protein kinase
  misc_feature (1)..(233): Homolog of NCBI NO: 15232131 NR Description: putative protein kinase
  misc_feature (1)..(233): Homolog of NCBI NO: 29367399 NR Description: putative protein kinase [Oryza sativa (japonica
  misc_feature (1)..(233): Homolog of NCBI NO: 34911620 NR Description: protein kinase -like [Oryza sativa (japonica
MGARDLNIQTEHGQLGMPSNICCVVVEYLAGGALKNFLIKNRRRKLAFKVVVQIALDLARGLCYLHSKKIVHRDVKTENMLLDKTRTVKIADFGVARVEASNPSDMTGETGTLGYMAPEVLNGHAYNRKCDVYSFGICLWEIYCCDMPYPDLSFSEVTSAVVRQNLRPEIPRCCPSSLANVMKRCWDANPDKRPEMAEVVSMLEAIDTSKGGGMIPKDQTQGCLSCFRQYRGP

SEQ ID NO: 2960 - protein, 217 aa, Zea mays subsp. mays
  peptide (1)..(217): Ceres Seq. ID no. 12345284
  misc_feature (1)..(187): Pfam Name: Protein kinase domain Pfam Description: Protein kinase domain
  misc_feature (1)..(216): Homolog of NCBI NO: 14626298 NR Description: putative protein kinase [Oryza sativa (japonica
  misc_feature (1)..(217): Homolog of NCBI NO: 21554375 NR Description: ATMRK1 [Arabidopsis thaliana]
  misc_feature (1)..(217): Homolog of NCBI NO: 15229398 NR Description: ATMRK1
  misc_feature (1)..(217): Homolog of NCBI NO: 18403507 NR Description: expressed protein
  misc_feature (1)..(217): Homolog of NCBI NO: 15233574 NR Description: kinase like protein; protein id: At4g14780.1
  misc_feature (1)..(217): Homolog of NCBI NO: 21553402 NR Description: protein kinase [Arabidopsis thaliana]
  misc_feature (1)..(217): Homolog of NCBI NO: 15240597 NR Description: protein kinase
  misc_feature (1)..(217): Homolog of NCBI NO: 15232131 NR Description: putative protein kinase
  misc_feature (1)..(217): Homolog of NCBI NO: 29367399 NR Description: putative protein kinase [Oryza sativa (japonica
  misc_feature (1)..(217): Homolog of NCBI NO: 34911620 NR Description: protein kinase -like [Oryza sativa (japonica
MPSNICCVVVEYLAGGALKNFLIKNRRRKLAFKVVVQIALDLARGLCYLHSKKIVHRDVKTENMLLDKTRTVKIADFGVARVEASNPSDMTGETGTLGYMAPEVLNGHAYNRKCDVYSFGICLWEIYCCDMPYPDLSFSEVTSAVVRQNLRPEIPRCCPSSLANVMKRCWDANPDKRPEMAEVVSMLEAIDTSKGGGMIPKDQTQGCLSCFRQYRGP

SEQ ID NO: 2961 - DNA, 2062 bp, Zea mays subsp. mays
  misc_feature (1)..(2062): Ceres Seq. ID no. 12373375
  misc_feature: MA Experiment ID: 108528 Result: Up-regulated in Transcription
  misc_feature: MA Experiment 108528 PARAMETER Experiment Name: Zm_Imbibed_Seeds_P Parameter: Age (day) Value: 5 vs. 2
  misc_feature: MA Experiment 108528 PARAMETER Experiment Name: Zm_Imbibed_Seeds_P Parameter: Organism Value: Zea mays
  misc_feature: MA Experiment 108528 PARAMETER Experiment Name: Zm_Imbibed_Seeds_P Parameter: Plant Line Value: 35A19
  misc_feature: MA Experiment 108528 PARAMETER Experiment Name: Zm_Imbibed_Seeds_P Parameter: Tissue Value: Aerial vs. Embryo
  misc_feature: MA Experiment ID: 108529 Result: Down-regulated in Transcription
  misc_feature: MA Experiment 108529 PARAMETER Experiment Name: Zm_Imbibed_Seeds_P Parameter: Age (day) Value: 5 vs. 2
  misc_feature: MA Experiment 108529 PARAMETER Experiment Name: Zm_Imbibed_Seeds_P Parameter: Organism Value: Zea mays
  misc_feature: MA Experiment 108529 PARAMETER Experiment Name: Zm_Imbibed_Seeds_P Parameter: Plant Line Value: 35A19
  misc_feature: MA Experiment 108529 PARAMETER Experiment Name: Zm_Imbibed_Seeds_P Parameter: Tissue Value: Roots vs. Embryo
  misc_feature: MA Experiment ID: 108530 Result: Up-regulated in Transcription
  misc_feature: MA Experiment 108530 PARAMETER Experiment Name: Zm_Imbibed_Seeds_P Parameter: Age (day) Value: 6 vs. 2
  misc_feature: MA Experiment 108530 PARAMETER Experiment Name: Zm_Imbibed_Seeds_P Parameter: Organism Value: Zea mays
  misc_feature: MA Experiment 108530 PARAMETER Experiment Name: Zm_Imbibed_Seeds_P Parameter: Plant Line Value: 35A19
  misc_feature: MA Experiment 108530 PARAMETER Experiment Name: Zm_Imbibed_Seeds_P Parameter: Tissue Value: Aerial vs. Embryo
  misc_feature: MA Experiment ID: 108536 Result: Down-regulated in Transcription
  misc_feature: MA Experiment 108536 PARAMETER Experiment Name: Zm_Meristem_P Parameter: Age (day) Value: 8
  misc_feature: MA Experiment 108536 PARAMETER Experiment Name: Zm_Meristem_P Parameter: Organism Value: Zea mays
  misc_feature: MA Experiment 108536 PARAMETER Experiment Name: Zm_Meristem_P Parameter: Plant Line Value: 35A19
  misc_feature: MA Experiment 108536 PARAMETER Experiment Name: Zm_Meristem_P Parameter: Tissue Value: Shoot Meristem vs. Above Shoot Meristem
  misc_feature: MA Experiment ID: 108545 Result: Up-regulated in Transcription
  misc_feature: MA Experiment 108545 PARAMETER Experiment Name: Zm_Imbibed_Seeds_P Parameter: Age (day) Value: 3 vs. 2
  misc_feature: MA Experiment 108545 PARAMETER Experiment Name: Zm_Imbibed_Seeds_P Parameter: Organism Value: Zea mays
  misc_feature: MA Experiment 108545 PARAMETER Experiment Name: Zm_Imbibed_Seeds_P Parameter: Plant Line Value: 35A19
  misc_feature: MA Experiment 108545 PARAMETER Experiment Name: Zm_Imbibed_Seeds_P Parameter: Tissue Value: Aerial vs. Embryo
  misc_feature: MA Experiment ID: 108546 Result: Down-regulated in Transcription
  misc_feature: MA Experiment 108546 PARAMETER Experiment Name: Zm_Imbibed_Seeds_P Parameter: Age (day) Value: 3 vs. 2
  misc_feature: MA Experiment 108546 PARAMETER Experiment Name: Zm_Imbibed_Seeds_P Parameter: Organism Value: Zea mays
  misc_feature: MA Experiment 108546 PARAMETER Experiment Name: Zm_Imbibed_Seeds_P Parameter: Plant Line Value: 35A19
  misc_feature: MA Experiment 108546 PARAMETER Experiment Name: Zm_Imbibed_Seeds_P Parameter: Tissue Value: Roots vs. Embryo
  misc_feature: MA Experiment ID: 108547 Result: Up-regulated in Transcription
  misc_feature: MA Experiment 108547 PARAMETER Experiment Name: Zm_Imbibed_Seeds_P Parameter: Age (day) Value: 4 vs. 2
  misc_feature: MA Experiment 108547 PARAMETER Experiment Name: Zm_Imbibed_Seeds_P Parameter: Organism Value: Zea mays
  misc_feature: MA Experiment 108547 PARAMETER Experiment Name: Zm_Imbibed_Seeds_P Parameter: Plant Line Value: 35A19
  misc_feature: MA Experiment 108547 PARAMETER Experiment Name: Zm_Imbibed_Seeds_P Parameter: Tissue Value: Aerial vs. Embryo
  misc_feature: MA Experiment ID: 20000477 Result: Down-regulated in Transcription
  misc_feature: MA Experiment 20000477 PARAMETER Experiment Name: Zm_5mM_SA_P Parameter: Age (day) Value: 10
  misc_feature: MA Experiment 20000477 PARAMETER Experiment Name: Zm_5mM_SA_P Parameter: Organism Value: Zea mays
  misc_feature: MA Experiment 20000477 PARAMETER Experiment Name: Zm_5mM_SA_P Parameter: Plant Line Value: 35A19
  misc_feature: MA Experiment 20000477 PARAMETER Experiment Name: Zm_5mM_SA_P Parameter: Timepoint (hr) Value: 48
  misc_feature: MA Experiment 20000477 PARAMETER Experiment Name: Zm_5mM_SA_P Parameter: Tissue Value: Aerial
  misc_feature: MA Experiment 20000477 PARAMETER Experiment Name: Zm_5mM_SA_P Parameter: Treatment Value: 5mM SA vs. No Treatment
  misc_feature: MA Experiment ID: 20000479 Result: Down-regulated in Transcription
  misc_feature: MA Experiment 20000479 PARAMETER Experiment Name: Zm_Drought_P Parameter: Age (day) Value: 10
  misc_feature: MA Experiment 20000479 PARAMETER Experiment Name: Zm_Drought_P Parameter: Organism Value: Zea mays
  misc_feature: MA Experiment 20000479 PARAMETER Experiment Name: Zm_Drought_P Parameter: Plant Line Value: 35A19
  misc_feature: MA Experiment 20000479 PARAMETER Experiment Name: Zm_Drought_P Parameter: Timepoint (hr) Value: 48
  misc_feature: MA Experiment 20000479 PARAMETER Experiment Name: Zm_Drought_P Parameter: Tissue Value: Aerial
  misc_feature: MA Experiment 20000479 PARAMETER Experiment Name: Zm_Drought_P Parameter: Treatment Value: Drought vs. No Drought
  misc_feature: MA Experiment ID: 20000480 Result: Down-regulated in Transcription
  misc_feature: MA Experiment 20000480 PARAMETER Experiment Name: Zm_Drought_P Parameter: Age (day) Value: 11
  misc_feature: MA Experiment 20000480 PARAMETER Experiment Name: Zm_Drought_P Parameter: Organism Value: Zea mays
  misc_feature: MA Experiment 20000480 PARAMETER Experiment Name: Zm_Drought_P Parameter: Plant Line Value: 35A19
  misc_feature: MA Experiment 20000480 PARAMETER Experiment Name: Zm_Drought_P Parameter: Timepoint (hr) Value: 72
  misc_feature: MA Experiment 20000480 PARAMETER Experiment Name: Zm_Drought_P Parameter: Tissue Value: Aerial
  misc_feature: MA Experiment 20000480 PARAMETER Experiment Name: Zm_Drought_P Parameter: Treatment Value: Drought vs. No Drought
  misc_feature: MA Experiment ID: 20000626 Result: Down-regulated in Transcription
  misc_feature: MA Experiment 20000626 PARAMETER Experiment Name: Zm_Herbicide-Treatments_P Parameter: Timepoint (hr) Value: 12
  misc_feature: MA Experiment 20000626 PARAMETER Experiment Name: Zm_Herbicide-Treatments_P Parameter: Tissue Value: Aerial
  misc_feature: MA Experiment 20000626 PARAMETER Experiment Name: Zm_Herbicide-Treatments_P Parameter: Treatment Value: Roundup vs. No Treatment
ctctcactaccaccaccactgccccggatccataccagctgcagcagcagcgcgcgcgagctagcttcggtcggtcgatagatcgatcgatcgctcggccatcatggcgcgggaggagcaggcgctgctgtcgacggagatcgtgaaccgcggcgtggagccgtcgggcccggacgccggctcgccggccttctcggtgcgcgtgcgccgccgcctgccggacttcctgcagtcggtgaacctcaagtacgtgcgcctcgggtaccactacctcatcagccacggcgtgtacctggccaccatccccgtcatcgtgctggtgtgcggcgccgagctgggcagcctcagccgcgacgagctgtggcgcaaggtgtggggggaggccacctacgacctcgccaccgtgctcgccttcctcgccgtcctcgccttcaccatctccgtctacatcatgtccaggcccaggcccgtgtacctcatcgacttcgcatgctacaagccggccgacgagctcaaggtgtccaaggcggagttcatcgacctggcgcgcaagtccggcaagttcgacgaggacagcctggcgttccagtcgcgtctgctggccaagtccggcatcggcgacgagtcgtacatgccgcgctgcgtgttcgagcccaacgccagctgcgccaccatgaaggagggccgcgccgaggcgtccacggccatgttcgcggcgctggacgagctgttcgacaagtgccgcgtccggcccaaggacgtgggcgtgctggtggtcaactgcagcctcttcaacccgacgccctccctgtccgccatgatcgtcaaccactacaagatgcgcggcaacatcctgagctacaacctgggggggcatgggctgcagcggcgggcgtcatcgccatcgatctggcccgcgacatgctccaggccagcggcgcgggcctggccgtggtggtcagcacggaggccgtctccttcacgtggtaccccgggaagcggcgctccatgctcatcccgaacgccttcttccgggccggctgcgcggcggtgctgctgtccaaccggcgccgcgacttccaccgcgccaagtaccagctggagcacgtggtgcgcacgcacaagggcgcggacgaccgcgccttccgctccgtgtaccaggaggaggacgagcagcggatcaagggcctgtccatcagccgcgacctgctggaggtgggcggccacgcgctcaagaccaacatcaccacgctggggcccctggtgctgcccttctccgagcagctgctcttcttcgcgggcgtgctgttccgccacctgttcccgtccaaggcctccacgccggcgccgccgaccaccccaggggacgcctcggccgccgcgccctacatcccggacttcaagcgcgcgttcgagcacttctgcatgcacgcggccagccgcgacgtgctggagcacctgcagagcaacctgggcctgcgcaacgccgacctggaggcctcccgcgccgcgctgcaccgcttcggcaacacctcaagcagcagcatctggtacgagctggcgtacctggaggccaagggccgcgtccgccgcggcgaccgcgtctggcagctcgccttcgggtcgggcttcaagtgcaacagcgcggtgtggcgcgccgtccgccgcgtgcgccgccccgcgcgcagcccctggctgggactgcgtcgaccagtacccggcgcgcatggacgcctagcacgtacctgcaatgcagtggctgctatctatctatcgctcgcttcgctaccactaccagtgcagtgctgcacttcaccgatggatgatggatcggatatgatatggtataggacgcggtcggtcgatttgcatgcatgcacaagtgttagtataccgttctgaaggtacgtttgaactttgttcgtttgtattgcactattgcttgttgtttaagtagcggttaagggaggcatacgtacgctgtactaccataatggaagtactccggtccggtcctgtcctgtgtgagccttatgtacgtgcaattttaatgtgttttggt

SEQ ID NO: 2962 - protein, 544 aa, Zea mays subsp. mays
  peptide (1)..(544): Ceres Seq. ID no. 12373376
  misc_feature (293)..(522): Pfam Name: Equine herpesvirus glycoprotein gp2 Pfam Description: Equine herpesvirus glycoprotein gp2
  misc_feature (1)..(259): Homolog of NCBI NO: 8177715 NR Description: fiddlehead protein [Arabidopsis thaliana]
  misc_feature (1)..(259): Homolog of NCBI NO: 8177719 NR Description: fiddlehead protein [Arabidopsis thaliana]
  misc_feature (5)..(259): Homolog of NCBI NO: 19351907 NR Description: putative beta-ketoacyl-CoA synthase [Antirrhinum
  misc_feature (1)..(259): Homolog of NCBI NO: 28864534 NR Description: fiddlehead-like protein [Tropaeolum majus]
  misc_feature (1)..(259): Homolog of NCBI NO: 8177711 NR Description: fiddlehead protein [Arabidopsis thaliana]
  misc_feature (1)..(257): Homolog of NCBI NO: 8177723 NR Description: fiddlehead protein [Arabidopsis thaliana]
  misc_feature (1)..(259): Homolog of NCBI NO: 8177727 NR Description: fiddlehead protein [Arabidopsis thaliana]
  misc_feature (1)..(259): Homolog of NCBI NO: 15225270 NR Description: beta-ketoacyl-CoA synthase (FIDDLEHEAD)
  misc_feature (1)..(259): Homolog of NCBI NO: 18447765 NR Description: fiddlehead-like protein [Gossypium hirsutum]
  misc_feature (1)..(259): Homolog of NCBI NO: 24960748 NR Description: Putative fiddlehead-like protein
MAREEQALLSTEIVNRGVEPSGPDAGSPAFSVRVRRRLPDFLQSVNLKYVRLGYHYLISHGVYLATIPVIVLVCGAELGSLSRDELWRKVWGEATYDLATVLAFLAVLAFTISVYIMSRPRPVYLIDFACYKPADELKVSKAEFIDLARKSGKFDEDSLAFQSRLLAKSGIGDESYMPRCVFEPNASCATMKEGRAEASTAMFAALDELFDKCRVRPKDVGVLVVNCSLFNPTPSLSAMIVNHYKMRGNILSYNLGGHGLQRRASSPSIWPATCSRPAARAWPWWSARRPSPSRGTPGSGAPCSSRTPSSGPAARRCCCPTGAATSTAPSTSWSTWCARTRARTTAPSAPCTRRRTSSGSRACPSAATCWRWAATRSRPTSPRWGPWCCPSPSSCSSSRACCSATCSRPRPPRRRRRPPQGTPRPPRPTSRTSSARSSTSACTRPAATCWSTCRATWACATPTWRPPAPRCTASATPQAAASGTSWRTWRPRAASAAATASGSSPSGRASSATARCGAPSAACAAPRAAPGWDCVDQYPARMDA

SEQ ID NO: 2963 - protein, 470 aa, Zea mays subsp. mays
  peptide (1)..(470): Ceres Seq. ID no. 12373377
  misc_feature (206)..(392): Pfam Name: Chalcone and stilbene synthases, C-terminal domain Pfam Description: Chalcone and stilbene synthases, C-terminal
  misc_feature (128)..(264): Homolog of NCBI NO: 8177715 NR Description: fiddlehead protein [Arabidopsis thaliana]
  misc_feature (128)..(372): Homolog of NCBI NO: 8177719 NR Description: fiddlehead protein [Arabidopsis thaliana]
  misc_feature (128)..(403): Homolog of NCBI NO: 19351907 NR Description: putative beta-ketoacyl-CoA synthase [Antirrhinum
  misc_feature (128)..(403): Homolog of NCBI NO: 28864534 NR Description: fiddlehead-like protein [Tropaeolum majus]
  misc_feature (128)..(410): Homolog of NCBI NO: 8177711 NR Description: fiddlehead protein [Arabidopsis thaliana]
  misc_feature (128)..(410): Homolog of NCBI NO: 8177723 NR Description: fiddlehead protein [Arabidopsis thaliana]
  misc_feature (128)..(410): Homolog of NCBI NO: 8177727 NR Description: fiddlehead protein [Arabidopsis thaliana]
  misc_feature (128)..(410): Homolog of NCBI NO: 15225270 NR Description: beta-ketoacyl-CoA synthase (FIDDLEHEAD)
  misc_feature (128)..(409): Homolog of NCBI NO: 18447765 NR Description: fiddlehead-like protein [Gossypium hirsutum]
  misc_feature (128)..(403): Homolog of NCBI NO: 24960748 NR Description: Putative fiddlehead-like protein
MLQAGRRAQGVQGGVHRPGAQVRQVRRGQPGVPVASAGQVRHRRRVVHAALRVRAQRQLRHHEGGPRRGVHGHVRGAGRAVRQVPRPAQGRGRAGGQLQPLQPDALPVRHDRQPLQDARQHPELQPGGAWAAAAGVIAIDLARDMLQASGAGLAVVVSTEAVSFTWYPGKRRSMLIPNAFFRAGCAAVLLSNRRRDFHRAKYQLEHVVRTHKGADDRAFRSVYQEEDEQRIKGLSISRDLLEVGGHALKTNITTLGPLVLPFSEQLLFFAGVLFRHLFPSKASTPAPPTTPGDASAAAPYIPDFKRAFEHFCMHAASRDVLEHLQSNLGLRNADLEASRAALHRFGNTSSSSIWYELAYLEAKGRVRRGDRVWQLAFGSGFKCNSAVWRAVRRVRRPARSPWLGLRRPVPGAHGRLARTCNAVAAIYLSLASLPLPVQCCTSPMDDGSDMIWYRTRSVDLHACTSVSIPF

SEQ ID NO: 2964 - protein, 428 aa, Zea mays subsp. mays
  peptide (1)..(428): Ceres Seq. ID no. 12373378
  misc_feature (177)..(406): Pfam Name: Equine herpesvirus glycoprotein gp2 Pfam Description: Equine herpesvirus glycoprotein gp2
  misc_feature (1)..(143): Homolog of NCBI NO: 8177719 NR Description: fiddlehead protein [Arabidopsis thaliana]
  misc_feature (1)..(143): Homolog of NCBI NO: 19351907 NR Description: putative beta-ketoacyl-CoA synthase [Antirrhinum
  misc_feature (1)..(143): Homolog of NCBI NO: 28864534 NR Description: fiddlehead-like protein [Tropaeolum majus]
  misc_feature (1)..(143): Homolog of NCBI NO: 8177711 NR Description: fiddlehead protein [Arabidopsis thaliana]
  misc_feature (1)..(141): Homolog of NCBI NO: 8177723 NR Description: fiddlehead protein [Arabidopsis thaliana]
  misc_feature (1)..(143): Homolog of NCBI NO: 8177715 NR Description: fiddlehead protein [Arabidopsis thaliana]
  misc_feature (1)..(143): Homolog of NCBI NO: 8177727 NR Description: fiddlehead protein [Arabidopsis thaliana]
  misc_feature (1)..(143): Homolog of NCBI NO: 15225270 NR Description: beta-ketoacyl-CoA synthase (FIDDLEHEAD)
  misc_feature (1)..(143): Homolog of NCBI NO: 18447765 NR Description: fiddlehead-like protein [Gossypium hirsutum]
  misc_feature (1)..(143): Homolog of NCBI NO: 24960748 NR Description: Putative fiddlehead-like protein
MSRPRPVYLIDFACYKPADELKVSKAEFIDLARKSGKFDEDSLAFQSRLLAKSGIGDESYMPRCVFEPNASCATMKEGRAEASTAMFAALDELFDKCRVRPKDVGVLVVNCSLFNPTPSLSAMIVNHYKMRGNILSYNLGGHGLQRRASSPSIWPATCSRPAARAWPWWSARRPSPSRGTPGSGAPCSSRTPSSGPAARRCCCPTGAATSTAPSTSWSTWCARTRARTTAPSAPCTRRRTSSGSRACPSAATCWRWAATRSRPTSPRWGPWCCPSPSSCSSSRACCSATCSRPRPPRRRRRPPQGTPRPPRPTSRTSSARSSTSACTRPAATCWSTCRATWACATPTWRPPAPRCTASATPQAAASGTSWRTWRPRAASAAATASGSSPSGRASSATARCGAPSAACAAPRAAPGWDCVDQYPARMDA

SEQ ID NO: 2965 - DNA, 1624 bp, Zea mays subsp. mays
  misc_feature (1)..(1624): Ceres Seq. ID no. 13492681
  misc_feature: MA Experiment ID: 108535 Result: Up-regulated in Transcription
  misc_feature: MA Experiment 108535 PARAMETER Experiment Name: Zm_Meristem_P Parameter: Age (day) Value: 8
  misc_feature: MA Experiment 108535 PARAMETER Experiment Name: Zm_Meristem_P Parameter: Organism Value: Zea mays
  misc_feature: MA Experiment 108535 PARAMETER Experiment Name: Zm_Meristem_P Parameter: Plant Line Value: 35A19
  misc_feature: MA Experiment 108535 PARAMETER Experiment Name: Zm_Meristem_P Parameter: Tissue Value: Root Meristem vs. Above Root Meristem
  misc_feature: MA Experiment ID: 108544 Result: Down-regulated in Transcription
aacttggccccaaatcgtggagtggaaaccctactcgtccccttccgcatcgccgcccaattcccccacccaattcccactctccgctcgacagatccatacatgatgggagaggccaaggagaacgacgtttatgaggaggagctcctggactacgaggaggacgacgacaagacggtcgatggctccgctgctaagcccaccggagaggtcgcaaagaagggctacgtcgggatccacagttccggtttcagagacttcctgctcaagccagagctgctccgtgctatccaggattgtggttttgagcatccttccgaagtgcaacacgagtgtatccctcaagccattcttggaatggatgtcatctgtcaagctaaatctgggatggggaaaactgctgtttttgtcctttcatccctccaacaaattgaccctgttgcgggtcaggtagcagcacttgtactgtgccacacaagggaactggcttatcagatatgccacgaatttgagaggttcagcaaatatcttactgaagttaaagttgctgtcttctatggaggtgttcacatcaggaagcataaagatttgttgaagaatgaatgccctcatattgtggttggcacgcctggtaggatacttgctcttgccagggataaggatctctccttgaagaatgtgaggcacttcattcttgatgaatgtgacaaaatgctggaatcacttgacatgcggagagatgttcaggagatcttcaaaatgactcctcatgataagcaagtcatgatgttttcagcaacgctcagcaaggagatccgtcctgtatgcaagaaatttatgcaagatccgatggaaatatatgttgatgatgaggcaaagttgaccctccatggtcttgtacagcactatataaaacttagcgaggcagagaagaaccggaaactgaatgatctcttggacgctcttgatttcaaccaagttgtgatattcgtgaagagtgttagcagagctgccgaactgaataagttactttgtgaatgcaacttcccatcaatctgcattcattctggaatgactcaggaagaaaggctaacaagatataagaacttcaaggaaggccacaagaaaattcttgtggctacagatttagttggcaggggcattgacattgagcgtgtcaacattgtgataaactatgacatgccagactcagctgatacttatttgcacagggttggaagggctggacgttttggcacgaagggacttgcaattacctttgtttcctctgcttcggattctgatgttcttaaccaggtgcaagaaaggtttgaggtagacataaaggaactgcctgagcaaattgacacctcgacctacatgccatcataaatgggaaggacaactgagaagagaggaggataggggagtgagcagccgtctggagatggttacctttgaactatccgatctggaggatttgatttgcctcctttgtgtactttaaaaagggcagccaggatgatgatctgtattttaagacaatgctgtctgtttgggtttaggattttgctttgtcgaaaactagcacacttattgtactactgagcagcatatttgtttt

SEQ ID NO: 2966 - protein, 463 aa, Zea mays subsp. mays
  peptide (1)..(463): Ceres Seq. ID no. 13492682
  misc_feature (95)..(302): Pfam Name: DEAD/DEAH box helicase Pfam Description: DEAD/DEAH box helicase
  misc_feature (41)..(282): Homolog of NCBI NO: 21040373 NR Description: DEAD/H (Asp-Glu-Ala-Asp/His) box polypeptide 39
  misc_feature (41)..(461): Homolog of NCBI NO: 4758112 NR Description: HLA-B associated transcript 1
  misc_feature (41)..(461): Homolog of NCBI NO: 28278325 NR Description: Unknown (protein for MGC:55433) [Danio rerio]
  misc_feature (120)..(463): Homolog of NCBI NO: 30683509 NR Description: DEAD/DEAH box helicase, putative [Arabidopsis
  misc_feature (36)..(439): Homolog of NCBI NO: 34913868 NR Description: putative DEAD BOX RNA helicase
  misc_feature (36)..(460): Homolog of NCBI NO: 8953379 NR Description: DEAD BOX RNA helicase RH15-like protein
  misc_feature (36)..(460): Homolog of NCBI NO: 8953382 NR Description: DEAD BOX RNA helicase RH15 [Arabidopsis thaliana]
  misc_feature (15)..(463): Homolog of NCBI NO: 11358797 NR Description: RNA helicase RH15 [imported] - Arabidopsis
  misc_feature (36)..(463): Homolog of NCBI NO: 18416486 NR Description: DEAD/DEAH box helicase, putative [Arabidopsis
  misc_feature (36)..(463): Homolog of NCBI NO: 18416493 NR Description: DEAD/DEAH box helicase, putative [Arabidopsis
NLAPNRGVETLLVPFRIAAQFPHPIPTLRSTDPYMMGEAKENDVYEEELLDYEEDDDKTVDGSAAKPTGEVAKKGYVGIHSSGFRDFLLKPELLRAIQDCGFEHPSEVQHECIPQAILGMDVICQAKSGMGKTAVFVLSSLQQIDPVAGQVAALVLCHTRELAYQICHEFERFSKYLTEVKVAVFYGGVHIRKHKDLLKNECPHIVVGTPGRILALARDKDLSLKNVRHFILDECDKMLESLDMRRDVQEIFKMTPHDKQVMMFSATLSKEIRPVCKKFMQDPMEIYVDDEAKLTLHGLVQHYIKLSEAEKNRKLNDLLDALDFNQVVIFVKSVSRAAELNKLLCECNFPSICIHSGMTQEERLTRYKNFKEGHKKILVATDLVGRGIDIERVNIVINYDMPDSADTYLHRVGRAGRFGTKGLAITFVSSASDSDVLNQVQERFEVDIKELPEQIDTSTYMPS

SEQ ID NO: 2967 - protein, 429 aa, Zea mays subsp. mays
  peptide (1)..(429): Ceres Seq. ID no. 13492683
  misc_feature (61)..(268): Pfam Name: DEAD/DEAH box helicase Pfam Description: DEAD/DEAH box helicase
  misc_feature (7)..(248): Homolog of NCBI NO: 21040373 NR Description: DEAD/H (Asp-Glu-Ala-Asp/His) box polypeptide 39
  misc_feature (7)..(427): Homolog of NCBI NO: 4758112 NR Description: HLA-B associated transcript 1
  misc_feature (7)..(427): Homolog of NCBI NO: 28278325 NR Description: Unknown (protein for MGC:55433) [Danio rerio]
  misc_feature (86)..(429): Homolog of NCBI NO: 30683509 NR Description: DEAD/DEAH box helicase, putative [Arabidopsis
  misc_feature (2)..(405): Homolog of NCBI NO: 34913868 NR Description: putative DEAD BOX RNA helicase
  misc_feature (2)..(426): Homolog of NCBI NO: 8953379 NR Description: DEAD BOX RNA helicase RH15-like protein
  misc_feature (2)..(426): Homolog of NCBI NO: 8953382 NR Description: DEAD BOX RNA helicase RH15 [Arabidopsis thaliana]
  misc_feature (1)..(429): Homolog of NCBI NO: 11358797 NR Description: RNA helicase RH15 [imported] - Arabidopsis
  misc_feature (2)..(429): Homolog of NCBI NO: 18416486 NR Description: DEAD/DEAH box helicase, putative [Arabidopsis
  misc_feature (2)..(429): Homolog of NCBI NO: 18416493 NR Description: DEAD/DEAH box helicase, putative [Arabidopsis
MMGEAKENDVYEEELLDYEEDDDKTVDGSAAKPTGEVAKKGYVGIHSSGFRDFLLKPELLRAIQDCGFEHPSEVQHECIPQAILGMDVICQAKSGMGKTAVFVLSSLQQIDPVAGQVAALVLCHTRELAYQICHEFERFSKYLTEVKVAVFYGGVHIRKHKDLLKNECPHIVVGTPGRILALARDKDLSLKNVRHFILDECDKMLESLDMRRDVQEIFKMTPHDKQVMMFSATLSKEIRPVCKKFMQDPMEIYVDDEAKLTLHGLVQHYIKLSEAEKNRKLNDLLDALDFNQVVIFVKSVSRAAELNKLLCECNFPSICIHSGMTQEERLTRYKNFKEGHKKILVATDLVGRGIDIERVNIVINYDMPDSADTYLHRVGRAGRFGTKGLAITFVSSASDSDVLNQVQERFEVDIKELPEQIDTSTYMPS

SEQ ID NO: 2968 - protein, 428 aa, Zea mays subsp. mays
  peptide (1)..(428): Ceres Seq. ID no. 13492684
  misc_feature (60)..(267): Pfam Name: DEAD/DEAH box helicase Pfam Description: DEAD/DEAH box helicase
  misc_feature (6)..(247): Homolog of NCBI NO: 21040373 NR Description: DEAD/H (Asp-Glu-Ala-Asp/His) box polypeptide 39
  misc_feature (6)..(426): Homolog of NCBI NO: 4758112 NR Description: HLA-B associated transcript 1
  misc_feature (6)..(426): Homolog of NCBI NO: 28278325 NR Description: Unknown (protein for MGC:55433) [Danio rerio]
  misc_feature (85)..(428): Homolog of NCBI NO: 30683509 NR Description: DEAD/DEAH box helicase, putative [Arabidopsis
  misc_feature (1)..(404): Homolog of NCBI NO: 34913868 NR Description: putative DEAD BOX RNA helicase
  misc_feature (1)..(425): Homolog of NCBI NO: 8953379 NR Description: DEAD BOX RNA helicase RH15-like protein
  misc_feature (1)..(425): Homolog of NCBI NO: 8953382 NR Description: DEAD BOX RNA helicase RH15 [Arabidopsis thaliana]
  misc_feature (1)..(428): Homolog of NCBI NO: 11358797 NR Description: RNA helicase RH15 [imported] - Arabidopsis
  misc_feature (1)..(428): Homolog of NCBI NO: 18416486 NR Description: DEAD/DEAH box helicase, putative [Arabidopsis
  misc_feature (1)..(428): Homolog of NCBI NO: 18416493 NR Description: DEAD/DEAH box helicase, putative [Arabidopsis
MGEAKENDVYEEELLDYEEDDDKTVDGSAAKPTGEVAKKGYVGIHSSGFRDFLLKPELLRAIQDCGFEHPSEVQHECIPQAILGMDVICQAKSGMGKTAVFVLSSLQQIDPVAGQVAALVLCHTRELAYQICHEFERFSKYLTEVKVAVFYGGVHIRKHKDLLKNECPHIVVGTPGRILALARDKDLSLKNVRHFILDECDKMLESLDMRRDVQEIFKMTPHDKQVMMFSATLSKEIRPVCKKFMQDPMEIYVDDEAKLTLHGLVQHYIKLSEAEKNRKLNDLLDALDFNQVVIFVKSVSRAAELNKLLCECNFPSICIHSGMTQEERLTRYKNFKEGHKKILVATDLVGRGIDIERVNIVINYDMPDSADTYLHRVGRAGRFGTKGLAITFVSSASDSDVLNQVQERFEVDIKELPEQIDTSTYMPS

SEQ ID NO: 2969 - DNA, 1748 bp, Zea mays subsp. mays
  misc_feature (1)..(1748): Ceres Seq. ID no. 12384166
  misc_feature: MA Experiment ID: 108527 Result: Up-regulated in Transcription
  misc_feature: MA Experiment 108527 PARAMETER Experiment Name: Zm_5mM_NO_P Parameter: Age (day) Value: 8
  misc_feature: MA Experiment 108527 PARAMETER Experiment Name: Zm_5mM_NO_P Parameter: Organism Value: Zea mays
  misc_feature: MA Experiment 108527 PARAMETER Experiment Name: Zm_5mM_NO_P Parameter: Plant Line Value: 35A19
  misc_feature: MA Experiment 108527 PARAMETER Experiment Name: Zm_5mM_NO_P Parameter: Timepoint (hr) Value: 6
  misc_feature: MA Experiment 108527 PARAMETER Experiment Name: Zm_5mM_NO_P Parameter: Tissue Value: Aerial
  misc_feature: MA Experiment 108527 PARAMETER Experiment Name: Zm_5mM_NO_P Parameter: Treatment Value: 5mM NO vs. No Treatment
  misc_feature: MA Experiment ID: 108535 Result: Down-regulated in Transcription
  misc_feature: MA Experiment 108535 PARAMETER Experiment Name: Zm_Meristem_P Parameter: Age (day) Value: 8
  misc_feature: MA Experiment 108535 PARAMETER Experiment Name: Zm_Meristem_P Parameter: Organism Value: Zea mays
  misc_feature: MA Experiment 108535 PARAMETER Experiment Name: Zm_Meristem_P Parameter: Plant Line Value: 35A19
  misc_feature: MA Experiment 108535 PARAMETER Experiment Name: Zm_Meristem_P Parameter: Tissue Value: Root Meristem vs. Above Root Meristem
  misc_feature: MA Experiment ID: 20000480 Result: Down-regulated in Transcription
  misc_feature: MA Experiment 20000480 PARAMETER Experiment Name: Zm_Drought_P Parameter: Age (day) Value: 11
  misc_feature: MA Experiment 20000480 PARAMETER Experiment Name: Zm_Drought_P Parameter: Organism Value: Zea mays
  misc_feature: MA Experiment 20000480 PARAMETER Experiment Name: Zm_Drought_P Parameter: Plant Line Value: 35A19
  misc_feature: MA Experiment 20000480 PARAMETER Experiment Name: Zm_Drought_P Parameter: Timepoint (hr) Value: 72
  misc_feature: MA Experiment 20000480 PARAMETER Experiment Name: Zm_Drought_P Parameter: Tissue Value: Aerial
  misc_feature: MA Experiment 20000480 PARAMETER Experiment Name: Zm_Drought_P Parameter: Treatment Value: Drought vs. No Drought
  misc_feature: MA Experiment ID: 20000534 Result: Down-regulated in Transcription
  misc_feature: MA Experiment 20000534 PARAMETER Experiment Name: Zm_Hybrid_Pollen_P Parameter: Age (day) Value: 8
  misc_feature: MA Experiment 20000534 PARAMETER Experiment Name: Zm_Hybrid_Pollen_P Parameter: Organism Value: Zea mays
  misc_feature: MA Experiment 20000534 PARAMETER Experiment Name: Zm_Hybrid_Pollen_P Parameter: Plant Line Value: 35A19
  misc_feature: MA Experiment 20000534 PARAMETER Experiment Name: Zm_Hybrid_Pollen_P Parameter: Tissue Value: Pollen vs. Aerial
attgcgctgcactgctcccacacgctcggattcctgctcgctttctcctcccacgattccatcgccagccgccccttttcccttcctttttcccttgctcgcccgcccgcccgcccaggactcgtccttcgcgcttcttcgccagctcgtccttcgcgcttcttcgccagccgtcggcgagagagggtgagaggatcctacgtgccttgtacgctcgctcgggagccggccgggatcgcgccgcgccaccgtaccccgccccggacatgtgcgtggaggggctggacgacgcagcagggaggctcggcttcggagaccaggagaccgacaggcgcgccggtgatgcgatggagagagtttgtgagaacacagtggctgttgacttcaagcagactaagctgaacaactttgtgccattcatccggtcaggggaatggtctgatattggaggtcgcgattacatggaagatgcccatgtgtgcatctctgatctggcaaagaattttggctatgactcagtcgaagatgaagtaatttctttctatggggtgtttgatggccataatggcaaagatgctgctcattatgtccgtgataacttgccacgggtcatcgtggaagacgctgattttcctcttgagcttgaaaaggtagtaaagaggtcatttgtgcaaactgatagtaagtttgcagagaaattctctcaccacaggggactttcttctggaacgacagcacttacagcaatgatttttggaaggtcccttctggttgcgaatgccggtgactgcagagcggtgctctcgcggcgtggcactgccattgagatgtccaaggaccacaggccttgctgcatgaatgaaaggaagcgcgtagagtcacttggcggctacgttgacgacggttacctgaacggtcagctggcagtgaccagagcgctcggtgactggcatctggagggcatgaaagaggtgggcgagccaggagggcccctgagcgccgaaccagagctgaagatggtcacgctgacgaaggacgacgagttcctgataatcggcagcgacggcatctgggacttcttctcgagccagaacgccgtggacttcgcgcggcggaggctccaggaccacaacgacctgaggctgtgctgcagggagatcgtggacgaggcggtgcggcggggcgccagcgacaacttgacggcggtgatggtctcgttccactcggacgcccctcccccgagccgtgccaacaagaggaccggcagggtcacgcggagcatatcggctgaggggcttcacagcctcagagtgctcctggaaggccagtgacgtcgcccggcggcgccattgctgcccgttcgtccctgatgctgtgctacgttgctgatgaggtgttaactgtaagtagcggtttccggtatcttggtgcttgctcttcttcttccgctgagggcgggcgactattcttgtccttcctccgacaataaaccaacgagcctgagatctcactgtgagacgctgtaaataagcaaatatggaagttggagctcgtcattaaggacgagttagcggtgtgcatccagggggcttttgtggctcagtatgtgatgccttttcgcccctcctgattttctgtaaataaaacgatgctgggagccatcggtgtgattgaactagtgttctgttatgcgtgctccccatcgattcaagacctacagtttttatttactactagtacaagtcttt

SEQ ID NO: 2970 - protein, 442 aa, Zea mays subsp. mays
  peptide (1)..(442): Ceres Seq. ID no. 12384167
  misc_feature (140)..(399): Pfam Name: Protein phosphatase 2C Pfam Description: Protein phosphatase 2C
  misc_feature (91)..(440): Homolog of NCBI NO: 34894410 NR Description: putative protein phosphatase
  misc_feature (117)..(441): Homolog of NCBI NO: 25352221 NR Description: phosphoprotein phosphatase (EC 3.1.3.16) 2C
  misc_feature (134)..(439): Homolog of NCBI NO: 15230495 NR Description: protein phosphatase 2C (PP2C); protein id:
  misc_feature (136)..(440): Homolog of NCBI NO: 10140768 NR Description: putative protein phosphatase-2C [Oryza sativa]
  misc_feature (134)..(441): Homolog of NCBI NO: 15226152 NR Description: protein phosphatase 2C (PP2C)
  misc_feature (53)..(440): Homolog of NCBI NO: 37536524 NR Description: putative protein phosphatase-2C
  misc_feature (134)..(441): Homolog of NCBI NO: 15224766 NR Description: protein phosphatase 2C (PP2C)
  misc_feature (134)..(441): Homolog of NCBI NO: 20146108 NR Description: protein phosphatase 2C [Mesembryanthemum
  misc_feature (116)..(441): Homolog of NCBI NO: 21693562 NR Description: DNA-binding protein phosphatase 2C [Nicotiana
  misc_feature (71)..(442): Homolog of NCBI NO: 24413992 NR Description: putative DNA-binding protein phosphatase 2C
CAALLPHARIPARFLLPRFHRQPPLFPSFFPCSPARPPRTRPSRFFASSSFALLRQPSAREGERILRALYARSGAGRDRAAPPYPAPDMCVEGLDDAAGRLGFGDQETDRRAGDAMERVCENTVAVDFKQTKLNNFVPFIRSGEWSDIGGRDYMEDAHVCISDLAKNFGYDSVEDEVISFYGVFDGHNGKDAAHYVRDNLPRVIVEDADFPLELEKVVKRSFVQTDSKFAEKFSHHRGLSSGTTALTAMIFGRSLLVANAGDCRAVLSRRGTAIEMSKDHRPCCMNERKRVESLGGYVDDGYLNGQLAVTRALGDWHLEGMKEVGEPGGPLSAEPELKMVTLTKDDEFLIIGSDGIWDFFSSQNAVDFARRRLQDHNDLRLCCREIVDEAVRRGASDNLTAVMVSFHSDAPPPSRANKRTGRVTRSISAEGLHSLRVLLEGQ

SEQ ID NO: 2971 - protein, 354 aa, Zea mays subsp. mays
  peptide (1)..(354): Ceres Seq. ID no. 12384168
  misc_feature (52)..(311): Pfam Name: Protein phosphatase 2C Pfam Description: Protein phosphatase 2C
  misc_feature (3)..(352): Homolog of NCBI NO: 34894410 NR Description: putative protein phosphatase
  misc_feature (29)..(353): Homolog of NCBI NO: 25352221 NR Description: phosphoprotein phosphatase (EC 3.1.3.16) 2C
  misc_feature (46)..(351): Homolog of NCBI NO: 15230495 NR Description: protein phosphatase 2C (PP2C); protein id:
  misc_feature (48)..(352): Homolog of NCBI NO: 10140768 NR Description: putative protein phosphatase-2C [Oryza sativa]
  misc_feature (46)..(353): Homolog of NCBI NO: 15226152 NR Description: protein phosphatase 2C (PP2C)
  misc_feature (1)..(352): Homolog of NCBI NO: 37536524 NR Description: putative protein phosphatase-2C
  misc_feature (46)..(353): Homolog of NCBI NO: 15224766 NR Description: protein phosphatase 2C (PP2C)
  misc_feature (46)..(353): Homolog of NCBI NO: 20146108 NR Description: protein phosphatase 2C [Mesembryanthemum
  misc_feature (28)..(353): Homolog of NCBI NO: 21693562 NR Description: DNA-binding protein phosphatase 2C [Nicotiana
  misc_feature (1)..(354): Homolog of NCBI NO: 24413992 NR Description: putative DNA-binding protein phosphatase 2C
MCVEGLDDAAGRLGFGDQETDRRAGDAMERVCENTVAVDFKQTKLNNFVPFIRSGEWSDIGGRDYMEDAHVCISDLAKNFGYDSVEDEVISFYGVFDGHNGKDAAHYVRDNLPRVIVEDADFPLELEKVVKRSFVQTDSKFAEKFSHHRGLSSGTTALTAMIFGRSLLVANAGDCRAVLSRRGTAIEMSKDHRPCCMNERKRVESLGGYVDDGYLNGQLAVTRALGDWHLEGMKEVGEPGGPLSAEPELKMVTLTKDDEFLIIGSDGIWDFFSSQNAVDFARRRLQDHNDLRLCCREIVDEAVRRGASDNLTAVMVSFHSDAPPPSRANKRTGRVTRSISAEGLHSLRVLLEGQ

SEQ ID NO: 2972 - protein, 327 aa, Zea mays subsp. mays
  peptide (1)..(327): Ceres Seq. ID no. 12384169
  misc_feature (25)..(284): Pfam Name: Protein phosphatase 2C Pfam Description: Protein phosphatase 2C
  misc_feature (1)..(325): Homolog of NCBI NO: 34894410 NR Description: putative protein phosphatase
  misc_feature (2)..(326): Homolog of NCBI NO: 25352221 NR Description: phosphoprotein phosphatase (EC 3.1.3.16) 2C
  misc_feature (19)..(324): Homolog of NCBI NO: 15230495 NR Description: protein phosphatase 2C (PP2C); protein id:
  misc_feature (21)..(325): Homolog of NCBI NO: 10140768 NR Description: putative protein phosphatase-2C [Oryza sativa]
  misc_feature (19)..(326): Homolog of NCBI NO: 15226152 NR Description: protein phosphatase 2C (PP2C)
  misc_feature (1)..(325): Homolog of NCBI NO: 37536524 NR Description: putative protein phosphatase-2C
  misc_feature (19)..(326): Homolog of NCBI NO: 15224766 NR Description: protein phosphatase 2C (PP2C)
  misc_feature (19)..(326): Homolog of NCBI NO: 20146108 NR Description: protein phosphatase 2C [Mesembryanthemum
  misc_feature (1)..(326): Homolog of NCBI NO: 21693562 NR Description: DNA-binding protein phosphatase 2C [Nicotiana
  misc_feature (1)..(327): Homolog of NCBI NO: 24413992 NR Description: putative DNA-binding protein phosphatase 2C
MERVCENTVAVDFKQTKLNNFVPFIRSGEWSDIGGRDYMEDAHVCISDLAKNFGYDSVEDEVISFYGVFDGHNGKDAAHYVRDNLPRVIVEDADFPLELEKVVKRSFVQTDSKFAEKFSHHRGLSSGTTALTAMIFGRSLLVANAGDCRAVLSRRGTAIEMSKDHRPCCMNERKRVESLGGYVDDGYLNGQLAVTRALGDWHLEGMKEVGEPGGPLSAEPELKMVTLTKDDEFLIIGSDGIWDFFSSQNAVDFARRRLQDHNDLRLCCREIVDEAVRRGASDNLTAVMVSFHSDAPPPSRANKRTGRVTRSISAEGLHSLRVLLEGQ

SEQ ID NO: 2973 - DNA, 1613 bp, Zea mays subsp. mays
  misc_feature (1)..(1613): Ceres Seq. ID no. 12408053
  misc_feature: MA Experiment ID: 108523 Result: Down-regulated in Transcription
  misc_feature: MA Experiment 108523 PARAMETER Experiment Name: Zm_42deg_Heat_P Parameter: Age (day) Value: 8
  misc_feature: MA Experiment 108523 PARAMETER Experiment Name: Zm_42deg_Heat_P Parameter: Organism Value: Zea mays
  misc_feature: MA Experiment 108523 PARAMETER Experiment Name: Zm_42deg_Heat_P Parameter: Plant Line Value: 35A19
  misc_feature: MA Experiment 108523 PARAMETER Experiment Name: Zm_42deg_Heat_P Parameter: Temperature (deg C) Value: 42 vs. 22
  misc_feature: MA Experiment 108523 PARAMETER Experiment Name: Zm_42deg_Heat_P Parameter: Timepoint (hr) Value: 6
  misc_feature: MA Experiment 108523 PARAMETER Experiment Name: Zm_42deg_Heat_P Parameter: Tissue Value: Aerial
  misc_feature: MA Experiment ID: 108528 Result: Up-regulated in Transcription
  misc_feature: MA Experiment 108528 PARAMETER Experiment Name: Zm_Imbibed_Seeds_P Parameter: Age (day) Value: 5 vs. 2
  misc_feature: MA Experiment 108528 PARAMETER Experiment Name: Zm_Imbibed_Seeds_P Parameter: Organism Value: Zea mays
  misc_feature: MA Experiment 108528 PARAMETER Experiment Name: Zm_Imbibed_Seeds_P Parameter: Plant Line Value: 35A19
  misc_feature: MA Experiment 108528 PARAMETER Experiment Name: Zm_Imbibed_Seeds_P Parameter: Tissue Value: Aerial vs. Embryo
  misc_feature: MA Experiment ID: 108529 Result: Down-regulated in Transcription
  misc_feature: MA Experiment 108529 PARAMETER Experiment Name: Zm_Imbibed_Seeds_P Parameter: Age (day) Value: 5 vs. 2
  misc_feature: MA Experiment 108529 PARAMETER Experiment Name: Zm_Imbibed_Seeds_P Parameter: Organism Value: Zea mays
  misc_feature: MA Experiment 108529 PARAMETER Experiment Name: Zm_Imbibed_Seeds_P Parameter: Plant Line Value: 35A19
  misc_feature: MA Experiment 108529 PARAMETER Experiment Name: Zm_Imbibed_Seeds_P Parameter: Tissue Value: Roots vs. Embryo
  misc_feature: MA Experiment ID: 108530 Result: Up-regulated in Transcription
  misc_feature: MA Experiment 108530 PARAMETER Experiment Name: Zm_Imbibed_Seeds_P Parameter: Age (day) Value: 6 vs. 2
  misc_feature: MA Experiment 108530 PARAMETER Experiment Name: Zm_Imbibed_Seeds_P Parameter: Organism Value: Zea mays
  misc_feature: MA Experiment 108530 PARAMETER Experiment Name: Zm_Imbibed_Seeds_P Parameter: Plant Line Value: 35A19
  misc_feature: MA Experiment 108530 PARAMETER Experiment Name: Zm_Imbibed_Seeds_P Parameter: Tissue Value: Aerial vs. Embryo
  misc_feature: MA Experiment ID: 108543 Result: Up-regulated in Transcription
  misc_feature: MA Experiment ID: 108544 Result: Up-regulated in Transcription
  misc_feature: MA Experiment ID: 108545 Result: Up-regulated in Transcription
  misc_feature: MA Experiment 108545 PARAMETER Experiment Name: Zm_Imbibed_Seeds_P Parameter: Age (day) Value: 3 vs. 2
  misc_feature: MA Experiment 108545 PARAMETER Experiment Name: Zm_Imbibed_Seeds_P Parameter: Organism Value: Zea mays
  misc_feature: MA Experiment 108545 PARAMETER Experiment Name: Zm_Imbibed_Seeds_P Parameter: Plant Line Value: 35A19
  misc_feature: MA Experiment 108545 PARAMETER Experiment Name: Zm_Imbibed_Seeds_P Parameter: Tissue Value: Aerial vs. Embryo
  misc_feature: MA Experiment ID: 108546 Result: Down-regulated in Transcription
  misc_feature: MA Experiment 108546 PARAMETER Experiment Name: Zm_Imbibed_Seeds_P Parameter: Age (day) Value: 3 vs. 2
  misc_feature: MA Experiment 108546 PARAMETER Experiment Name: Zm_Imbibed_Seeds_P Parameter: Organism Value: Zea mays
  misc_feature: MA Experiment 108546 PARAMETER Experiment Name: Zm_Imbibed_Seeds_P Parameter: Plant Line Value: 35A19
  misc_feature: MA Experiment 108546 PARAMETER Experiment Name: Zm_Imbibed_Seeds_P Parameter: Tissue Value: Roots vs. Embryo
  misc_feature: MA Experiment ID: 108547 Result: Up-regulated in Transcription
  misc_feature: MA Experiment 108547 PARAMETER Experiment Name: Zm_Imbibed_Seeds_P Parameter: Age (day) Value: 4 vs. 2
  misc_feature: MA Experiment 108547 PARAMETER Experiment Name: Zm_Imbibed_Seeds_P Parameter: Organism Value: Zea mays
  misc_feature: MA Experiment 108547 PARAMETER Experiment Name: Zm_Imbibed_Seeds_P Parameter: Plant Line Value: 35A19
  misc_feature: MA Experiment 108547 PARAMETER Experiment Name: Zm_Imbibed_Seeds_P Parameter: Tissue Value: Aerial vs. Embryo
  misc_feature: MA Experiment ID: 20000479 Result: Down-regulated in Transcription
  misc_feature: MA Experiment 20000479 PARAMETER Experiment Name: Zm_Drought_P Parameter: Age (day) Value: 10
  misc_feature: MA Experiment 20000479 PARAMETER Experiment Name: Zm_Drought_P Parameter: Organism Value: Zea mays
  misc_feature: MA Experiment 20000479 PARAMETER Experiment Name: Zm_Drought_P Parameter: Plant Line Value: 35A19
  misc_feature: MA Experiment 20000479 PARAMETER Experiment Name: Zm_Drought_P Parameter: Timepoint (hr) Value: 48
  misc_feature: MA Experiment 20000479 PARAMETER Experiment Name: Zm_Drought_P Parameter: Tissue Value: Aerial
  misc_feature: MA Experiment 20000479 PARAMETER Experiment Name: Zm_Drought_P Parameter: Treatment Value: Drought vs. No Drought
  misc_feature: MA Experiment ID: 20000480 Result: Down-regulated in Transcription
  misc_feature: MA Experiment 20000480 PARAMETER Experiment Name: Zm_Drought_P Parameter: Age (day) Value: 11
  misc_feature: MA Experiment 20000480 PARAMETER Experiment Name: Zm_Drought_P Parameter: Organism Value: Zea mays
  misc_feature: MA Experiment 20000480 PARAMETER Experiment Name: Zm_Drought_P Parameter: Plant Line Value: 35A19
  misc_feature: MA Experiment 20000480 PARAMETER Experiment Name: Zm_Drought_P Parameter: Timepoint (hr) Value: 72
  misc_feature: MA Experiment 20000480 PARAMETER Experiment Name: Zm_Drought_P Parameter: Tissue Value: Aerial
  misc_feature: MA Experiment 20000480 PARAMETER Experiment Name: Zm_Drought_P Parameter: Treatment Value: Drought vs. No Drought
  misc_feature: MA Experiment ID: 20000487 Result: Down-regulated in Transcription
  misc_feature: MA Experiment 20000487 PARAMETER Experiment Name: Zm_50mM_NH4NO3_L_to_H_P Parameter: Organism Value: Zea mays
  misc_feature: MA Experiment 20000487 PARAMETER Experiment Name: Zm_50mM_NH4NO3_L_to_H_P Parameter: Timepoint (hr) Value: 4
  misc_feature: MA Experiment 20000487 PARAMETER Experiment Name: Zm_50mM_NH4NO3_L_to_H_P Parameter: Tissue Value: Leaves
  misc_feature: MA Experiment 20000487 PARAMETER Experiment Name: Zm_50mM_NH4NO3_L_to_H_P Parameter: Treatment Value: 50mM NH4NO3 vs. 100mM Mannitol
  misc_feature: MA Experiment ID: 20000533 Result: Down-regulated in Transcription
  misc_feature: MA Experiment 20000533 PARAMETER Experiment Name: Zm_0.001percent_MeJA_P Parameter: Age (day) Value: 11
  misc_feature: MA Experiment 20000533 PARAMETER Experiment Name: Zm_0.001percent_MeJA_P Parameter: Organism Value: Zea mays
  misc_feature: MA Experiment 20000533 PARAMETER Experiment Name: Zm_0.001percent_MeJA_P Parameter: Plant Line Value: 35A19
  misc_feature: MA Experiment 20000533 PARAMETER Experiment Name: Zm_0.001percent_MeJA_P Parameter: Timepoint (hr) Value: 72
  misc_feature: MA Experiment 20000533 PARAMETER Experiment Name: Zm_0.001percent_MeJA_P Parameter: Tissue Value: Aerial
  misc_feature: MA Experiment 20000533 PARAMETER Experiment Name: Zm_0.001percent_MeJA_P Parameter: Treatment Value: 0.001percent MeJA vs. No Treatment
  misc_feature: MA Experiment ID: 20000535 Result: Down-regulated in Transcription
  misc_feature: MA Experiment 20000535 PARAMETER Experiment Name: Zm_Hybrid_Seed_Dev_P Parameter: DAP Value: 30 vs. 12
  misc_feature: MA Experiment 20000535 PARAMETER Experiment Name: Zm_Hybrid_Seed_Dev_P Parameter: Organism Value: Zea mays
  misc_feature: MA Experiment 20000535 PARAMETER Experiment Name: Zm_Hybrid_Seed_Dev_P Parameter: Plant Line Value: 35A19
  misc_feature: MA Experiment 20000535 PARAMETER Experiment Name: Zm_Hybrid_Seed_Dev_P Parameter: Tissue Value: Embryo vs. Unfert Floret
  misc_feature: MA Experiment ID: 20000626 Result: Down-regulated in Transcription
  misc_feature: MA Experiment 20000626 PARAMETER Experiment Name: Zm_Herbicide-Treatments_P Parameter: Timepoint (hr) Value: 12
  misc_feature: MA Experiment 20000626 PARAMETER Experiment Name: Zm_Herbicide-Treatments_P Parameter: Tissue Value: Aerial
  misc_feature: MA Experiment 20000626 PARAMETER Experiment Name: Zm_Herbicide-Treatments_P Parameter: Treatment Value: Roundup vs. No Treatment
acctggccgctccatctcgcgtccaacaatcaattcggcgtcgctctcgtctcatcagtcatcactccgcgactgcgagcgagcgagcgaggcccttccgcgccacgcgcaatggacgctgctctgctcgtgaccgtcctcgtccccgcggtggcggcgctcctcgtcctcgggtccggggccgcgtccgcctcgccgccgcgcgccttcttcgtgttcggggactccctcgtggacaacggcaacaacaactacctcatgaccacggcgcgggccgacgcgccgccctacgggatcgacttccccacgcacctgcccacggggcggttctcccaacgggctcaacatccccgacatcatcagcgagcacctcggctcccagcccgcgctgccgtacctcagccccgacctccgcggcgaccagctgctcgtcggcgccaacttcgcgtccgccggcgtcggcatcctcaacgacaccggcatacagttcgtgaacatcatcgggatcgggcagcagctgcacaacttccaggactaccagcagaggctggccgcgttcgtcggcgacgacgcggcgaggcaggtcgtgagcaatgcgctcgtcctcatcacgctcggcggcaacgacttcgtcaacaactactacctggtgcccttctccttccgctcccgccagttcgccatccaagactacgtcccgtacctcatctccgagtacaggaaaatcctcacgcggctgtacgagctcggggcccgtcgcgtggtggtgacgggcaccgggatgatcgggtgcgtgccggcggagctggccatgcacagcatcgacggcgagtgcgcgcgcgacctcacggaggcggccgacctcttcaacccgcagctggtgcagatgctctccgacctcaacgcggccatcggcggcgacgtcttcatcgccgccaacaccaaccgcctcagcttcgacttcatgttcaacccgcaggactacgggttcgtgacggccaaggtggcgtgctgcgggcagggcccgtacaacgggatcgggctgtgcacgccggcgtccaacgtgtgccccaaccgggacgtgtacgcgtactgggacgcgttccaccccacggagcgcgccaaccggatcatcgtcgcccagttcatgcacggctccaccgaccacatcagccccatgaacatcagcaccatcctcgccatggacaacaggggggactaactagtcccgccgcgtgctgcctccacccatctcgtcattggttggttcacgccaagaggttttgctgcattgcatgtgtcatggagctggtggataacaagttttcgttgcacctttttgtgatttattagatgacgtgaattagtggtgaattgagccttattagagtgggttaaattaatacagctgtcccaagtttctttgctccagcagattgtttggggacagggctagctaggaacttcagaaattgctaagcggtactacctagccagtccgtccgatcatttcaagaaaattctcttgcactttgtagtgtgatcctgaacttttgggtacaaggtaccgacgattcaatgccaatgtatattttggtggctggggcacagtg

SEQ ID NO: 2974 - protein, 450 aa, Zea mays subsp. mays
  peptide (1)..(450): Ceres Seq. ID no. 12408054
  misc_feature (38)..(111): Homolog of NCBI NO: 34910808 NR Description: GDSL-motif lipase/hydrolase-like protein
  misc_feature (69)..(111): Homolog of NCBI NO: 15227849 NR Description: putative GDSL-motif lipase/hydrolase
  misc_feature (42)..(117): Homolog of NCBI NO: 15238814 NR Description: putative protein; protein id: At5g18430.1
  misc_feature (40)..(117): Homolog of NCBI NO: 15235421 NR Description: Proline-rich APG - like protein
  misc_feature (40)..(117): Homolog of NCBI NO: 28071322 NR Description: P0705A05.30 [Oryza sativa (japonica
  misc_feature (68)..(117): Homolog of NCBI NO: 15242808 NR Description: putative protein
  misc_feature (50)..(127): Homolog of NCBI NO: 22758315 NR Description: putative early nodulin gene (Enod) related
  misc_feature (50)..(127): Homolog of NCBI NO: 37535146 NR Description: putative early nodulin gene (Enod) related
  misc_feature (68)..(128): Homolog of NCBI NO: 15229265 NR Description: putative GDSL-motif lipase/acylhydrolase
  misc_feature (38)..(117): Homolog of NCBI NO: 32489520 NR Description: OSJNBa0043L24.11 [Oryza sativa (japonica
TWPLHLASNNQFGVALVSSVITPRLRASERGPSAPRAMDAALLVTVLVPAVAALLVLGSGAASASPPRAFFVFGDSLVDNGNNNYLMTTARADAPPYGIDFPTHLPTGRFSQRAQHPRHHQRAPRLPARAAVPQPRPPRRPAARRRQLRVRRRRHPQRHRHTVREHHRDRAAAAQLPGLPAEAGRVRRRRRGEAGREQCARPHHARRQRLRQQLLPGALLLPLPPVRHPRLRPVPHLRVQENPHAAVRARGPSRGGDGHRDDRVRAGGAGHAQHRRRVRARPHGGGRPLQPAAGADALRPQRGHRRRRLHRRQHQPPQLRLHVQPAGLRVRDGQGGVLRAGPVQRDRAVHAGVQRVPQPGRVRVLGRVPPHGARQPDHRRPVHARLHRPHQPHEHQHHPRHGQQGGLTSPAACCLHPSRHWLVHAKRFCCIACVMELVDNKFSLHLFVIY

SEQ ID NO: 2975 - protein, 413 aa, Zea mays subsp. mays
  peptide (1)..(413): Ceres Seq. ID no. 12408055
  misc_feature (5)..(80): Homolog of NCBI NO: 15238814 NR Description: putative protein; protein id: At5g18430.1
  misc_feature (3)..(80): Homolog of NCBI NO: 15235421 NR Description: Proline-rich APG - like protein
  misc_feature (3)..(80): Homolog of NCBI NO: 28071322 NR Description: P0705A05.30 [Oryza sativa (japonica
  misc_feature (31)..(80): Homolog of NCBI NO: 15242808 NR Description: putative protein
  misc_feature (13)..(90): Homolog of NCBI NO: 22758315 NR Description: putative early nodulin gene (Enod) related
  misc_feature (13)..(90): Homolog of NCBI NO: 37535146 NR Description: putative early nodulin gene (Enod) related
  misc_feature (31)..(91): Homolog of NCBI NO: 15229265 NR Description: putative GDSL-motif lipase/acylhydrolase
  misc_feature (1)..(80): Homolog of NCBI NO: 32489520 NR Description: OSJNBa0043L24.11 [Oryza sativa (japonica
  misc_feature (1)..(74): Homolog of NCBI NO: 34910808 NR Description: GDSL-motif lipase/hydrolase-like protein
  misc_feature (32)..(74): Homolog of NCBI NO: 15227849 NR Description: putative GDSL-motif lipase/hydrolase
MDAALLVTVLVPAVAALLVLGSGAASASPPRAFFVFGDSLVDNGNNNYLMTTARADAPPYGIDFPTHLPTGRFSQRAQHPRHHQRAPRLPARAAVPQPRPPRRPAARRRQLRVRRRRHPQRHRHTVREHHRDRAAAAQLPGLPAEAGRVRRRRRGEAGREQCARPHHARRQRLRQQLLPGALLLPLPPVRHPRLRPVPHLRVQENPHAAVRARGPSRGGDGHRDDRVRAGGAGHAQHRRRVRARPHGGGRPLQPAAGADALRPQRGHRRRRLHRRQHQPPQLRLHVQPAGLRVRDGQGGVLRAGPVQRDRAVHAGVQRVPQPGRVRVLGRVPPHGARQPDHRRPVHARLHRPHQPHEHQHHPRHGQQGGLTSPAACCLHPSRHWLVHAKRFCCIACVMELVDNKFSLHLFVIY

SEQ ID NO: 2976 - protein, 364 aa, Zea mays subsp. mays
  peptide (1)..(364): Ceres Seq. ID no. 12408056
  misc_feature (1)..(25): Homolog of NCBI NO: 34910808 NR Description: GDSL-motif lipase/hydrolase-like protein
  misc_feature (1)..(25): Homolog of NCBI NO: 15227849 NR Description: putative GDSL-motif lipase/hydrolase
  misc_feature (1)..(31): Homolog of NCBI NO: 15238814 NR Description: putative protein; protein id: At5g18430.1
  misc_feature (1)..(31): Homolog of NCBI NO: 15235421 NR Description: Proline-rich APG - like protein
  misc_feature (1)..(31): Homolog of NCBI NO: 28071322 NR Description: P0705A05.30 [Oryza sativa (japonica
  misc_feature (1)..(31): Homolog of NCBI NO: 15242808 NR Description: putative protein
  misc_feature (1)..(41): Homolog of NCBI NO: 22758315 NR Description: putative early nodulin gene (Enod) related
  misc_feature (1)..(41): Homolog of NCBI NO: 37535146 NR Description: putative early nodulin gene (Enod) related
  misc_feature (1)..(42): Homolog of NCBI NO: 15229265 NR Description: putative GDSL-motif lipase/acylhydrolase
  misc_feature (1)..(31): Homolog of NCBI NO: 32489520 NR Description: OSJNBa0043L24.11 [Oryza sativa (japonica
MTTARADAPPYGIDFPTHLPTGRFSQRAQHPRHHQRAPRLPARAAVPQPRPPRRPAARRRQLRVRRRRHPQRHRHTVREHHRDRAAAAQLPGLPAEAGRVRRRRRGEAGREQCARPHHARRQRLRQQLLPGALLLPLPPVRHPRLRPVPHLRVQENPHAAVRARGPSRGGDGHRDDRVRAGGAGHAQHRRRVRARPHGGGRPLQPAAGADALRPQRGHRRRRLHRRQHQPPQLRLHVQPAGLRVRDGQGGVLRAGPVQRDRAVHAGVQRVPQPGRVRVLGRVPPHGARQPDHRRPVHARLHRPHQPHEHQHHPRHGQQGGLTSPAACCLHPSRHWLVHAKRFCCIACVMELVDNKFSLHLFVIY

SEQ ID NO: 2977 - DNA, 1467 bp, Zea mays subsp. mays
  misc_feature (1)..(1467): Ceres Seq. ID no. 12378238
  misc_feature: MA Experiment ID: 108535 Result: Up-regulated in Transcription
  misc_feature: MA Experiment 108535 PARAMETER Experiment Name: Zm_Meristem_P Parameter: Age (day) Value: 8
  misc_feature: MA Experiment 108535 PARAMETER Experiment Name: Zm_Meristem_P Parameter: Organism Value: Zea mays
  misc_feature: MA Experiment 108535 PARAMETER Experiment Name: Zm_Meristem_P Parameter: Plant Line Value: 35A19
  misc_feature: MA Experiment 108535 PARAMETER Experiment Name: Zm_Meristem_P Parameter: Tissue Value: Root Meristem vs. Above Root Meristem
  misc_feature: MA Experiment ID: 20000492 Result: Down-regulated in Transcription
  misc_feature: MA Experiment 20000492 PARAMETER Experiment Name: Zm_Hybrid_Seed_Dev_P Parameter: DAP Value: 12
  misc_feature: MA Experiment 20000492 PARAMETER Experiment Name: Zm_Hybrid_Seed_Dev_P Parameter: Organism Value: Zea mays
  misc_feature: MA Experiment 20000492 PARAMETER Experiment Name: Zm_Hybrid_Seed_Dev_P Parameter: Plant Line Value: 35A19
  misc_feature: MA Experiment 20000492 PARAMETER Experiment Name: Zm_Hybrid_Seed_Dev_P Parameter: Tissue Value: Fert Kernel vs. Unfert Floret
agcatagcagcagcccattgcctgcctttcgcctctctctctctctctctctctctctctcacacacacaaccactcacactgccggttggtttcccttccgttgtggttggtgcgtacttagtggcggccggccatggcgcggaggaggggcttctcggcggtggtgccgccggcgtggctgccggcggtgctcctgtgcctggcaggcgcggcgtcgggcgagccgctgccgcagtactacaatgccatcttcagcttcggcgactccttctccgacacgggcaacttcgtcatcatcaactcgggcaagctgcccaacatgcccaagttcccgccgccgtacgcgaggtgctccaacggccgcctcgtcatcgacttcctggccgaggcgttcggtctcccgctgctccctccgtcggcgaacaagggcaccaacttcagccagggcgccaacttcgcggtgatgggcgcgacggcgcttgacctcaagtacttcaaggacaacaacgtgtggagcatcccgcccttcaacacgtccatgggcgtgcagctggagtggttccaggaggtgaagcgcagcatctgccccgacgaccccgccgcgtgccgcgccctgttcgggagggccctgttcgtgttcggcgagttcggcggcaacgactacagcttcgcgtggaaggcggactggtcgctggagaaggtgaagacgatggtgccggcggtggtggcgtcgctggtgggcggcgtggagcggctgctggacgagggcgcccgccacgtcgtggtgccgggcaacctccccgccggatgcatccccatcacgctcaccatgtacccgtccgaggaccgctccgagtacgacccgcgcaccggctgcctcaagaagtacaacagcgtcgcgctctaccacaacgccatgctccgcgtcgcgctcgaccgcctgcagcgccgccgcccggagtcccgcgtcgtctacgccgactactacacgccctacatacagttcgcgcgcacaccgcacctctacggctacaagcgcggcgctctgcgggcttgctgcggcggcggcgggccgtacaactacaacgtgagcgcgtcgtgcgggctccccggcgccaccacctgcgaggaccccgacgcgcacgtcagctgggacggcatccacctcaccgaggcgccctaccgcttcatcgccaacacctgggtcaagggcccctacgcgcacccgccgctcgccaccgtcgtgctcgaggacatggtcgactgatcctcttgtggtttggcacaagggaagagctgatatgtaacgtgaattccattcgttcatgtccatgtatattgggtaactaccggagcggagtaacaaaaaaaaatatatatgttagtcttttctgtttttttttcgtcgtgcacctgtgtgccgtgcagtcgcatagatcaatgaagaaaccactccagctgtttg

SEQ ID NO: 2978 - protein, 377 aa, Zea mays subsp. mays
  peptide (1)..(377): Ceres Seq. ID no. 12378239
  misc_feature (39)..(357): Pfam Name: GDSL-like Lipase/Acylhydrolase Pfam Description: GDSL-like Lipase/Acylhydrolase
  misc_feature (39)..(357): Pfam Name: GDSL-like Lipase/Acylhydrolase Pfam Description: GDSL-like Lipase/Acylhydrolase
  misc_feature (38)..(351): Homolog of NCBI NO: 25404994 NR Description: protein T4O12.13 [imported] - Arabidopsis
  misc_feature (240)..(365): Homolog of NCBI NO: 15228721 NR Description: putative protein; protein id: At3g62280.1
  misc_feature (37)..(361): Homolog of NCBI NO: 15220995 NR Description: lipase, putative; protein id: At1g53940.1
  misc_feature (11)..(357): Homolog of NCBI NO: 7486138 NR Description: hypothetical protein F25I24.160 - Arabidopsis
  misc_feature (11)..(357): Homolog of NCBI NO: 7486718 NR Description: hypothetical protein F8M12.9 - Arabidopsis
  misc_feature (38)..(351): Homolog of NCBI NO: 25404994 NR Description: protein T4O12.13 [imported] - Arabidopsis
  misc_feature (37)..(361): Homolog of NCBI NO: 15220995 NR Description: lipase, putative; protein id: At1g53940.1
  misc_feature (11)..(357): Homolog of NCBI NO: 7486718 NR Description: hypothetical protein F8M12.9 - Arabidopsis
  misc_feature (24)..(371): Homolog of NCBI NO: 34903994 NR Description: unnamed protein product [Oryza sativa (japonica
  misc_feature (12)..(371): Homolog of NCBI NO: 34903996 NR Description: unnamed protein product [Oryza sativa (japonica
  misc_feature (19)..(371): Homolog of NCBI NO: 34903986 NR Description: unnamed protein product [Oryza sativa (japonica
  misc_feature (107)..(354): Homolog of NCBI NO: 15237586 NR Description: lipase -like protein; protein id: At5g03980.1
  misc_feature (78)..(361): Homolog of NCBI NO: 25405682 NR Description: hypothetical protein F15I1.7 [imported] -
  misc_feature (11)..(357): Homolog of NCBI NO: 7486138 NR Description: hypothetical protein F25I24.160 - Arabidopsis
  misc_feature (240)..(365): Homolog of NCBI NO: 15228721 NR Description: putative protein; protein id: At3g62280.1
  misc_feature (78)..(361): Homolog of NCBI NO: 25405682 NR Description: hypothetical protein F15I1.7 [imported] -
  misc_feature (107)..(354): Homolog of NCBI NO: 15237586 NR Description: lipase -like protein; protein id: At5g03980.1
  misc_feature (19)..(371): Homolog of NCBI NO: 34903986 NR Description: unnamed protein product [Oryza sativa (japonica
  misc_feature (12)..(371): Homolog of NCBI NO: 34903996 NR Description: unnamed protein product [Oryza sativa (japonica
  misc_feature (24)..(371): Homolog of NCBI NO: 34903994 NR Description: unnamed protein product [Oryza sativa (japonica
MARRRGFSAVVPPAWLPAVLLCLAGAASGEPLPQYYNAIFSFGDSFSDTGNFVIINSGKLPNMPKFPPPYARCSNGRLVIDFLAEAFGLPLLPPSANKGTNFSQGANFAVMGATALDLKYFKDNNVWSIPPFNTSMGVQLEWFQEVKRSICPDDPAACRALFGRALFVFGEFGGNDYSFAWKADWSLEKVKTMVPAVVASLVGGVERLLDEGARHVVVPGNLPAGCIPITLTMYPSEDRSEYDPRTGCLKKYNSVALYHNAMLRVALDRLQRRRPESRVVYADYYTPYIQFARTPHLYGYKRGALRACCGGGGPYNYNVSASCGLPGATTCEDPDAHVSWDGIHLTEAPYRFIANTWVKGPYAHPPLATVVLEDMVD

SEQ ID NO: 2979 - protein, 315 aa, Zea mays subsp. mays
  peptide (1)..(315): Ceres Seq. ID no. 12378240
  misc_feature (1)..(295): Pfam Name: GDSL-like Lipase/Acylhydrolase Pfam Description: GDSL-like Lipase/Acylhydrolase
  misc_feature (1)..(295): Pfam Name: GDSL-like Lipase/Acylhydrolase Pfam Description: GDSL-like Lipase/Acylhydrolase
  misc_feature (1)..(289): Homolog of NCBI NO: 25404994 NR Description: protein T4O12.13 [imported] - Arabidopsis
  misc_feature (178)..(303): Homolog of NCBI NO: 15228721 NR Description: putative protein; protein id: At3g62280.1
  misc_feature (1)..(299): Homolog of NCBI NO: 15220995 NR Description: lipase, putative; protein id: At1g53940.1
  misc_feature (1)..(295): Homolog of NCBI NO: 7486138 NR Description: hypothetical protein F25I24.160 - Arabidopsis
  misc_feature (1)..(295): Homolog of NCBI NO: 7486718 NR Description: hypothetical protein F8M12.9 - Arabidopsis
  misc_feature (1)..(289): Homolog of NCBI NO: 25404994 NR Description: protein T4O12.13 [imported] - Arabidopsis
  misc_feature (1)..(299): Homolog of NCBI NO: 15220995 NR Description: lipase, putative; protein id: At1g53940.1
  misc_feature (1)..(295): Homolog of NCBI NO: 7486718 NR Description: hypothetical protein F8M12.9 - Arabidopsis
  misc_feature (1)..(309): Homolog of NCBI NO: 34903994 NR Description: unnamed protein product [Oryza sativa (japonica
  misc_feature (1)..(309): Homolog of NCBI NO: 34903996 NR Description: unnamed protein product [Oryza sativa (japonica
  misc_feature (1)..(309): Homolog of NCBI NO: 34903986 NR Description: unnamed protein product [Oryza sativa (japonica
  misc_feature (45)..(292): Homolog of NCBI NO: 15237586 NR Description: lipase -like protein; protein id: At5g03980.1
  misc_feature (16)..(299): Homolog of NCBI NO: 25405682 NR Description: hypothetical protein F15I1.7 [imported] -
  misc_feature (1)..(295): Homolog of NCBI NO: 7486138 NR Description: hypothetical protein F25I24.160 - Arabidopsis
  misc_feature (178)..(303): Homolog of NCBI NO: 15228721 NR Description: putative protein; protein id: At3g62280.1
  misc_feature (16)..(299): Homolog of NCBI NO: 25405682 NR Description: hypothetical protein F15I1.7 [imported] -
  misc_feature (45)..(292): Homolog of NCBI NO: 15237586 NR Description: lipase -like protein; protein id: At5g03980.1
  misc_feature (1)..(309): Homolog of NCBI NO: 34903986 NR Description: unnamed protein product [Oryza sativa (japonica
  misc_feature (1)..(309): Homolog of NCBI NO: 34903996 NR Description: unnamed protein product [Oryza sativa (japonica
  misc_feature (1)..(309): Homolog of NCBI NO: 34903994 NR Description: unnamed protein product [Oryza sativa (japonica
MPKFPPPYARCSNGRLVIDFLAEAFGLPLLPPSANKGTNFSQGANFAVMGATALDLKYFKDNNVWSIPPFNTSMGVQLEWFQEVKRSICPDDPAACRALFGRALFVFGEFGGNDYSFAWKADWSLEKVKTMVPAVVASLVGGVERLLDEGARHVVVPGNLPAGCIPITLTMYPSEDRSEYDPRTGCLKKYNSVALYHNAMLRVALDRLQRRRPESRVVYADYYTPYIQFARTPHLYGYKRGALRACCGGGGPYNYNVSASCGLPGATTCEDPDAHVSWDGIHLTEAPYRFIANTWVKGPYAHPPLATVVLEDMVD

SEQ ID NO: 2980 - protein, 267 aa, Zea mays subsp. mays
  peptide (1)..(267): Ceres Seq. ID no. 12378241
  misc_feature (1)..(247): Pfam Name: GDSL-like Lipase/Acylhydrolase Pfam Description: GDSL-like Lipase/Acylhydrolase
  misc_feature (1)..(247): Pfam Name: GDSL-like Lipase/Acylhydrolase Pfam Description: GDSL-like Lipase/Acylhydrolase
  misc_feature (1)..(241): Homolog of NCBI NO: 25404994 NR Description: protein T4O12.13 [imported] - Arabidopsis
  misc_feature (130)..(255): Homolog of NCBI NO: 15228721 NR Description: putative protein; protein id: At3g62280.1
  misc_feature (1)..(251): Homolog of NCBI NO: 15220995 NR Description: lipase, putative; protein id: At1g53940.1
  misc_feature (1)..(247): Homolog of NCBI NO: 7486138 NR Description: hypothetical protein F25I24.160 - Arabidopsis
  misc_feature (1)..(247): Homolog of NCBI NO: 7486718 NR Description: hypothetical protein F8M12.9 - Arabidopsis
  misc_feature (1)..(241): Homolog of NCBI NO: 25404994 NR Description: protein T4O12.13 [imported] - Arabidopsis
  misc_feature (1)..(251): Homolog of NCBI NO: 15220995 NR Description: lipase, putative; protein id: At1g53940.1
  misc_feature (1)..(247): Homolog of NCBI NO: 7486718 NR Description: hypothetical protein F8M12.9 - Arabidopsis
  misc_feature (1)..(261): Homolog of NCBI NO: 34903994 NR Description: unnamed protein product [Oryza sativa (japonica
  misc_feature (1)..(261): Homolog of NCBI NO: 34903996 NR Description: unnamed protein product [Oryza sativa (japonica
  misc_feature (1)..(261): Homolog of NCBI NO: 34903986 NR Description: unnamed protein product [Oryza sativa (japonica
  misc_feature (1)..(244): Homolog of NCBI NO: 15237586 NR Description: lipase -like protein; protein id: At5g03980.1
  misc_feature (1)..(251): Homolog of NCBI NO: 25405682 NR Description: hypothetical protein F15I1.7 [imported] -
  misc_feature (1)..(247): Homolog of NCBI NO: 7486138 NR Description: hypothetical protein F25I24.160 - Arabidopsis
  misc_feature (130)..(255): Homolog of NCBI NO: 15228721 NR Description: putative protein; protein id: At3g62280.1
  misc_feature (1)..(251): Homolog of NCBI NO: 25405682 NR Description: hypothetical protein F15I1.7 [imported] -
  misc_feature (1)..(244): Homolog of NCBI NO: 15237586 NR Description: lipase -like protein; protein id: At5g03980.1
  misc_feature (1)..(261): Homolog of NCBI NO: 34903986 NR Description: unnamed protein product [Oryza sativa (japonica
  misc_feature (1)..(261): Homolog of NCBI NO: 34903996 NR Description: unnamed protein product [Oryza sativa (japonica
  misc_feature (1)..(261): Homolog of NCBI NO: 34903994 NR Description: unnamed protein product [Oryza sativa (japonica
MGATALDLKYFKDNNVWSIPPFNTSMGVQLEWFQEVKRSICPDDPAACRALFGRALFVFGEFGGNDYSFAWKADWSLEKVKTMVPAVVASLVGGVERLLDEGARHVVVPGNLPAGCIPITLTMYPSEDRSEYDPRTGCLKKYNSVALYHNAMLRVALDRLQRRRPESRVVYADYYTPYIQFARTPHLYGYKRGALRACCGGGGPYNYNVSASCGLPGATTCEDPDAHVSWDGIHLTEAPYRFIANTWVKGPYAHPPLATVVLEDMVD

SEQ ID NO: 2981 - DNA, 1532 bp, Zea mays subsp. mays
  misc_feature (1)..(1532): Ceres Seq. ID no. 12410481
  misc_feature: MA Experiment ID: 108522 Result: Up-regulated in Transcription
  misc_feature: MA Experiment 108522 PARAMETER Experiment Name: Zm_42deg_Heat_P Parameter: Age (day) Value: 8
  misc_feature: MA Experiment 108522 PARAMETER Experiment Name: Zm_42deg_Heat_P Parameter: Organism Value: Zea mays
  misc_feature: MA Experiment 108522 PARAMETER Experiment Name: Zm_42deg_Heat_P Parameter: Plant Line Value: 35A19
  misc_feature: MA Experiment 108522 PARAMETER Experiment Name: Zm_42deg_Heat_P Parameter: Temperature (deg C) Value: 42 vs. 22
  misc_feature: MA Experiment 108522 PARAMETER Experiment Name: Zm_42deg_Heat_P Parameter: Timepoint (hr) Value: 1
  misc_feature: MA Experiment 108522 PARAMETER Experiment Name: Zm_42deg_Heat_P Parameter: Tissue Value: Aerial
  misc_feature: MA Experiment ID: 108523 Result: Up-regulated in Transcription
  misc_feature: MA Experiment 108523 PARAMETER Experiment Name: Zm_42deg_Heat_P Parameter: Age (day) Value: 8
  misc_feature: MA Experiment 108523 PARAMETER Experiment Name: Zm_42deg_Heat_P Parameter: Organism Value: Zea mays
  misc_feature: MA Experiment 108523 PARAMETER Experiment Name: Zm_42deg_Heat_P Parameter: Plant Line Value: 35A19
  misc_feature: MA Experiment 108523 PARAMETER Experiment Name: Zm_42deg_Heat_P Parameter: Temperature (deg C) Value: 42 vs. 22
  misc_feature: MA Experiment 108523 PARAMETER Experiment Name: Zm_42deg_Heat_P Parameter: Timepoint (hr) Value: 6
  misc_feature: MA Experiment 108523 PARAMETER Experiment Name: Zm_42deg_Heat_P Parameter: Tissue Value: Aerial
  misc_feature: MA Experiment ID: 108597 Result: Up-regulated in Transcription
  misc_feature: MA Experiment 108597 PARAMETER Experiment Name: Zm_100uM_ABA_P Parameter: Age (day) Value: 9
  misc_feature: MA Experiment 108597 PARAMETER Experiment Name: Zm_100uM_ABA_P Parameter: Organism Value: Zea mays
  misc_feature: MA Experiment 108597 PARAMETER Experiment Name: Zm_100uM_ABA_P Parameter: Plant Line Value: 35A19
  misc_feature: MA Experiment 108597 PARAMETER Experiment Name: Zm_100uM_ABA_P Parameter: Timepoint (hr) Value: 24
  misc_feature: MA Experiment 108597 PARAMETER Experiment Name: Zm_100uM_ABA_P Parameter: Tissue Value: Aerial
  misc_feature: MA Experiment 108597 PARAMETER Experiment Name: Zm_100uM_ABA_P Parameter: Treatment Value: 100uM ABA vs. No Treatment
agagagtcagagactgagagactggaagcgcccgcgcgtgccggcgatggagagggacgtcgtgctctccgcacccgaggccgctgggtcctcgtcctcccccgcctcctcgtcgtactcctccttcgccgagaccagggtcatctgccgcgtgtgtcagaagcagttcgcgcagtacacttgcccccgctgtaacgcccggtactgctcgctctcgtgctacaagggtcatagtgttcaatgcactgaatccttcatgcgtgagaatgttatggacgagcttaagcagatgcaacctgaggatgaatcaaagaaaaagatgctagatatcctcaagcggctccacttggaagaagagatggcatcagatggtgaagatgagtccatgctatcagaggagcttattcaaaaagttatgtctggggaagagataaagctggaagacctctctgattgtgaaatcaaacgattccgtcaagctctggcctcaggtgagctcagtaagatgattgaaccgtggacaccttggtggaaaaaaccctcagccagatctatttcccttggcccggatggaagccagcttatcagacaagtaaacgcagaagacactgctgtaccatatccagatgcaaatactgaccaagaggctagcatcaacgaaatccctgaagggccagaatctcctctcccgtcactgaaacagttaacaaggacagagccatctcctttgcttgctgtccacttggttgacattctgtacagttactgcttcacacttcggctctacaacggtgattggcactcagatcctttgggtgcttccactgtcgccctgtcgatgtcgaaagtcatgggccaggatgctaaacctgagactgtacctgaagcactcgcagcctgcatcgaggagacatgctcaccagcttacaggcatactggtggtttcaggtttgctattggactcgtggacgatatcatcgccattctctccttgggacagaacgcacttatttgtgccctatgcgacttccatcgactcgttgaagttggtaagagcatgctcaaagtggagaaggtgggcaagacggagagggcacagggctctccaaagcttcgcagtgcagctaggaagctattcttcatgacttgttgggtccatgagcagccagatgaggcgtggccatctttagctcacatcgtccaggtgcagaaagcatctatggaggagttggagaccgggaattggaaggcggatagaaagagcaaaccacaatccgcggttcttatcgaggagctgtaggcatatggatgtaccactggaaactggatcgcgaagctctgtacccttgtgtatcgctcaggatgaatccaacgagagaccttgtccttgtaatgcagttagttgcttttgtgtacacttttttttttgaaaaaaattgtatttgttgaaatcctggttgaagcgatcctgctttactttgcttgttaagttgcgggctgatttaatccatgcgttggagcttatgcagttc

SEQ ID NO: 2982 - protein, 432 aa, Zea mays subsp. mays
  peptide (1)..(432): Ceres Seq. ID no. 12410482
  misc_feature (45)..(75): Pfam Name: HIT zinc finger Pfam Description: HIT zinc finger
  misc_feature (46)..(128): Homolog of NCBI NO: 23613640 NR Description: hypothetical protein [Plasmodium falciparum 3D7]
  misc_feature (49)..(177): Homolog of NCBI NO: 27469505 NR Description: Similar to chromosome 11 open reading frame 5
  misc_feature (49)..(432): Homolog of NCBI NO: 7656936 NR Description: chromosome 11 open reading frame 5 [Homo sapiens]
  misc_feature (57)..(432): Homolog of NCBI NO: 26352237 NR Description: unnamed protein product [Mus musculus]
  misc_feature (57)..(432): Homolog of NCBI NO: 7305357 NR Description: open reading frame 6; Chromosome 11 open reading
  misc_feature (57)..(432): Homolog of NCBI NO: 18044459 NR Description: open reading frame 6 [Mus musculus]
  misc_feature (14)..(432): Homolog of NCBI NO: 34861831 NR Description: similar to Protein C11orf5 homolog (Protein FON)
  misc_feature (16)..(107): Homolog of NCBI NO: 37536148 NR Description: hypothetical protein [Oryza sativa (japonica
  misc_feature (291)..(432): Homolog of NCBI NO: 37536148 NR Description: hypothetical protein [Oryza sativa (japonica
  misc_feature (25)..(432): Homolog of NCBI NO: 15237537 NR Description: unknown protein; protein id: At5g63830.1
ESQRLRDWKRPRVPAMERDVVLSAPEAAGSSSSPASSSYSSFAETRVICRVCQKQFAQYTCPRCNARYCSLSCYKGHSVQCTESFMRENVMDELKQMQPEDESKKKMLDILKRLHLEEEMASDGEDESMLSEELIQKVMSGEEIKLEDLSDCEIKRFRQALASGELSKMIEPWTPWWKKPSARSISLGPDGSQLIRQVNAEDTAVPYPDANTDQEASINEIPEGPESPLPSLKQLTRTEPSPLLAVHLVDILYSYCFTLRLYNGDWHSDPLGASTVALSMSKVMGQDAKPETVPEALAACIEETCSPAYRHTGGFRFAIGLVDDIIAILSLGQNALICALCDFHRLVEVGKSMLKVEKVGKTERAQGSPKLRSAARKLFFMTCWVHEQPDEAWPSLAHIVQVQKASMEELETGNWKADRKSKPQSAVLIEEL

SEQ ID NO: 2983 - protein, 417 aa, Zea mays subsp. mays
  peptide (1)..(417): Ceres Seq. ID no. 12410483
  misc_feature (30)..(60): Pfam Name: HIT zinc finger Pfam Description: HIT zinc finger
  misc_feature (31)..(113): Homolog of NCBI NO: 23613640 NR Description: hypothetical protein [Plasmodium falciparum 3D7]
  misc_feature (34)..(162): Homolog of NCBI NO: 27469505 NR Description: Similar to chromosome 11 open reading frame 5
  misc_feature (34)..(417): Homolog of NCBI NO: 7656936 NR Description: chromosome 11 open reading frame 5 [Homo sapiens]
  misc_feature (42)..(417): Homolog of NCBI NO: 26352237 NR Description: unnamed protein product [Mus musculus]
  misc_feature (42)..(417): Homolog of NCBI NO: 7305357 NR Description: open reading frame 6; Chromosome 11 open reading
  misc_feature (42)..(417): Homolog of NCBI NO: 18044459 NR Description: open reading frame 6 [Mus musculus]
  misc_feature (1)..(417): Homolog of NCBI NO: 34861831 NR Description: similar to Protein C11orf5 homolog (Protein FON)
  misc_feature (1)..(92): Homolog of NCBI NO: 37536148 NR Description: hypothetical protein [Oryza sativa (japonica
  misc_feature (276)..(417): Homolog of NCBI NO: 37536148 NR Description: hypothetical protein [Oryza sativa (japonica
  misc_feature (10)..(417): Homolog of NCBI NO: 15237537 NR Description: unknown protein; protein id: At5g63830.1
MERDVVLSAPEAAGSSSSPASSSYSSFAETRVICRVCQKQFAQYTCPRCNARYCSLSCYKGHSVQCTESFMRENVMDELKQMQPEDESKKKMLDILKRLHLEEEMASDGEDESMLSEELIQKVMSGEEIKLEDLSDCEIKRFRQALASGELSKMIEPWTPWWKKPSARSISLGPDGSQLIRQVNAEDTAVPYPDANTDQEASINEIPEGPESPLPSLKQLTRTEPSPLLAVHLVDILYSYCFTLRLYNGDWHSDPLGASTVALSMSKVMGQDAKPETVPEALAACIEETCSPAYRHTGGFRFAIGLVDDIIAILSLGQNALICALCDFHRLVEVGKSMLKVEKVGKTERAQGSPKLRSAARKLFFMTCWVHEQPDEAWPSLAHIVQVQKASMEELETGNWKADRKSKPQSAVLIEEL

SEQ ID NO: 2984 - protein, 347 aa, Zea mays subsp. mays
  peptide (1)..(347): Ceres Seq. ID no. 12410484
  misc_feature (1)..(43): Homolog of NCBI NO: 23613640 NR Description: hypothetical protein [Plasmodium falciparum 3D7]
  misc_feature (1)..(92): Homolog of NCBI NO: 27469505 NR Description: Similar to chromosome 11 open reading frame 5
  misc_feature (1)..(347): Homolog of NCBI NO: 7656936 NR Description: chromosome 11 open reading frame 5 [Homo sapiens]
  misc_feature (1)..(347): Homolog of NCBI NO: 26352237 NR Description: unnamed protein product [Mus musculus]
  misc_feature (1)..(347): Homolog of NCBI NO: 7305357 NR Description: open reading frame 6; Chromosome 11 open reading
  misc_feature (1)..(347): Homolog of NCBI NO: 18044459 NR Description: open reading frame 6 [Mus musculus]
  misc_feature (1)..(347): Homolog of NCBI NO: 34861831 NR Description: similar to Protein C11orf5 homolog (Protein FON)
  misc_feature (1)..(22): Homolog of NCBI NO: 37536148 NR Description: hypothetical protein [Oryza sativa (japonica
  misc_feature (206)..(347): Homolog of NCBI NO: 37536148 NR Description: hypothetical protein [Oryza sativa (japonica
  misc_feature (1)..(347): Homolog of NCBI NO: 15237537 NR Description: unknown protein; protein id: At5g63830.1
MRENVMDELKQMQPEDESKKKMLDILKRLHLEEEMASDGEDESMLSEELIQKVMSGEEIKLEDLSDCEIKRFRQALASGELSKMIEPWTPWWKKPSARSISLGPDGSQLIRQVNAEDTAVPYPDANTDQEASINEIPEGPESPLPSLKQLTRTEPSPLLAVHLVDILYSYCFTLRLYNGDWHSDPLGASTVALSMSKVMGQDAKPETVPEALAACIEETCSPAYRHTGGFRFAIGLVDDIIAILSLGQNALICALCDFHRLVEVGKSMLKVEKVGKTERAQGSPKLRSAARKLFFMTCWVHEQPDEAWPSLAHIVQVQKASMEELETGNWKADRKSKPQSAVLIEEL

SEQ ID NO: 2985 - DNA, 1228 bp, Zea mays subsp. mays
  misc_feature (1)..(1228): Ceres Seq. ID no. 12352148
  misc_feature: MA Experiment ID: 108527 Result: Up-regulated in Transcription
  misc_feature: MA Experiment 108527 PARAMETER Experiment Name: Zm_5mM_NO_P Parameter: Age (day) Value: 8
  misc_feature: MA Experiment 108527 PARAMETER Experiment Name: Zm_5mM_NO_P Parameter: Organism Value: Zea mays
  misc_feature: MA Experiment 108527 PARAMETER Experiment Name: Zm_5mM_NO_P Parameter: Plant Line Value: 35A19
  misc_feature: MA Experiment 108527 PARAMETER Experiment Name: Zm_5mM_NO_P Parameter: Timepoint (hr) Value: 6
  misc_feature: MA Experiment 108527 PARAMETER Experiment Name: Zm_5mM_NO_P Parameter: Tissue Value: Aerial
  misc_feature: MA Experiment 108527 PARAMETER Experiment Name: Zm_5mM_NO_P Parameter: Treatment Value: 5mM NO vs. No Treatment
  misc_feature: MA Experiment ID: 108543 Result: Down-regulated in Transcription
  misc_feature: MA Experiment ID: 108544 Result: Down-regulated in Transcription
  misc_feature: MA Experiment ID: 108687 Result: Down-regulated in Transcription
  misc_feature: MA Experiment 108687 PARAMETER Experiment Name: Zm_Embryos-Flowers__P Parameter: Tissue Value: Embryo vs. Aerial+
  misc_feature: MA Experiment ID: 20000479 Result: Down-regulated in Transcription
  misc_feature: MA Experiment 20000479 PARAMETER Experiment Name: Zm_Drought_P Parameter: Age (day) Value: 10
  misc_feature: MA Experiment 20000479 PARAMETER Experiment Name: Zm_Drought_P Parameter: Organism Value: Zea mays
  misc_feature: MA Experiment 20000479 PARAMETER Experiment Name: Zm_Drought_P Parameter: Plant Line Value: 35A19
  misc_feature: MA Experiment 20000479 PARAMETER Experiment Name: Zm_Drought_P Parameter: Timepoint (hr) Value: 48
  misc_feature: MA Experiment 20000479 PARAMETER Experiment Name: Zm_Drought_P Parameter: Tissue Value: Aerial
  misc_feature: MA Experiment 20000479 PARAMETER Experiment Name: Zm_Drought_P Parameter: Treatment Value: Drought vs. No Drought
  misc_feature: MA Experiment ID: 20000480 Result: Down-regulated in Transcription
  misc_feature: MA Experiment 20000480 PARAMETER Experiment Name: Zm_Drought_P Parameter: Age (day) Value: 11
  misc_feature: MA Experiment 20000480 PARAMETER Experiment Name: Zm_Drought_P Parameter: Organism Value: Zea mays
  misc_feature: MA Experiment 20000480 PARAMETER Experiment Name: Zm_Drought_P Parameter: Plant Line Value: 35A19
  misc_feature: MA Experiment 20000480 PARAMETER Experiment Name: Zm_Drought_P Parameter: Timepoint (hr) Value: 72
  misc_feature: MA Experiment 20000480 PARAMETER Experiment Name: Zm_Drought_P Parameter: Tissue Value: Aerial
  misc_feature: MA Experiment 20000480 PARAMETER Experiment Name: Zm_Drought_P Parameter: Treatment Value: Drought vs. No Drought
  misc_feature: MA Experiment ID: 20000535 Result: Down-regulated in Transcription
  misc_feature: MA Experiment 20000535 PARAMETER Experiment Name: Zm_Hybrid_Seed_Dev_P Parameter: DAP Value: 30 vs. 12
  misc_feature: MA Experiment 20000535 PARAMETER Experiment Name: Zm_Hybrid_Seed_Dev_P Parameter: Organism Value: Zea mays
  misc_feature: MA Experiment 20000535 PARAMETER Experiment Name: Zm_Hybrid_Seed_Dev_P Parameter: Plant Line Value: 35A19
  misc_feature: MA Experiment 20000535 PARAMETER Experiment Name: Zm_Hybrid_Seed_Dev_P Parameter: Tissue Value: Embryo vs. Unfert Floret
  misc_feature: MA Experiment ID: 20000626 Result: Up-regulated in Transcription
  misc_feature: MA Experiment 20000626 PARAMETER Experiment Name: Zm_Herbicide-Treatments_P Parameter: Timepoint (hr) Value: 12
  misc_feature: MA Experiment 20000626 PARAMETER Experiment Name: Zm_Herbicide-Treatments_P Parameter: Tissue Value: Aerial
  misc_feature: MA Experiment 20000626 PARAMETER Experiment Name: Zm_Herbicide-Treatments_P Parameter: Treatment Value: Roundup vs. No Treatment
  misc_feature: MA Experiment ID: 20000627 Result: Up-regulated in Transcription
  misc_feature: MA Experiment 20000627 PARAMETER Experiment Name: Zm_Herbicide-Treatments_P Parameter: Timepoint (hr) Value: 12
  misc_feature: MA Experiment 20000627 PARAMETER Experiment Name: Zm_Herbicide-Treatments_P Parameter: Tissue Value: Aerial
  misc_feature: MA Experiment 20000627 PARAMETER Experiment Name: Zm_Herbicide-Treatments_P Parameter: Treatment Value: Finale vs. No Treatment
ctattcctcagctcctggaccggccatggccgcaccttccggcacgatgcgcgccgtgcagtacgacagatacggcggaggagcacgggggctcaagcatgtggaggtgccgatcccgtcgccgaagaaaggcgaggtgctcatcaggatggaggccaccagcatcaacgtcgtcgactggaagttccagaacggcttcgcgcggcccttcatgcccaggaggttccctttcatctctggtttcgacctagcaggagaggtcgtagagttgggtgctggagtgagcagcttcaaaccaggggataaggtgatcgccatcaacttcccgaacggcggagggctcgccgagtacgcggtcgcgtcagcgtctcgtacagccgcaaggccgccggaggtgtcggccgtcgaaggtgtctgcgtgccgatcgccgcagtcaccgcgctcgggtcgctgcggacagccggggtcacagtcacactggacgacccggctcgcgcccccgccacgcccaagaacgtgctggtcaccgcggcctccggcgccgtcggccacttcgccgtgcagctcgccaggatgggcggccacaacgtcacggccacctgcggcgcgcgcaacctcggcctggtccggagcctcggcgccgacgaggcgctggactacaagacccccgagggcgccaagctgcggagcccctccggcaggaagtacgacgcggtggtgcactgcgccgcgaaggggctcccgtggtccgtgttcaggcccgtgctcgccgcctcgggcacggtcgtcgacatcacgccagggttcgtggccgtcgtcaccgcgatcctccaggtggcgaccttctccaagaagaggctggtgccgctcatagtgacgcccaagaaggaggagatggagctgctgctgggcatgctgaagcagggtaggctcaagacggtcatagattcccggcacccgctgggcagcgctcacgaaggctgggccaagagcatgagcggccacgccaccggcaaggtcgtcatagagatcggagccgcgcaaccataataatagtgcagcaatatattgattcaaaaaataattatgaattttgtaatttttagatctataatttctatatttttttgttcatgaattatgtatttttatttaaaatttatgaatcatgtatttttatttttatatgaattatgtatttttactagatgaatgcacgtgcgttgc

SEQ ID NO: 2986 - protein, 349 aa, Zea mays subsp. mays
  peptide (1)..(349): Ceres Seq. ID no. 12352149
  misc_feature (16)..(343): Homolog of NCBI NO: 24370984 NR Description: quinone-oxidoreductase homologue [Spinacia
  misc_feature (16)..(343): Homolog of NCBI NO: 38016531 NR Description: fiber quinone-oxidoreductase [Gossypium
  misc_feature (16)..(343): Homolog of NCBI NO: 15235549 NR Description: putative protein
  misc_feature (16)..(343): Homolog of NCBI NO: 12484050 NR Description: quinone-oxidoreductase QR1 [Triphysaria
  misc_feature (9)..(344): Homolog of NCBI NO: 38346453 NR Description: OSJNBa0018J19.14 [Oryza sativa (japonica
  misc_feature (15)..(344): Homolog of NCBI NO: 38346442 NR Description: OSJNBa0018J19.3 [Oryza sativa (japonica
  misc_feature (2)..(344): Homolog of NCBI NO: 21223777 NR Description: putative zinc-binding oxidoreductase
  misc_feature (16)..(342): Homolog of NCBI NO: 23039352 NR Description: hypothetical protein [Trichodesmium erythraeum
  misc_feature (16)..(298): Homolog of NCBI NO: 5701738 NR Description: LEDI-4 protein [Lithospermum erythrorhizon]
  misc_feature (15)..(344): Homolog of NCBI NO: 38346450 NR Description: OSJNBa0018J19.11 [Oryza sativa (japonica
YSSAPGPAMAAPSGTMRAVQYDRYGGGARGLKHVEVPIPSPKKGEVLIRMEATSINVVDWKFQNGFARPFMPRRFPFISGFDLAGEVVELGAGVSSFKPGDKVIAINFPNGGGLAEYAVASASRTAARPPEVSAVEGVCVPIAAVTALGSLRTAGVTVTLDDPARAPATPKNVLVTAASGAVGHFAVQLARMGGHNVTATCGARNLGLVRSLGADEALDYKTPEGAKLRSPSGRKYDAVVHCAAKGLPWSVFRPVLAASGTVVDITPGFVAVVTAILQVATFSKKRLVPLIVTPKKEEMELLLGMLKQGRLKTVIDSRHPLGSAHEGWAKSMSGHATGKVVIEIGAAQP

SEQ ID NO: 2987 - protein, 341 aa, Zea mays subsp. mays
  peptide (1)..(341): Ceres Seq. ID no. 12352150
  misc_feature (1)..(336): Homolog of NCBI NO: 21223777 NR Description: putative zinc-binding oxidoreductase
  misc_feature (8)..(334): Homolog of NCBI NO: 23039352 NR Description: hypothetical protein [Trichodesmium erythraeum
  misc_feature (8)..(290): Homolog of NCBI NO: 5701738 NR Description: LEDI-4 protein [Lithospermum erythrorhizon]
  misc_feature (7)..(336): Homolog of NCBI NO: 38346450 NR Description: OSJNBa0018J19.11 [Oryza sativa (japonica
  misc_feature (1)..(336): Homolog of NCBI NO: 38346453 NR Description: OSJNBa0018J19.14 [Oryza sativa (japonica
  misc_feature (7)..(336): Homolog of NCBI NO: 38346442 NR Description: OSJNBa0018J19.3 [Oryza sativa (japonica
  misc_feature (8)..(335): Homolog of NCBI NO: 24370984 NR Description: quinone-oxidoreductase homologue [Spinacia
  misc_feature (8)..(335): Homolog of NCBI NO: 38016531 NR Description: fiber quinone-oxidoreductase [Gossypium
  misc_feature (8)..(335): Homolog of NCBI NO: 15235549 NR Description: putative protein
  misc_feature (8)..(335): Homolog of NCBI NO: 12484050 NR Description: quinone-oxidoreductase QR1 [Triphysaria
MAAPSGTMRAVQYDRYGGGARGLKHVEVPIPSPKKGEVLIRMEATSINVVDWKFQNGFARPFMPRRFPFISGFDLAGEVVELGAGVSSFKPGDKVIAINFPNGGGLAEYAVASASRTAARPPEVSAVEGVCVPIAAVTALGSLRTAGVTVTLDDPARAPATPKNVLVTAASGAVGHFAVQLARMGGHNVTATCGARNLGLVRSLGADEALDYKTPEGAKLRSPSGRKYDAVVHCAAKGLPWSVFRPVLAASGTVVDITPGFVAVVTAILQVATFSKKRLVPLIVTPKKEEMELLLGMLKQGRLKTVIDSRHPLGSAHEGWAKSMSGHATGKVVIEIGAAQP

SEQ ID NO: 2988 - protein, 334 aa, Zea mays subsp. mays
  peptide (1)..(334): Ceres Seq. ID no. 12352151
  misc_feature (1)..(329): Homolog of NCBI NO: 21223777 NR Description: putative zinc-binding oxidoreductase
  misc_feature (1)..(327): Homolog of NCBI NO: 23039352 NR Description: hypothetical protein [Trichodesmium erythraeum
  misc_feature (1)..(283): Homolog of NCBI NO: 5701738 NR Description: LEDI-4 protein [Lithospermum erythrorhizon]
  misc_feature (1)..(329): Homolog of NCBI NO: 38346450 NR Description: OSJNBa0018J19.11 [Oryza sativa (japonica
  misc_feature (1)..(329): Homolog of NCBI NO: 38346453 NR Description: OSJNBa0018J19.14 [Oryza sativa (japonica
  misc_feature (1)..(329): Homolog of NCBI NO: 38346442 NR Description: OSJNBa0018J19.3 [Oryza sativa (japonica
  misc_feature (1)..(328): Homolog of NCBI NO: 24370984 NR Description: quinone-oxidoreductase homologue [Spinacia
  misc_feature (1)..(328): Homolog of NCBI NO: 38016531 NR Description: fiber quinone-oxidoreductase [Gossypium
  misc_feature (1)..(328): Homolog of NCBI NO: 15235549 NR Description: putative protein
  misc_feature (1)..(328): Homolog of NCBI NO: 12484050 NR Description: quinone-oxidoreductase QR1 [Triphysaria
MRAVQYDRYGGGARGLKHVEVPIPSPKKGEVLIRMEATSINVVDWKFQNGFARPFMPRRFPFISGFDLAGEVVELGAGVSSFKPGDKVIAINFPNGGGLAEYAVASASRTAARPPEVSAVEGVCVPIAAVTALGSLRTAGVTVTLDDPARAPATPKNVLVTAASGAVGHFAVQLARMGGHNVTATCGARNLGLVRSLGADEALDYKTPEGAKLRSPSGRKYDAVVHCAAKGLPWSVFRPVLAASGTVVDITPGFVAVVTAILQVATFSKKRLVPLIVTPKKEEMELLLGMLKQGRLKTVIDSRHPLGSAHEGWAKSMSGHATGKVVIEIGAAQP

SEQ ID NO: 2989 - DNA, 1768 bp, Zea mays subsp. mays
  misc_feature (1)..(1768): Ceres Seq. ID no. 12381060
  misc_feature: MA Experiment ID: 108504 Result: Down-regulated in Transcription
  misc_feature: MA Experiment 108504 PARAMETER Experiment Name: Zm_Drought_P Parameter: Age (day) Value: 8
  misc_feature: MA Experiment 108504 PARAMETER Experiment Name: Zm_Drought_P Parameter: Organism Value: Zea mays
  misc_feature: MA Experiment 108504 PARAMETER Experiment Name: Zm_Drought_P Parameter: Plant Line Value: 35A19
  misc_feature: MA Experiment 108504 PARAMETER Experiment Name: Zm_Drought_P Parameter: Timepoint (hr) Value: 12
  misc_feature: MA Experiment 108504 PARAMETER Experiment Name: Zm_Drought_P Parameter: Tissue Value: Aerial
  misc_feature: MA Experiment 108504 PARAMETER Experiment Name: Zm_Drought_P Parameter: Treatment Value: Drought vs. No Drought
  misc_feature: MA Experiment ID: 108527 Result: Down-regulated in Transcription
  misc_feature: MA Experiment 108527 PARAMETER Experiment Name: Zm_5mM_NO_P Parameter: Age (day) Value: 8
  misc_feature: MA Experiment 108527 PARAMETER Experiment Name: Zm_5mM_NO_P Parameter: Organism Value: Zea mays
  misc_feature: MA Experiment 108527 PARAMETER Experiment Name: Zm_5mM_NO_P Parameter: Plant Line Value: 35A19
  misc_feature: MA Experiment 108527 PARAMETER Experiment Name: Zm_5mM_NO_P Parameter: Timepoint (hr) Value: 6
  misc_feature: MA Experiment 108527 PARAMETER Experiment Name: Zm_5mM_NO_P Parameter: Tissue Value: Aerial
  misc_feature: MA Experiment 108527 PARAMETER Experiment Name: Zm_5mM_NO_P Parameter: Treatment Value: 5mM NO vs. No Treatment
  misc_feature: MA Experiment ID: 108528 Result: Up-regulated in Transcription
  misc_feature: MA Experiment 108528 PARAMETER Experiment Name: Zm_Imbibed_Seeds_P Parameter: Age (day) Value: 5 vs. 2
  misc_feature: MA Experiment 108528 PARAMETER Experiment Name: Zm_Imbibed_Seeds_P Parameter: Organism Value: Zea mays
  misc_feature: MA Experiment 108528 PARAMETER Experiment Name: Zm_Imbibed_Seeds_P Parameter: Plant Line Value: 35A19
  misc_feature: MA Experiment 108528 PARAMETER Experiment Name: Zm_Imbibed_Seeds_P Parameter: Tissue Value: Aerial vs. Embryo
  misc_feature: MA Experiment ID: 108530 Result: Up-regulated in Transcription
  misc_feature: MA Experiment 108530 PARAMETER Experiment Name: Zm_Imbibed_Seeds_P Parameter: Age (day) Value: 6 vs. 2
  misc_feature: MA Experiment 108530 PARAMETER Experiment Name: Zm_Imbibed_Seeds_P Parameter: Organism Value: Zea mays
  misc_feature: MA Experiment 108530 PARAMETER Experiment Name: Zm_Imbibed_Seeds_P Parameter: Plant Line Value: 35A19
  misc_feature: MA Experiment 108530 PARAMETER Experiment Name: Zm_Imbibed_Seeds_P Parameter: Tissue Value: Aerial vs. Embryo
  misc_feature: MA Experiment ID: 108534 Result: Up-regulated in Transcription
  misc_feature: MA Experiment 108534 PARAMETER Experiment Name: Zm_4deg_Cold_P Parameter: Age (hr) Value: 8
  misc_feature: MA Experiment 108534 PARAMETER Experiment Name: Zm_4deg_Cold_P Parameter: Organism Value: Zea mays
  misc_feature: MA Experiment 108534 PARAMETER Experiment Name: Zm_4deg_Cold_P Parameter: Plant Line Value: 35A19
  misc_feature: MA Experiment 108534 PARAMETER Experiment Name: Zm_4deg_Cold_P Parameter: Temperature (deg C) Value: 4 vs. 22
  misc_feature: MA Experiment 108534 PARAMETER Experiment Name: Zm_4deg_Cold_P Parameter: Timepoint (hr) Value: 6
  misc_feature: MA Experiment 108534 PARAMETER Experiment Name: Zm_4deg_Cold_P Parameter: Tissue Value: Aerial
  misc_feature: MA Experiment ID: 108535 Result: Down-regulated in Transcription
  misc_feature: MA Experiment 108535 PARAMETER Experiment Name: Zm_Meristem_P Parameter: Age (day) Value: 8
  misc_feature: MA Experiment 108535 PARAMETER Experiment Name: Zm_Meristem_P Parameter: Organism Value: Zea mays
  misc_feature: MA Experiment 108535 PARAMETER Experiment Name: Zm_Meristem_P Parameter: Plant Line Value: 35A19
  misc_feature: MA Experiment 108535 PARAMETER Experiment Name: Zm_Meristem_P Parameter: Tissue Value: Root Meristem vs. Above Root Meristem
  misc_feature: MA Experiment ID: 108540 Result: Down-regulated in Transcription
  misc_feature: MA Experiment 108540 PARAMETER Experiment Name: Zm_20percent_PEG_P Parameter: Age (day) Value: 8
  misc_feature: MA Experiment 108540 PARAMETER Experiment Name: Zm_20percent_PEG_P Parameter: Organism Value: Zea mays
  misc_feature: MA Experiment 108540 PARAMETER Experiment Name: Zm_20percent_PEG_P Parameter: Plant Line Value: 35A19
  misc_feature: MA Experiment 108540 PARAMETER Experiment Name: Zm_20percent_PEG_P Parameter: Timepoint (hr) Value: 6
  misc_feature: MA Experiment 108540 PARAMETER Experiment Name: Zm_20percent_PEG_P Parameter: Tissue Value: Aerial
  misc_feature: MA Experiment 108540 PARAMETER Experiment Name: Zm_20percent_PEG_P Parameter: Treatment Value: 20percent PEG vs. No Treatment
  misc_feature: MA Experiment ID: 108545 Result: Up-regulated in Transcription
  misc_feature: MA Experiment 108545 PARAMETER Experiment Name: Zm_Imbibed_Seeds_P Parameter: Age (day) Value: 3 vs. 2
  misc_feature: MA Experiment 108545 PARAMETER Experiment Name: Zm_Imbibed_Seeds_P Parameter: Organism Value: Zea mays
  misc_feature: MA Experiment 108545 PARAMETER Experiment Name: Zm_Imbibed_Seeds_P Parameter: Plant Line Value: 35A19
  misc_feature: MA Experiment 108545 PARAMETER Experiment Name: Zm_Imbibed_Seeds_P Parameter: Tissue Value: Aerial vs. Embryo
  misc_feature: MA Experiment ID: 108547 Result: Up-regulated in Transcription
  misc_feature: MA Experiment 108547 PARAMETER Experiment Name: Zm_Imbibed_Seeds_P Parameter: Age (day) Value: 4 vs. 2
  misc_feature: MA Experiment 108547 PARAMETER Experiment Name: Zm_Imbibed_Seeds_P Parameter: Organism Value: Zea mays
  misc_feature: MA Experiment 108547 PARAMETER Experiment Name: Zm_Imbibed_Seeds_P Parameter: Plant Line Value: 35A19
  misc_feature: MA Experiment 108547 PARAMETER Experiment Name: Zm_Imbibed_Seeds_P Parameter: Tissue Value: Aerial vs. Embryo
  misc_feature: MA Experiment ID: 108556 Result: Down-regulated in Transcription
  misc_feature: MA Experiment 108556 PARAMETER Experiment Name: Zm_Drought_P Parameter: Age (day) Value: 9
  misc_feature: MA Experiment 108556 PARAMETER Experiment Name: Zm_Drought_P Parameter: Organism Value: Zea mays
  misc_feature: MA Experiment 108556 PARAMETER Experiment Name: Zm_Drought_P Parameter: Plant Line Value: 35A19
  misc_feature: MA Experiment 108556 PARAMETER Experiment Name: Zm_Drought_P Parameter: Timepoint (hr) Value: 24
  misc_feature: MA Experiment 108556 PARAMETER Experiment Name: Zm_Drought_P Parameter: Tissue Value: Aerial
  misc_feature: MA Experiment 108556 PARAMETER Experiment Name: Zm_Drought_P Parameter: Treatment Value: Drought vs. No Drought
  misc_feature: MA Experiment ID: 108559 Result: Down-regulated in Transcription
  misc_feature: MA Experiment 108559 PARAMETER Experiment Name: Zm_5mM_NO_P Parameter: Age (day) Value: 8
  misc_feature: MA Experiment 108559 PARAMETER Experiment Name: Zm_5mM_NO_P Parameter: Organism Value: Zea mays
  misc_feature: MA Experiment 108559 PARAMETER Experiment Name: Zm_5mM_NO_P Parameter: Plant Line Value: 35A19
  misc_feature: MA Experiment 108559 PARAMETER Experiment Name: Zm_5mM_NO_P Parameter: Timepoint (hr) Value: 12
  misc_feature: MA Experiment 108559 PARAMETER Experiment Name: Zm_5mM_NO_P Parameter: Tissue Value: Aerial
  misc_feature: MA Experiment 108559 PARAMETER Experiment Name: Zm_5mM_NO_P Parameter: Treatment Value: 5mM NO vs. No Treatment
  misc_feature: MA Experiment ID: 108597 Result: Down-regulated in Transcription
  misc_feature: MA Experiment 108597 PARAMETER Experiment Name: Zm_100uM_ABA_P Parameter: Age (day) Value: 9
  misc_feature: MA Experiment 108597 PARAMETER Experiment Name: Zm_100uM_ABA_P Parameter: Organism Value: Zea mays
  misc_feature: MA Experiment 108597 PARAMETER Experiment Name: Zm_100uM_ABA_P Parameter: Plant Line Value: 35A19
  misc_feature: MA Experiment 108597 PARAMETER Experiment Name: Zm_100uM_ABA_P Parameter: Timepoint (hr) Value: 24
  misc_feature: MA Experiment 108597 PARAMETER Experiment Name: Zm_100uM_ABA_P Parameter: Tissue Value: Aerial
  misc_feature: MA Experiment 108597 PARAMETER Experiment Name: Zm_100uM_ABA_P Parameter: Treatment Value: 100uM ABA vs. No Treatment
  misc_feature: MA Experiment ID: 20000477 Result: Down-regulated in Transcription
  misc_feature: MA Experiment 20000477 PARAMETER Experiment Name: Zm_5mM_SA_P Parameter: Age (day) Value: 10
  misc_feature: MA Experiment 20000477 PARAMETER Experiment Name: Zm_5mM_SA_P Parameter: Organism Value: Zea mays
  misc_feature: MA Experiment 20000477 PARAMETER Experiment Name: Zm_5mM_SA_P Parameter: Plant Line Value: 35A19
  misc_feature: MA Experiment 20000477 PARAMETER Experiment Name: Zm_5mM_SA_P Parameter: Timepoint (hr) Value: 48
  misc_feature: MA Experiment 20000477 PARAMETER Experiment Name: Zm_5mM_SA_P Parameter: Tissue Value: Aerial
  misc_feature: MA Experiment 20000477 PARAMETER Experiment Name: Zm_5mM_SA_P Parameter: Treatment Value: 5mM SA vs. No Treatment
  misc_feature: MA Experiment ID: 20000478 Result: Down-regulated in Transcription
  misc_feature: MA Experiment 20000478 PARAMETER Experiment Name: Zm_5mM_SA_P Parameter: Age (day) Value: 11
  misc_feature: MA Experiment 20000478 PARAMETER Experiment Name: Zm_5mM_SA_P Parameter: Organism Value: Zea mays
  misc_feature: MA Experiment 20000478 PARAMETER Experiment Name: Zm_5mM_SA_P Parameter: Plant Line Value: 35A19
  misc_feature: MA Experiment 20000478 PARAMETER Experiment Name: Zm_5mM_SA_P Parameter: Timepoint (hr) Value: 72
  misc_feature: MA Experiment 20000478 PARAMETER Experiment Name: Zm_5mM_SA_P Parameter: Tissue Value: Aerial
  misc_feature: MA Experiment 20000478 PARAMETER Experiment Name: Zm_5mM_SA_P Parameter: Treatment Value: 5mM SA vs. No Treatment
  misc_feature: MA Experiment ID: 20000479 Result: Down-regulated in Transcription
  misc_feature: MA Experiment 20000479 PARAMETER Experiment Name: Zm_Drought_P Parameter: Age (day) Value: 10
  misc_feature: MA Experiment 20000479 PARAMETER Experiment Name: Zm_Drought_P Parameter: Organism Value: Zea mays
  misc_feature: MA Experiment 20000479 PARAMETER Experiment Name: Zm_Drought_P Parameter: Plant Line Value: 35A19
  misc_feature: MA Experiment 20000479 PARAMETER Experiment Name: Zm_Drought_P Parameter: Timepoint (hr) Value: 48
  misc_feature: MA Experiment 20000479 PARAMETER Experiment Name: Zm_Drought_P Parameter: Tissue Value: Aerial
  misc_feature: MA Experiment 20000479 PARAMETER Experiment Name: Zm_Drought_P Parameter: Treatment Value: Drought vs. No Drought
  misc_feature: MA Experiment ID: 20000480 Result: Down-regulated in Transcription
  misc_feature: MA Experiment 20000480 PARAMETER Experiment Name: Zm_Drought_P Parameter: Age (day) Value: 11
  misc_feature: MA Experiment 20000480 PARAMETER Experiment Name: Zm_Drought_P Parameter: Organism Value: Zea mays
  misc_feature: MA Experiment 20000480 PARAMETER Experiment Name: Zm_Drought_P Parameter: Plant Line Value: 35A19
  misc_feature: MA Experiment 20000480 PARAMETER Experiment Name: Zm_Drought_P Parameter: Timepoint (hr) Value: 72
  misc_feature: MA Experiment 20000480 PARAMETER Experiment Name: Zm_Drought_P Parameter: Tissue Value: Aerial
  misc_feature: MA Experiment 20000480 PARAMETER Experiment Name: Zm_Drought_P Parameter: Treatment Value: Drought vs. No Drought
aagccaggccactctaccaccgcacgctcaactcaaacccccgtcccgaacgcagangaccggcggcagcggcggggtgtgtgtggactggactgaaaccaattgccatcaatccaggcatccatccatccacccgcacccgccccgctgacggcggcaatggcccggctcgtgctctccgagtgctgcggcctcgcgccgctccgccgcctgcgcgccggccggggcgccattgcggcgccgtcaccccccgcgctctccgcggcgccgcgccgtcgtcccgcgtccgcgtccatccaccgcgactgggcgctccgcgtctccgcgcccacccgcctcgcctccgccgccgtcgaggaggacaagccgagcgccgcgccggggcaggaggagggcgcggcggccggcggggagttcgacccgggggcgccgccgccgttcgggctggccgagatccgcgccgccatccccaagcactgctgggtcaaggacccctggcgctccatgagctacgtgctgcgcgacgtcgccgtcgtcctgggcctcgccgcagcggccgcgcgcctcgacagctggctcgtctggccgctctactgggccgcgcagggcaccatgttctgggcgctcttcgtcctcggccacgactgtggacacgggagcttctcgaacaaccccaagttaaacagcgtcgtcggccacatactccattcctccattcttgtgccataccacggatggaggattagccacaggacgcaccatcaaaaccacggtcacgttgagaaggacgagtcctggcacccgctaccagagaggctgtacaaaagcctggactttatgactaggaaactgcggttcaccatgccgttccccttgctcgcgttcccgttatacttgtttgcgaggagtccagggaagtcaggatcacacttcaacccaggcagtgatctgttccaacctactgaaaagaatgatatcataacatccacggcgtcctggctggccatggttggtgttctggccggtctcacctttctgatgggtcctgttccgatgctaaagctctacggagtcccatacttggtatttgttgcttggctagatatggtcacatacttgcaccatcatggccacgaagacaagcttccctggtaccgtggaaaggagtggagttatctgcgtggaggactgacgacgctcgaccgggactacggatggatcaacaacatccatcacgacatcggaactcatgtcatccatcacctcttccctcagatcccgcattaccatctcatcgaggcgaccgaggcagcaaagccggttcttggcaagtactacaaagagccgaagaactcgggtgctctgccgtggcatctattccgggtgctggcacagagcttgaagcaagaccactatgtcagtcacaccggagatgtggtctactaccaagctgagtcgaaaacgagcacctctgcacaaaaatccgattgacagggagtatagagcgtgtagagtgttcttcatttttctcggggagggcctgtgcctgaagacctgaccagcctccacctctgattagcgtgagtacatgggtacgtcgactcaagaacgtaagctggcgaagtagtgccatgtatgtatggagagggttaaatgtaattctttccaatggtccaaggcggatgctgcttccgatgtagcagcatgcgattctttggacaagatgtatactattacagtgaagagtgaaaaaaagagagagttagct

SEQ ID NO: 2990 - protein, 443 aa, Zea mays subsp. mays
  peptide (1)..(443): Ceres Seq. ID no. 12381061
  misc_feature (145)..(389): Pfam Name: Fatty acid desaturase Pfam Description: Fatty acid desaturase
  misc_feature (1)..(435): Homolog of NCBI NO: 23345023 NR Description: omega-3 fatty acid desaturase [Betula pendula]
  misc_feature (1)..(430): Homolog of NCBI NO: 6752907 NR Description: omega-3 fatty acid desaturase [Capsicum annuum]
  misc_feature (1)..(432): Homolog of NCBI NO: 7433274 NR Description: omega-3 fatty acid desaturase (EC 1.14.99.-) -
  misc_feature (1)..(436): Homolog of NCBI NO: 7433276 NR Description: omega-3 fatty acid desaturase (EC 1.14.99.-) FAD7
  misc_feature (1)..(442): Homolog of NCBI NO: 1345970 NR Description: Omega-3 fatty acid desaturase, chloroplast
  misc_feature (1)..(432): Homolog of NCBI NO: 1754795 NR Description: omega-3 fatty acid desaturase
  misc_feature (71)..(443): Homolog of NCBI NO: 21668465 NR Description: plastid omega-3 fatty acid desaturase [Triticum
  misc_feature (10)..(440): Homolog of NCBI NO: 1345971 NR Description: Omega-3 fatty acid desaturase, chloroplast
  misc_feature (50)..(443): Homolog of NCBI NO: 7433278 NR Description: omega-3 fatty acid desaturase (EC 1.14.99.-) FAD8
  misc_feature (1)..(443): Homolog of NCBI NO: 7433277 NR Description: omega-3 fatty acid desaturase (EC 1.14.99.-) FAD7
MARLVLSECCGLAPLRRLRAGRGAIAAPSPPALSAAPRRRPASASIHRDWALRVSAPTRLASAAVEEDKPSAAPGQEEGAAAGGEFDPGAPPPFGLAEIRAAIPKHCWVKDPWRSMSYVLRDVAVVLGLAAAAARLDSWLVWPLYWAAQGTMFWALFVLGHDCGHGSFSNNPKLNSVVGHILHSSILVPYHGWRISHRTHHQNHGHVEKDESWHPLPERLYKSLDFMTRKLRFTMPFPLLAFPLYLFARSPGKSGSHFNPGSDLFQPTEKNDIITSTASWLAMVGVLAGLTFLMGPVPMLKLYGVPYLVFVAWLDMVTYLHHHGHEDKLPWYRGKEWSYLRGGLTTLDRDYGWINNIHHDIGTHVIHHLFPQIPHYHLIEATEAAKPVLGKYYKEPKNSGALPWHLFRVLAQSLKQDHYVSHTGDVVYYQAESKTSTSAQKSD

SEQ ID NO: 2991 - protein, 328 aa, Zea mays subsp. mays
  peptide (1)..(328): Ceres Seq. ID no. 12381062
  misc_feature (30)..(274): Pfam Name: Fatty acid desaturase Pfam Description: Fatty acid desaturase
  misc_feature (1)..(320): Homolog of NCBI NO: 23345023 NR Description: omega-3 fatty acid desaturase [Betula pendula]
  misc_feature (1)..(315): Homolog of NCBI NO: 6752907 NR Description: omega-3 fatty acid desaturase [Capsicum annuum]
  misc_feature (1)..(317): Homolog of NCBI NO: 7433274 NR Description: omega-3 fatty acid desaturase (EC 1.14.99.-) -
  misc_feature (1)..(321): Homolog of NCBI NO: 7433276 NR Description: omega-3 fatty acid desaturase (EC 1.14.99.-) FAD7
  misc_feature (1)..(327): Homolog of NCBI NO: 1345970 NR Description: Omega-3 fatty acid desaturase, chloroplast
  misc_feature (1)..(317): Homolog of NCBI NO: 1754795 NR Description: omega-3 fatty acid desaturase
  misc_feature (1)..(328): Homolog of NCBI NO: 21668465 NR Description: plastid omega-3 fatty acid desaturase [Triticum
  misc_feature (1)..(325): Homolog of NCBI NO: 1345971 NR Description: Omega-3 fatty acid desaturase, chloroplast
  misc_feature (1)..(328): Homolog of NCBI NO: 7433278 NR Description: omega-3 fatty acid desaturase (EC 1.14.99.-) FAD8
  misc_feature (1)..(328): Homolog of NCBI NO: 7433277 NR Description: omega-3 fatty acid desaturase (EC 1.14.99.-) FAD7
MSYVLRDVAVVLGLAAAAARLDSWLVWPLYWAAQGTMFWALFVLGHDCGHGSFSNNPKLNSVVGHILHSSILVPYHGWRISHRTHHQNHGHVEKDESWHPLPERLYKSLDFMTRKLRFTMPFPLLAFPLYLFARSPGKSGSHFNPGSDLFQPTEKNDIITSTASWLAMVGVLAGLTFLMGPVPMLKLYGVPYLVFVAWLDMVTYLHHHGHEDKLPWYRGKEWSYLRGGLTTLDRDYGWINNIHHDIGTHVIHHLFPQIPHYHLIEATEAAKPVLGKYYKEPKNSGALPWHLFRVLAQSLKQDHYVSHTGDVVYYQAESKTSTSAQKSD

SEQ ID NO: 2992 - protein, 292 aa, Zea mays subsp. mays
  peptide (1)..(292): Ceres Seq. ID no. 12381063
  misc_feature (1)..(238): Pfam Name: Fatty acid desaturase Pfam Description: Fatty acid desaturase
  misc_feature (1)..(284): Homolog of NCBI NO: 23345023 NR Description: omega-3 fatty acid desaturase [Betula pendula]
  misc_feature (1)..(279): Homolog of NCBI NO: 6752907 NR Description: omega-3 fatty acid desaturase [Capsicum annuum]
  misc_feature (1)..(281): Homolog of NCBI NO: 7433274 NR Description: omega-3 fatty acid desaturase (EC 1.14.99.-) -
  misc_feature (1)..(285): Homolog of NCBI NO: 7433276 NR Description: omega-3 fatty acid desaturase (EC 1.14.99.-) FAD7
  misc_feature (1)..(291): Homolog of NCBI NO: 1345970 NR Description: Omega-3 fatty acid desaturase, chloroplast
  misc_feature (1)..(281): Homolog of NCBI NO: 1754795 NR Description: omega-3 fatty acid desaturase
  misc_feature (1)..(292): Homolog of NCBI NO: 21668465 NR Description: plastid omega-3 fatty acid desaturase [Triticum
  misc_feature (1)..(289): Homolog of NCBI NO: 1345971 NR Description: Omega-3 fatty acid desaturase, chloroplast
  misc_feature (1)..(292): Homolog of NCBI NO: 7433278 NR Description: omega-3 fatty acid desaturase (EC 1.14.99.-) FAD8
  misc_feature (1)..(292): Homolog of NCBI NO: 7433277 NR Description: omega-3 fatty acid desaturase (EC 1.14.99.-) FAD7
MFWALFVLGHDCGHGSFSNNPKLNSVVGHILHSSILVPYHGWRISHRTHHQNHGHVEKDESWHPLPERLYKSLDFMTRKLRFTMPFPLLAFPLYLFARSPGKSGSHFNPGSDLFQPTEKNDIITSTASWLAMVGVLAGLTFLMGPVPMLKLYGVPYLVFVAWLDMVTYLHHHGHEDKLPWYRGKEWSYLRGGLTTLDRDYGWINNIHHDIGTHVIHHLFPQIPHYHLIEATEAAKPVLGKYYKEPKNSGALPWHLFRVLAQSLKQDHYVSHTGDVVYYQAESKTSTSAQKSD

SEQ ID NO: 2993 - DNA, 1298 bp, Zea mays subsp. mays
  misc_feature (1)..(1298): Ceres Seq. ID no. 12410473
  misc_feature: MA Experiment ID: 108523 Result: Down-regulated in Transcription
  misc_feature: MA Experiment 108523 PARAMETER Experiment Name: Zm_42deg_Heat_P Parameter: Age (day) Value: 8
  misc_feature: MA Experiment 108523 PARAMETER Experiment Name: Zm_42deg_Heat_P Parameter: Organism Value: Zea mays
  misc_feature: MA Experiment 108523 PARAMETER Experiment Name: Zm_42deg_Heat_P Parameter: Plant Line Value: 35A19
  misc_feature: MA Experiment 108523 PARAMETER Experiment Name: Zm_42deg_Heat_P Parameter: Temperature (deg C) Value: 42 vs. 22
  misc_feature: MA Experiment 108523 PARAMETER Experiment Name: Zm_42deg_Heat_P Parameter: Timepoint (hr) Value: 6
  misc_feature: MA Experiment 108523 PARAMETER Experiment Name: Zm_42deg_Heat_P Parameter: Tissue Value: Aerial
  misc_feature: MA Experiment ID: 108527 Result: Down-regulated in Transcription
  misc_feature: MA Experiment 108527 PARAMETER Experiment Name: Zm_5mM_NO_P Parameter: Age (day) Value: 8
  misc_feature: MA Experiment 108527 PARAMETER Experiment Name: Zm_5mM_NO_P Parameter: Organism Value: Zea mays
  misc_feature: MA Experiment 108527 PARAMETER Experiment Name: Zm_5mM_NO_P Parameter: Plant Line Value: 35A19
  misc_feature: MA Experiment 108527 PARAMETER Experiment Name: Zm_5mM_NO_P Parameter: Timepoint (hr) Value: 6
  misc_feature: MA Experiment 108527 PARAMETER Experiment Name: Zm_5mM_NO_P Parameter: Tissue Value: Aerial
  misc_feature: MA Experiment 108527 PARAMETER Experiment Name: Zm_5mM_NO_P Parameter: Treatment Value: 5mM NO vs. No Treatment
  misc_feature: MA Experiment ID: 108535 Result: Down-regulated in Transcription
  misc_feature: MA Experiment 108535 PARAMETER Experiment Name: Zm_Meristem_P Parameter: Age (day) Value: 8
  misc_feature: MA Experiment 108535 PARAMETER Experiment Name: Zm_Meristem_P Parameter: Organism Value: Zea mays
  misc_feature: MA Experiment 108535 PARAMETER Experiment Name: Zm_Meristem_P Parameter: Plant Line Value: 35A19
  misc_feature: MA Experiment 108535 PARAMETER Experiment Name: Zm_Meristem_P Parameter: Tissue Value: Root Meristem vs. Above Root Meristem
  misc_feature: MA Experiment ID: 108543 Result: Up-regulated in Transcription
  misc_feature: MA Experiment ID: 108544 Result: Down-regulated in Transcription
  misc_feature: MA Experiment ID: 108559 Result: Down-regulated in Transcription
  misc_feature: MA Experiment 108559 PARAMETER Experiment Name: Zm_5mM_NO_P Parameter: Age (day) Value: 8
  misc_feature: MA Experiment 108559 PARAMETER Experiment Name: Zm_5mM_NO_P Parameter: Organism Value: Zea mays
  misc_feature: MA Experiment 108559 PARAMETER Experiment Name: Zm_5mM_NO_P Parameter: Plant Line Value: 35A19
  misc_feature: MA Experiment 108559 PARAMETER Experiment Name: Zm_5mM_NO_P Parameter: Timepoint (hr) Value: 12
  misc_feature: MA Experiment 108559 PARAMETER Experiment Name: Zm_5mM_NO_P Parameter: Tissue Value: Aerial
  misc_feature: MA Experiment 108559 PARAMETER Experiment Name: Zm_5mM_NO_P Parameter: Treatment Value: 5mM NO vs. No Treatment
  misc_feature: MA Experiment ID: 20000477 Result: Down-regulated in Transcription
  misc_feature: MA Experiment 20000477 PARAMETER Experiment Name: Zm_5mM_SA_P Parameter: Age (day) Value: 10
  misc_feature: MA Experiment 20000477 PARAMETER Experiment Name: Zm_5mM_SA_P Parameter: Organism Value: Zea mays
  misc_feature: MA Experiment 20000477 PARAMETER Experiment Name: Zm_5mM_SA_P Parameter: Plant Line Value: 35A19
  misc_feature: MA Experiment 20000477 PARAMETER Experiment Name: Zm_5mM_SA_P Parameter: Timepoint (hr) Value: 48
  misc_feature: MA Experiment 20000477 PARAMETER Experiment Name: Zm_5mM_SA_P Parameter: Tissue Value: Aerial
  misc_feature: MA Experiment 20000477 PARAMETER Experiment Name: Zm_5mM_SA_P Parameter: Treatment Value: 5mM SA vs. No Treatment
  misc_feature: MA Experiment ID: 20000478 Result: Down-regulated in Transcription
  misc_feature: MA Experiment 20000478 PARAMETER Experiment Name: Zm_5mM_SA_P Parameter: Age (day) Value: 11
  misc_feature: MA Experiment 20000478 PARAMETER Experiment Name: Zm_5mM_SA_P Parameter: Organism Value: Zea mays
  misc_feature: MA Experiment 20000478 PARAMETER Experiment Name: Zm_5mM_SA_P Parameter: Plant Line Value: 35A19
  misc_feature: MA Experiment 20000478 PARAMETER Experiment Name: Zm_5mM_SA_P Parameter: Timepoint (hr) Value: 72
  misc_feature: MA Experiment 20000478 PARAMETER Experiment Name: Zm_5mM_SA_P Parameter: Tissue Value: Aerial
  misc_feature: MA Experiment 20000478 PARAMETER Experiment Name: Zm_5mM_SA_P Parameter: Treatment Value: 5mM SA vs. No Treatment
  misc_feature: MA Experiment ID: 20000487 Result: Down-regulated in Transcription
  misc_feature: MA Experiment 20000487 PARAMETER Experiment Name: Zm_50mM_NH4NO3_L_to_H_P Parameter: Organism Value: Zea mays
  misc_feature: MA Experiment 20000487 PARAMETER Experiment Name: Zm_50mM_NH4NO3_L_to_H_P Parameter: Timepoint (hr) Value: 4
  misc_feature: MA Experiment 20000487 PARAMETER Experiment Name: Zm_50mM_NH4NO3_L_to_H_P Parameter: Tissue Value: Leaves
  misc_feature: MA Experiment 20000487 PARAMETER Experiment Name: Zm_50mM_NH4NO3_L_to_H_P Parameter: Treatment Value: 50mM NH4NO3 vs. 100mM Mannitol
  misc_feature: MA Experiment ID: 20000534 Result: Down-regulated in Transcription
  misc_feature: MA Experiment 20000534 PARAMETER Experiment Name: Zm_Hybrid_Pollen_P Parameter: Age (day) Value: 8
  misc_feature: MA Experiment 20000534 PARAMETER Experiment Name: Zm_Hybrid_Pollen_P Parameter: Organism Value: Zea mays
  misc_feature: MA Experiment 20000534 PARAMETER Experiment Name: Zm_Hybrid_Pollen_P Parameter: Plant Line Value: 35A19
  misc_feature: MA Experiment 20000534 PARAMETER Experiment Name: Zm_Hybrid_Pollen_P Parameter: Tissue Value: Pollen vs. Aerial
  misc_feature: MA Experiment ID: 20000535 Result: Down-regulated in Transcription
  misc_feature: MA Experiment 20000535 PARAMETER Experiment Name: Zm_Hybrid_Seed_Dev_P Parameter: DAP Value: 30 vs. 12
  misc_feature: MA Experiment 20000535 PARAMETER Experiment Name: Zm_Hybrid_Seed_Dev_P Parameter: Organism Value: Zea mays
  misc_feature: MA Experiment 20000535 PARAMETER Experiment Name: Zm_Hybrid_Seed_Dev_P Parameter: Plant Line Value: 35A19
  misc_feature: MA Experiment 20000535 PARAMETER Experiment Name: Zm_Hybrid_Seed_Dev_P Parameter: Tissue Value: Embryo vs. Unfert Floret
  misc_feature: MA Experiment ID: 20001614 Result: Up-regulated in Transcription
  misc_feature: MA Experiment 20001614 PARAMETER Experiment Name: Zm_50ppm_KNO3_L-to-H_P Parameter: Age (day) Value: 21
  misc_feature: MA Experiment 20001614 PARAMETER Experiment Name: Zm_50ppm_KNO3_L-to-H_P Parameter: Organism Value: Zea mays
  misc_feature: MA Experiment 20001614 PARAMETER Experiment Name: Zm_50ppm_KNO3_L-to-H_P Parameter: Plant Line Value: 35A19
  misc_feature: MA Experiment 20001614 PARAMETER Experiment Name: Zm_50ppm_KNO3_L-to-H_P Parameter: Timepoint (hr) Value: 48
  misc_feature: MA Experiment 20001614 PARAMETER Experiment Name: Zm_50ppm_KNO3_L-to-H_P Parameter: Tissue Value: Roots
  misc_feature: MA Experiment 20001614 PARAMETER Experiment Name: Zm_50ppm_KNO3_L-to-H_P Parameter: Treatment Value: 50ppm KNO3 vs. 50ppm KCl
acaatattattggactattcctaacacaacggaggccataggatgggatggtcatctataaatacgtagcccggcgcagccttctttggagcagggagaagaacacagggcacacgcacggcacgcagatacatatagagagaggttagctatagcttgcacatctatttaactaactaactaactggctagctagctcgatcggcagagcaaagcgaaagcagcaagaagcaaagcaatggagaaccctgcgagtgtgctagttctaccagcgcagttcaccaaactcaccttccgaaacctgtacatccgccgggccgggccgggcagcagggagataaccgaggagggcaggtgcgacctggacaagagatacgtgagtgacttccccgtctacgacggccgcggccccgacgccagccttgtggcccgcgtgcaggggatcaccagcgaaatcgggaacgcgcaccaactgttcgtcgttgttttcgacaccgacaggctcaagggctccacgctcgtcaccaatggcgtgataacggccgggtctgacgagtgggcgatctacggcggaaccggggtgtttgccatggcgaggggcgtcataaggagaaggtatctcgccgacagggccggcgggaacactgatgagctcaacatggatgtcttctgccggccgtttggctcacagtcagagctgcaagataagatgcaggtgcaggggcagggctctagcgtcaccaagattggactatggggtggaccgggagggtcggcacaggacatcacggcggagcggccgccgcagcgtctgcacagcgtcaccgttcgtgctggcgtcgccgtcgactccatcgagttcacctatactgacagcgcttggcagaggcgcgccgctgggcgatggggtggactcgggggcaatgttcgaacgatcgaccttggcgacgccgaggatgtcagggaagtctcgggaacatacggcgcatttgaaggtgccactacgctgacctcgctcaggctcgtcaccagcagcagaacctggggcccctggggtgtcgagaacgggacgcgtttctccgtcacggcgcccatcggcagcagcatcgtgggattctatgcgcgggcgggaaccaggctcgtcgatgctatcggtgtttacttgcgtcagatttaattcgaataatagcaggggagctactgctagctacgtacctgctccatcctccattatcctttatttcaattcgctcatcatcgtcgtgtgtaaattaaataaataaagctcttgtgcccat

SEQ ID NO: 2994 - protein, 312 aa, Zea mays subsp. mays
  peptide (1)..(312): Ceres Seq. ID no. 12410474
  misc_feature (178)..(310): Pfam Name: Jacalin-like lectin domain Pfam Description: Jacalin-like lectin domain
  misc_feature (166)..(309): Homolog of NCBI NO: 34895152 NR Description: Mannose-Binding Rice Lectin
  misc_feature (166)..(309): Homolog of NCBI NO: 134190 NR Description: Salt-stress induced protein (Salt protein)
  misc_feature (166)..(310): Homolog of NCBI NO: 34915016 NR Description: putative Mannose-Binding Rice Lectin
  misc_feature (48)..(310): Homolog of NCBI NO: 21311647 NR Description: hessian fly response gene 1 protein [Triticum
  misc_feature (48)..(309): Homolog of NCBI NO: 7489661 NR Description: benzothiadiazole-induced protein (clone WCI-1) -
  misc_feature (15)..(308): Homolog of NCBI NO: 16151819 NR Description: VER2 [Triticum aestivum]
  misc_feature (13)..(298): Homolog of NCBI NO: 7489384 NR Description: jacalin homolog - barley
  misc_feature (13)..(312): Homolog of NCBI NO: 7489385 NR Description: jakalin homolog - barley
  misc_feature (13)..(312): Homolog of NCBI NO: 7489383 NR Description: jacalin homolog - barley
  misc_feature (5)..(312): Homolog of NCBI NO: 9313027 NR Description: beta-glucosidase aggregating factor precursor
MENPASVLVLPAQFTKLTFRNLYIRRAGPGSREITEEGRCDLDKRYVSDFPVYDGRGPDASLVARVQGITSEIGNAHQLFVVVFDTDRLKGSTLVTNGVITAGSDEWAIYGGTGVFAMARGVIRRRYLADRAGGNTDELNMDVFCRPFGSQSELQDKMQVQGQGSSVTKIGLWGGPGGSAQDITAERPPQRLHSVTVRAGVAVDSIEFTYTDSAWQRRAAGRWGGLGGNVRTIDLGDAEDVREVSGTYGAFEGATTLTSLRLVTSSRTWGPWGVENGTRFSVTAPIGSSIVGFYARAGTRLVDAIGVYLRQI

SEQ ID NO: 2995 - protein, 195 aa, Zea mays subsp. mays
  peptide (1)..(195): Ceres Seq. ID no. 12410475
  misc_feature (61)..(193): Pfam Name: Jacalin-like lectin domain Pfam Description: Jacalin-like lectin domain
  misc_feature (49)..(192): Homolog of NCBI NO: 34895152 NR Description: Mannose-Binding Rice Lectin
  misc_feature (49)..(192): Homolog of NCBI NO: 134190 NR Description: Salt-stress induced protein (Salt protein)
  misc_feature (49)..(193): Homolog of NCBI NO: 34915016 NR Description: putative Mannose-Binding Rice Lectin
  misc_feature (1)..(193): Homolog of NCBI NO: 21311647 NR Description: hessian fly response gene 1 protein [Triticum
  misc_feature (1)..(192): Homolog of NCBI NO: 7489661 NR Description: benzothiadiazole-induced protein (clone WCI-1) -
  misc_feature (1)..(191): Homolog of NCBI NO: 16151819 NR Description: VER2 [Triticum aestivum]
  misc_feature (1)..(181): Homolog of NCBI NO: 7489384 NR Description: jacalin homolog - barley
  misc_feature (1)..(195): Homolog of NCBI NO: 7489385 NR Description: jakalin homolog - barley
  misc_feature (1)..(195): Homolog of NCBI NO: 7489383 NR Description: jacalin homolog - barley
  misc_feature (1)..(195): Homolog of NCBI NO: 9313027 NR Description: beta-glucosidase aggregating factor precursor
MARGVIRRRYLADRAGGNTDELNMDVFCRPFGSQSELQDKMQVQGQGSSVTKIGLWGGPGGSAQDITAERPPQRLHSVTVRAGVAVDSIEFTYTDSAWQRRAAGRWGGLGGNVRTIDLGDAEDVREVSGTYGAFEGATTLTSLRLVTSSRTWGPWGVENGTRFSVTAPIGSSIVGFYARAGTRLVDAIGVYLRQI

SEQ ID NO: 2996 - protein, 172 aa, Zea mays subsp. mays
  peptide (1)..(172): Ceres Seq. ID no. 12410476
  misc_feature (38)..(170): Pfam Name: Jacalin-like lectin domain Pfam Description: Jacalin-like lectin domain
  misc_feature (26)..(169): Homolog of NCBI NO: 34895152 NR Description: Mannose-Binding Rice Lectin
  misc_feature (26)..(169): Homolog of NCBI NO: 134190 NR Description: Salt-stress induced protein (Salt protein)
  misc_feature (26)..(170): Homolog of NCBI NO: 34915016 NR Description: putative Mannose-Binding Rice Lectin
  misc_feature (1)..(170): Homolog of NCBI NO: 21311647 NR Description: hessian fly response gene 1 protein [Triticum
  misc_feature (1)..(169): Homolog of NCBI NO: 7489661 NR Description: benzothiadiazole-induced protein (clone WCI-1) -
  misc_feature (1)..(168): Homolog of NCBI NO: 16151819 NR Description: VER2 [Triticum aestivum]
  misc_feature (1)..(158): Homolog of NCBI NO: 7489384 NR Description: jacalin homolog - barley
  misc_feature (1)..(172): Homolog of NCBI NO: 7489385 NR Description: jakalin homolog - barley
  misc_feature (1)..(172): Homolog of NCBI NO: 7489383 NR Description: jacalin homolog - barley
  misc_feature (1)..(172): Homolog of NCBI NO: 9313027 NR Description: beta-glucosidase aggregating factor precursor
MDVFCRPFGSQSELQDKMQVQGQGSSVTKIGLWGGPGGSAQDITAERPPQRLHSVTVRAGVAVDSIEFTYTDSAWQRRAAGRWGGLGGNVRTIDLGDAEDVREVSGTYGAFEGATTLTSLRLVTSSRTWGPWGVENGTRFSVTAPIGSSIVGFYARAGTRLVDAIGVYLRQI

SEQ ID NO: 2997 - DNA, 1654 bp, Zea mays subsp. mays
  misc_feature (1)..(1654): Ceres Seq. ID no. 12367905
  misc_feature: MA Experiment ID: 20000626 Result: Up-regulated in Transcription
  misc_feature: MA Experiment 20000626 PARAMETER Experiment Name: Zm_Herbicide-Treatments_P Parameter: Timepoint (hr) Value: 12
  misc_feature: MA Experiment 20000626 PARAMETER Experiment Name: Zm_Herbicide-Treatments_P Parameter: Tissue Value: Aerial
  misc_feature: MA Experiment 20000626 PARAMETER Experiment Name: Zm_Herbicide-Treatments_P Parameter: Treatment Value: Roundup vs. No Treatment
aaaccacgcgaacaagaacaaccaagatgacgcgctctcctctggctctcgccctactgctcctctgcgccgccggcgccgcggcggccgtgccgcggtaccgcgaggcgccgcacttcaccaactcggcggcggcgcagtgcccgccgccgctgcagccgtcggacgcggacgcggcgtgctcgccgcacgcggcggtgcacgtcgccatgacgctggacgcgtcgtacctgcgcggcaccatggcggccgtgctctccgtgctgcgccacgcgtcgtgcccggagtccatccacttccacttcatcgcctccgcctcctccgggtccagtgcgacggcggaggcgctcagggccacggtgcgcgcgtcgttcccgtcgctggcgttccgggtgtacccgttcgccgacgaggcccgcgtggcggggctcatctccacctccatccggggcgcgctggaccgcccgctcaactacgcgcgctcctacctcgcgtccacgctgcccgcctgcgtgcgccgcgtcgtgtacctcgactccgacgtcgtgctcaccgacgacatcgccgccctcgccgccaccccgctcccgggggaggagggcacggccgtggcggcgccccagtactgcggcgccaacttcaccgcctacttcacgccgggcttctgggcgtcccccgcgctctcctccgccttcgccggccgccgcgcctgctacttcaacacgggcgtcatggtgctcgacctcgcgcgctggcgccgcgcgggatacacggcgcagatcgaggagtggatggagctgcagaagcgggtgcgcatctacgagctgggctcgctgccgcccttcctgctcgtcttcgccggcaggatcgcgtccgtcgaccaccgatggaaccagcacggcctcggcggggacaactaccgcggcctctgccgcggcctgcacgccggcgccgtcagcctgctgcactggagcggcaaggggaagccctgggaccgcctggacgccggaaggccgtgcccgctcgacgccgtctgggccaagtacgacctgctccggccggccgccgacatcgagacctcgtgaacacaacgacggcgttcgatcgaccgctcgtttcactttttgttcggtttagaagcacgtgctcttcgttgttttgttgatctaggctagatattggtagatcgatcatcagggtgttcatgtgaactgtacatattgttgctaactttctcggaaaagtttagaccgcttgcacaaattctagattcagaaaaaaaatagtactactcaaaagttggccaaatggtattgctccaagaaatctagatataacaaattggtggatctaaggtcagaatcaaggtgaagctctcaagtggcgcttcgctagcacaaaattagtggacttggtgaaaattgtacgaagaaaaaagatggtcaagaatagaagagactattagcaccaaaattgtcctccactagatctaaacaaaaaacatagtcattgcctcattggtagaagggactattagccaaaaagttttttttcccattgaatcttagatccggtagtgcatctgttctaaacaagctcttgagttttcagtttcgctctattaccttcgataagaaattcagaagcatcgttt

SEQ ID NO: 2998 - protein, 387 aa, Zea mays subsp. mays
  peptide (1)..(387): Ceres Seq. ID no. 12367906
  misc_feature (18)..(334): Homolog of NCBI NO: 29247944 NR Description: GLP_26_54603_52153 [Giardia lamblia ATCC 50803]
NHANKNNQDDALSSGSRPTAPLRRRRRGGRAAVPRGAALHQLGGGAVPAAAAAVGRGRGVLAARGGARRHDAGRVVPARHHGGRALRAAPRVVPGVHPLPLHRLRLLRVQCDGGGAQGHGARVVPVAGVPGVPVRRRGPRGGAHLHLHPGRAGPPAQLRALLPRVHAARLRAPRRVPRLRRRAHRRHRRPRRHPAPGGGGHGRGGAPVLRRQLHRLLHAGLLGVPRALLRLRRPPRLLLQHGRHGARPRALAPRGIHGADRGVDGAAEAGAHLRAGLAAALPARLRRQDRVRRPPMEPARPRRGQLPRPLPRPARRRRQPAALERQGEALGPPGRRKAVPARRRLGQVRPAPAGRRHRDLVNTTTAFDRPLVSLFVRFRSTCSSLFC

SEQ ID NO: 2999 - protein, 360 aa, Zea mays subsp. mays
  peptide (1)..(360): Ceres Seq. ID no. 12367907
  misc_feature (60)..(352): Homolog of NCBI NO: 21554300 NR Description: putative glycosyl transferase [Arabidopsis
  misc_feature (14)..(352): Homolog of NCBI NO: 38346630 NR Description: OSJNBa0074L08.24 [Oryza sativa (japonica
  misc_feature (14)..(357): Homolog of NCBI NO: 15230299 NR Description: glycosyltransferase family; protein id:
  misc_feature (14)..(352): Homolog of NCBI NO: 21537193 NR Description: Avr9/Cf-9 rapidly elicited protein 231
  misc_feature (14)..(352): Homolog of NCBI NO: 20466660 NR Description: unknown protein [Arabidopsis thaliana]
  misc_feature (14)..(352): Homolog of NCBI NO: 18394719 NR Description: glycosyltransferase family
  misc_feature (5)..(360): Homolog of NCBI NO: 29150386 NR Description: putative glycosyl transferase
  misc_feature (54)..(350): Homolog of NCBI NO: 11281926 NR Description: hypothetical protein F26K9.90 - Arabidopsis
  misc_feature (32)..(352): Homolog of NCBI NO: 12003394 NR Description: Avr9/Cf-9 rapidly elicited protein 231 [Nicotiana
  misc_feature (60)..(352): Homolog of NCBI NO: 15235247 NR Description: predicted glycosyl transferase
TTRTRTTKMTRSPLALALLLLCAAGAAAAVPRYREAPHFTNSAAAQCPPPLQPSDADAACSPHAAVHVAMTLDASYLRGTMAAVLSVLRHASCPESIHFHFIASASSGSSATAEALRATVRASFPSLAFRVYPFADEARVAGLISTSIRGALDRPLNYARSYLASTLPACVRRVVYLDSDVVLTDDIAALAATPLPGEEGTAVAAPQYCGANFTAYFTPGFWASPALSSAFAGRRACYFNTGVMVLDLARWRRAGYTAQIEEWMELQKRVRIYELGSLPPFLLVFAGRIASVDHRWNQHGLGGDNYRGLCRGLHAGAVSLLHWSGKGKPWDRLDAGRPCPLDAVWAKYDLLRPAADIETS

SEQ ID NO: 3000 - protein, 352 aa, Zea mays subsp. mays
  peptide (1)..(352): Ceres Seq. ID no. 12367908
  misc_feature (46)..(342): Homolog of NCBI NO: 11281926 NR Description: hypothetical protein F26K9.90 - Arabidopsis
  misc_feature (24)..(344): Homolog of NCBI NO: 12003394 NR Description: Avr9/Cf-9 rapidly elicited protein 231 [Nicotiana
  misc_feature (52)..(344): Homolog of NCBI NO: 15235247 NR Description: predicted glycosyl transferase
  misc_feature (52)..(344): Homolog of NCBI NO: 21554300 NR Description: putative glycosyl transferase [Arabidopsis
  misc_feature (6)..(344): Homolog of NCBI NO: 38346630 NR Description: OSJNBa0074L08.24 [Oryza sativa (japonica
  misc_feature (6)..(349): Homolog of NCBI NO: 15230299 NR Description: glycosyltransferase family; protein id:
  misc_feature (6)..(344): Homolog of NCBI NO: 21537193 NR Description: Avr9/Cf-9 rapidly elicited protein 231
  misc_feature (6)..(344): Homolog of NCBI NO: 20466660 NR Description: unknown protein [Arabidopsis thaliana]
  misc_feature (6)..(344): Homolog of NCBI NO: 18394719 NR Description: glycosyltransferase family
  misc_feature (1)..(352): Homolog of NCBI NO: 29150386 NR Description: putative glycosyl transferase
MTRSPLALALLLLCAAGAAAAVPRYREAPHFTNSAAAQCPPPLQPSDADAACSPHAAVHVAMTLDASYLRGTMAAVLSVLRHASCPESIHFHFIASASSGSSATAEALRATVRASFPSLAFRVYPFADEARVAGLISTSIRGALDRPLNYARSYLASTLPACVRRVVYLDSDVVLTDDIAALAATPLPGEEGTAVAAPQYCGANFTAYFTPGFWASPALSSAFAGRRACYFNTGVMVLDLARWRRAGYTAQIEEWMELQKRVRIYELGSLPPFLLVFAGRIASVDHRWNQHGLGGDNYRGLCRGLHAGAVSLLHWSGKGKPWDRLDAGRPCPLDAVWAKYDLLRPAADIETS

SEQ ID NO: 3001 - DNA, 1634 bp, Zea mays subsp. mays
  misc_feature (1)..(1634): Ceres Seq. ID no. 12410453
  misc_feature: MA Experiment ID: 108502 Result: Down-regulated in Transcription
  misc_feature: MA Experiment 108502 PARAMETER Experiment Name: Zm_Drought_P Parameter: Age (day) Value: 8
  misc_feature: MA Experiment 108502 PARAMETER Experiment Name: Zm_Drought_P Parameter: Organism Value: Zea mays
  misc_feature: MA Experiment 108502 PARAMETER Experiment Name: Zm_Drought_P Parameter: Plant Line Value: 35A19
  misc_feature: MA Experiment 108502 PARAMETER Experiment Name: Zm_Drought_P Parameter: Timepoint (hr) Value: 1
  misc_feature: MA Experiment 108502 PARAMETER Experiment Name: Zm_Drought_P Parameter: Tissue Value: Aerial
  misc_feature: MA Experiment 108502 PARAMETER Experiment Name: Zm_Drought_P Parameter: Treatment Value: Drought vs. No Drought
  misc_feature: MA Experiment ID: 108522 Result: Down-regulated in Transcription
  misc_feature: MA Experiment 108522 PARAMETER Experiment Name: Zm_42deg_Heat_P Parameter: Age (day) Value: 8
  misc_feature: MA Experiment 108522 PARAMETER Experiment Name: Zm_42deg_Heat_P Parameter: Organism Value: Zea mays
  misc_feature: MA Experiment 108522 PARAMETER Experiment Name: Zm_42deg_Heat_P Parameter: Plant Line Value: 35A19
  misc_feature: MA Experiment 108522 PARAMETER Experiment Name: Zm_42deg_Heat_P Parameter: Temperature (deg C) Value: 42 vs. 22
  misc_feature: MA Experiment 108522 PARAMETER Experiment Name: Zm_42deg_Heat_P Parameter: Timepoint (hr) Value: 1
  misc_feature: MA Experiment 108522 PARAMETER Experiment Name: Zm_42deg_Heat_P Parameter: Tissue Value: Aerial
  misc_feature: MA Experiment ID: 108529 Result: Down-regulated in Transcription
  misc_feature: MA Experiment 108529 PARAMETER Experiment Name: Zm_Imbibed_Seeds_P Parameter: Age (day) Value: 5 vs. 2
  misc_feature: MA Experiment 108529 PARAMETER Experiment Name: Zm_Imbibed_Seeds_P Parameter: Organism Value: Zea mays
  misc_feature: MA Experiment 108529 PARAMETER Experiment Name: Zm_Imbibed_Seeds_P Parameter: Plant Line Value: 35A19
  misc_feature: MA Experiment 108529 PARAMETER Experiment Name: Zm_Imbibed_Seeds_P Parameter: Tissue Value: Roots vs. Embryo
  misc_feature: MA Experiment ID: 108535 Result: Up-regulated in Transcription
  misc_feature: MA Experiment 108535 PARAMETER Experiment Name: Zm_Meristem_P Parameter: Age (day) Value: 8
  misc_feature: MA Experiment 108535 PARAMETER Experiment Name: Zm_Meristem_P Parameter: Organism Value: Zea mays
  misc_feature: MA Experiment 108535 PARAMETER Experiment Name: Zm_Meristem_P Parameter: Plant Line Value: 35A19
  misc_feature: MA Experiment 108535 PARAMETER Experiment Name: Zm_Meristem_P Parameter: Tissue Value: Root Meristem vs. Above Root Meristem
  misc_feature: MA Experiment ID: 108544 Result: Down-regulated in Transcription
  misc_feature: MA Experiment ID: 108546 Result: Down-regulated in Transcription
  misc_feature: MA Experiment 108546 PARAMETER Experiment Name: Zm_Imbibed_Seeds_P Parameter: Age (day) Value: 3 vs. 2
  misc_feature: MA Experiment 108546 PARAMETER Experiment Name: Zm_Imbibed_Seeds_P Parameter: Organism Value: Zea mays
  misc_feature: MA Experiment 108546 PARAMETER Experiment Name: Zm_Imbibed_Seeds_P Parameter: Plant Line Value: 35A19
  misc_feature: MA Experiment 108546 PARAMETER Experiment Name: Zm_Imbibed_Seeds_P Parameter: Tissue Value: Roots vs. Embryo
  misc_feature: MA Experiment ID: 108688 Result: Down-regulated in Transcription
  misc_feature: MA Experiment 108688 PARAMETER Experiment Name: Zm_Embryos-Flowers__P Parameter: Tissue Value: Immature Flowers vs. Aerial+
  misc_feature: MA Experiment ID: 108689 Result: Down-regulated in Transcription
  misc_feature: MA Experiment 108689 PARAMETER Experiment Name: Zm_Drought_Roots_P Parameter: Age (day) Value: 9
  misc_feature: MA Experiment 108689 PARAMETER Experiment Name: Zm_Drought_Roots_P Parameter: Organism Value: Zea mays
  misc_feature: MA Experiment 108689 PARAMETER Experiment Name: Zm_Drought_Roots_P Parameter: Plant Line Value: 35A19
  misc_feature: MA Experiment 108689 PARAMETER Experiment Name: Zm_Drought_Roots_P Parameter: Timepoint (hr) Value: 24
  misc_feature: MA Experiment 108689 PARAMETER Experiment Name: Zm_Drought_Roots_P Parameter: Tissue Value: Roots
  misc_feature: MA Experiment 108689 PARAMETER Experiment Name: Zm_Drought_Roots_P Parameter: Treatment Value: Drought vs. No Drought
  misc_feature: MA Experiment ID: 20000478 Result: Down-regulated in Transcription
  misc_feature: MA Experiment 20000478 PARAMETER Experiment Name: Zm_5mM_SA_P Parameter: Age (day) Value: 11
  misc_feature: MA Experiment 20000478 PARAMETER Experiment Name: Zm_5mM_SA_P Parameter: Organism Value: Zea mays
  misc_feature: MA Experiment 20000478 PARAMETER Experiment Name: Zm_5mM_SA_P Parameter: Plant Line Value: 35A19
  misc_feature: MA Experiment 20000478 PARAMETER Experiment Name: Zm_5mM_SA_P Parameter: Timepoint (hr) Value: 72
  misc_feature: MA Experiment 20000478 PARAMETER Experiment Name: Zm_5mM_SA_P Parameter: Tissue Value: Aerial
  misc_feature: MA Experiment 20000478 PARAMETER Experiment Name: Zm_5mM_SA_P Parameter: Treatment Value: 5mM SA vs. No Treatment
  misc_feature: MA Experiment ID: 20000532 Result: Up-regulated in Transcription
  misc_feature: MA Experiment 20000532 PARAMETER Experiment Name: Zm_0.001percent_MeJA_P Parameter: Age (day) Value: 10
  misc_feature: MA Experiment 20000532 PARAMETER Experiment Name: Zm_0.001percent_MeJA_P Parameter: Organism Value: Zea mays
  misc_feature: MA Experiment 20000532 PARAMETER Experiment Name: Zm_0.001percent_MeJA_P Parameter: Plant Line Value: 35A19
  misc_feature: MA Experiment 20000532 PARAMETER Experiment Name: Zm_0.001percent_MeJA_P Parameter: Timepoint (hr) Value: 48
  misc_feature: MA Experiment 20000532 PARAMETER Experiment Name: Zm_0.001percent_MeJA_P Parameter: Tissue Value: Aerial
  misc_feature: MA Experiment 20000532 PARAMETER Experiment Name: Zm_0.001percent_MeJA_P Parameter: Treatment Value: 0.001percent MeJA vs. No Treatment
  misc_feature: MA Experiment ID: 20000535 Result: Up-regulated in Transcription
  misc_feature: MA Experiment 20000535 PARAMETER Experiment Name: Zm_Hybrid_Seed_Dev_P Parameter: DAP Value: 30 vs. 12
  misc_feature: MA Experiment 20000535 PARAMETER Experiment Name: Zm_Hybrid_Seed_Dev_P Parameter: Organism Value: Zea mays
  misc_feature: MA Experiment 20000535 PARAMETER Experiment Name: Zm_Hybrid_Seed_Dev_P Parameter: Plant Line Value: 35A19
  misc_feature: MA Experiment 20000535 PARAMETER Experiment Name: Zm_Hybrid_Seed_Dev_P Parameter: Tissue Value: Embryo vs. Unfert Floret
  misc_feature: MA Experiment ID: 20000626 Result: Down-regulated in Transcription
  misc_feature: MA Experiment 20000626 PARAMETER Experiment Name: Zm_Herbicide-Treatments_P Parameter: Timepoint (hr) Value: 12
  misc_feature: MA Experiment 20000626 PARAMETER Experiment Name: Zm_Herbicide-Treatments_P Parameter: Tissue Value: Aerial
  misc_feature: MA Experiment 20000626 PARAMETER Experiment Name: Zm_Herbicide-Treatments_P Parameter: Treatment Value: Roundup vs. No Treatment
acacttcaattacgattattccagataagcacgatccgatgatggccccaccgatatccgccgatgccttggtggaggctgcctcggccgtcgccgcgtacccagccatcgngccgaacagaatgctttgcaaggacgcgccggcgccggccatctctgtcgtctcgaagcagacggtccggcccgccggcgcgtcggcggcggtcggcagtggagacctcaggctctcggtgtcggacatgccgatgctatcgtgccactacatccagaaggggctgttcttcccgccgcctcctcccggcgtgctggcggcctcgctggtgtcgtcgctcgtggcggcgctctcccgcgcgctcggcgtcttccccgcgctcgccggccgcctcgtcacgctccacgacgacagcatcgtgatacggtgcggcggcgacgacgccgccgtcgagttctaccacgcggtggcgccgtctctgtcgctcggcgacttcctggtgcccggcgccgacgtgccgacccgtttgacgaacggcctgttccccatggaccggacggtgagctacggcggccacggccgcccgctcacggcgttccagctcaccgtgctcggcgacggcgccgtgttcgtcggcttcgtcgccaaccacgccgtcgtggacggcacctccttctggcacttcttcaacacgtgggcggggctgtgccgcggcgcgccggtccgggagcccgacttccgccgcaacttcttcggcgactccaccgccgtcctacgcttccccggaggcgcgagccccgccgtgacgttcgacgccgacgcgccgctccgcgagcggatcctccacttcagtgctgccgcaatcagcgagctgaaggcgacggccaaccgctcgaaaagagcaggtcaggaagccgtgctaacggcaagctcgcgcacgacgactccagacttgaagggcgttccggtgaaatctcgtcgtttcagtcgctgtgcgcgcacatctggagggcggtgacgcgcgcgcgccggctgctggctgccgacaagacgacgacgttccgcatggccgtgaactgccggcaccgtctgcgcccggcgatctccccgctctacttcggcaacgcgatccagagcgtggcgacgacggccaccgtagccgagctggcgtccaacgacctgggctgggcggccgcccggctgaacgccaccgtggcgtcgcacaaggacggcgcgatccggcgcgccgcggcggagtgggaggccgcgccccgttgcttcccgctaggcaaccccgacggggcggccctcacgatggggagctcgcctcggttcccgatgtacgacgggaacgacttcgggtggggccgcgcgctcgccgtgcggagcggccgcgcgaacaaattcgacggcaagatgtcttcgttccccggacaggctggggacggtagcatcgacgtggaggtgtgcctcgcgccagacaccatggcgcatctcctcctcgacaaggagttcttgcagtacgtgtcctcccctgcaccgtgaggcggtgacagagtgaatgtgtggcttgttgctgcgcagctacatatagtaactggatttgtaccctttcagcagatatcaagtgcttgccaacttt

SEQ ID NO: 3002 - protein, 335 aa, Zea mays subsp. mays
  peptide (1)..(335): Ceres Seq. ID no. 12410454
  misc_feature (50)..(303): Pfam Name: Transferase family Pfam Description: Transferase family
  misc_feature (50)..(294): Homolog of NCBI NO: 15239072 NR Description: N-hydroxycinnamoyl benzoyltransferase-like protein
  misc_feature (51)..(301): Homolog of NCBI NO: 38346680 NR Description: OSJNBa0069D17.11 [Oryza sativa (japonica
  misc_feature (51)..(308): Homolog of NCBI NO: 21636163 NR Description: HCBT-like putative defense response protein
  misc_feature (48)..(293): Homolog of NCBI NO: 15240227 NR Description: anthranilate
  misc_feature (47)..(309): Homolog of NCBI NO: 34899602 NR Description: N-hydroxycinnamoyl benzoyltransferase-like
  misc_feature (48)..(309): Homolog of NCBI NO: 24413968 NR Description: N-hydroxycinnamoyl/benzoyltransferase-like
  misc_feature (50)..(296): Homolog of NCBI NO: 15225603 NR Description: putative anthocyanin 5-aromatic acyltransferase
  misc_feature (47)..(293): Homolog of NCBI NO: 21666314 NR Description: AER [Nicotiana tabacum]
  misc_feature (47)..(303): Homolog of NCBI NO: 15240918 NR Description: anthranilate N-benzoyltransferase - like protein
  misc_feature (14)..(330): Homolog of NCBI NO: 34908396 NR Description: P0529E05.24 [Oryza sativa (japonica
  misc_feature (37)..(37): Xaa is any aa, unknown or other
TSITIIPDKHDPMMAPPISADALVEAASAVAAYPAIXPNRMLCKDAPAPAISVVSKQTVRPAGASAAVGSGDLRLSVSDMPMLSCHYIQKGLFFPPPPPGVLAASLVSSLVAALSRALGVFPALAGRLVTLHDDSIVIRCGGDDAAVEFYHAVAPSLSLGDFLVPGADVPTRLTNGLFPMDRTVSYGGHGRPLTAFQLTVLGDGAVFVGFVANHAVVDGTSFWHFFNTWAGLCRGAPVREPDFRRNFFGDSTAVLRFPGGASPAVTFDADAPLRERILHFSAAAISELKATANRSKRAGQEAVLTASSRTTTPDLKGVPVKSRRFSRCARTSGGR

SEQ ID NO: 3003 - protein, 323 aa, Zea mays subsp. mays
  peptide (1)..(323): Ceres Seq. ID no. 12410455
  misc_feature (38)..(291): Pfam Name: Transferase family Pfam Description: Transferase family
  misc_feature (38)..(282): Homolog of NCBI NO: 15239072 NR Description: N-hydroxycinnamoyl benzoyltransferase-like protein
  misc_feature (39)..(289): Homolog of NCBI NO: 38346680 NR Description: OSJNBa0069D17.11 [Oryza sativa (japonica
  misc_feature (39)..(296): Homolog of NCBI NO: 21636163 NR Description: HCBT-like putative defense response protein
  misc_feature (36)..(281): Homolog of NCBI NO: 15240227 NR Description: anthranilate
  misc_feature (35)..(297): Homolog of NCBI NO: 34899602 NR Description: N-hydroxycinnamoyl benzoyltransferase-like
  misc_feature (36)..(297): Homolog of NCBI NO: 24413968 NR Description: N-hydroxycinnamoyl/benzoyltransferase-like
  misc_feature (38)..(284): Homolog of NCBI NO: 15225603 NR Description: putative anthocyanin 5-aromatic acyltransferase
  misc_feature (35)..(281): Homolog of NCBI NO: 21666314 NR Description: AER [Nicotiana tabacum]
  misc_feature (35)..(291): Homolog of NCBI NO: 15240918 NR Description: anthranilate N-benzoyltransferase - like protein
  misc_feature (2)..(318): Homolog of NCBI NO: 34908396 NR Description: P0529E05.24 [Oryza sativa (japonica
  misc_feature (25)..(25): Xaa is any aa, unknown or other
MMAPPISADALVEAASAVAAYPAIXPNRMLCKDAPAPAISVVSKQTVRPAGASAAVGSGDLRLSVSDMPMLSCHYIQKGLFFPPPPPGVLAASLVSSLVAALSRALGVFPALAGRLVTLHDDSIVIRCGGDDAAVEFYHAVAPSLSLGDFLVPGADVPTRLTNGLFPMDRTVSYGGHGRPLTAFQLTVLGDGAVFVGFVANHAVVDGTSFWHFFNTWAGLCRGAPVREPDFRRNFFGDSTAVLRFPGGASPAVTFDADAPLRERILHFSAAAISELKATANRSKRAGQEAVLTASSRTTTPDLKGVPVKSRRFSRCARTSGGR

SEQ ID NO: 3004 - protein, 322 aa, Zea mays subsp. mays
  peptide (1)..(322): Ceres Seq. ID no. 12410456
  misc_feature (37)..(290): Pfam Name: Transferase family Pfam Description: Transferase family
  misc_feature (37)..(281): Homolog of NCBI NO: 15239072 NR Description: N-hydroxycinnamoyl benzoyltransferase-like protein
  misc_feature (38)..(288): Homolog of NCBI NO: 38346680 NR Description: OSJNBa0069D17.11 [Oryza sativa (japonica
  misc_feature (38)..(295): Homolog of NCBI NO: 21636163 NR Description: HCBT-like putative defense response protein
  misc_feature (35)..(280): Homolog of NCBI NO: 15240227 NR Description: anthranilate
  misc_feature (34)..(296): Homolog of NCBI NO: 34899602 NR Description: N-hydroxycinnamoyl benzoyltransferase-like
  misc_feature (35)..(296): Homolog of NCBI NO: 24413968 NR Description: N-hydroxycinnamoyl/benzoyltransferase-like
  misc_feature (37)..(283): Homolog of NCBI NO: 15225603 NR Description: putative anthocyanin 5-aromatic acyltransferase
  misc_feature (34)..(280): Homolog of NCBI NO: 21666314 NR Description: AER [Nicotiana tabacum]
  misc_feature (34)..(290): Homolog of NCBI NO: 15240918 NR Description: anthranilate N-benzoyltransferase - like protein
  misc_feature (1)..(317): Homolog of NCBI NO: 34908396 NR Description: P0529E05.24 [Oryza sativa (japonica
  misc_feature (24)..(24): Xaa is any aa, unknown or other
MAPPISADALVEAASAVAAYPAIXPNRMLCKDAPAPAISVVSKQTVRPAGASAAVGSGDLRLSVSDMPMLSCHYIQKGLFFPPPPPGVLAASLVSSLVAALSRALGVFPALAGRLVTLHDDSIVIRCGGDDAAVEFYHAVAPSLSLGDFLVPGADVPTRLTNGLFPMDRTVSYGGHGRPLTAFQLTVLGDGAVFVGFVANHAVVDGTSFWHFFNTWAGLCRGAPVREPDFRRNFFGDSTAVLRFPGGASPAVTFDADAPLRERILHFSAAAISELKATANRSKRAGQEAVLTASSRTTTPDLKGVPVKSRRFSRCARTSGGR

SEQ ID NO: 3005 - DNA, 1283 bp, Zea mays subsp. mays
  misc_feature (1)..(1283): Ceres Seq. ID no. 12356020
  misc_feature: MA Experiment ID: 108529 Result: Up-regulated in Transcription
  misc_feature: MA Experiment 108529 PARAMETER Experiment Name: Zm_Imbibed_Seeds_P Parameter: Age (day) Value: 5 vs. 2
  misc_feature: MA Experiment 108529 PARAMETER Experiment Name: Zm_Imbibed_Seeds_P Parameter: Organism Value: Zea mays
  misc_feature: MA Experiment 108529 PARAMETER Experiment Name: Zm_Imbibed_Seeds_P Parameter: Plant Line Value: 35A19
  misc_feature: MA Experiment 108529 PARAMETER Experiment Name: Zm_Imbibed_Seeds_P Parameter: Tissue Value: Roots vs. Embryo
  misc_feature: MA Experiment ID: 108535 Result: Down-regulated in Transcription
  misc_feature: MA Experiment 108535 PARAMETER Experiment Name: Zm_Meristem_P Parameter: Age (day) Value: 8
  misc_feature: MA Experiment 108535 PARAMETER Experiment Name: Zm_Meristem_P Parameter: Organism Value: Zea mays
  misc_feature: MA Experiment 108535 PARAMETER Experiment Name: Zm_Meristem_P Parameter: Plant Line Value: 35A19
  misc_feature: MA Experiment 108535 PARAMETER Experiment Name: Zm_Meristem_P Parameter: Tissue Value: Root Meristem vs. Above Root Meristem
  misc_feature: MA Experiment ID: 20000480 Result: Down-regulated in Transcription
  misc_feature: MA Experiment 20000480 PARAMETER Experiment Name: Zm_Drought_P Parameter: Age (day) Value: 11
  misc_feature: MA Experiment 20000480 PARAMETER Experiment Name: Zm_Drought_P Parameter: Organism Value: Zea mays
  misc_feature: MA Experiment 20000480 PARAMETER Experiment Name: Zm_Drought_P Parameter: Plant Line Value: 35A19
  misc_feature: MA Experiment 20000480 PARAMETER Experiment Name: Zm_Drought_P Parameter: Timepoint (hr) Value: 72
  misc_feature: MA Experiment 20000480 PARAMETER Experiment Name: Zm_Drought_P Parameter: Tissue Value: Aerial
  misc_feature: MA Experiment 20000480 PARAMETER Experiment Name: Zm_Drought_P Parameter: Treatment Value: Drought vs. No Drought
  misc_feature: MA Experiment ID: 20000492 Result: Down-regulated in Transcription
  misc_feature: MA Experiment 20000492 PARAMETER Experiment Name: Zm_Hybrid_Seed_Dev_P Parameter: DAP Value: 12
  misc_feature: MA Experiment 20000492 PARAMETER Experiment Name: Zm_Hybrid_Seed_Dev_P Parameter: Organism Value: Zea mays
  misc_feature: MA Experiment 20000492 PARAMETER Experiment Name: Zm_Hybrid_Seed_Dev_P Parameter: Plant Line Value: 35A19
  misc_feature: MA Experiment 20000492 PARAMETER Experiment Name: Zm_Hybrid_Seed_Dev_P Parameter: Tissue Value: Fert Kernel vs. Unfert Floret
  misc_feature: MA Experiment ID: 20000532 Result: Up-regulated in Transcription
  misc_feature: MA Experiment 20000532 PARAMETER Experiment Name: Zm_0.001percent_MeJA_P Parameter: Age (day) Value: 10
  misc_feature: MA Experiment 20000532 PARAMETER Experiment Name: Zm_0.001percent_MeJA_P Parameter: Organism Value: Zea mays
  misc_feature: MA Experiment 20000532 PARAMETER Experiment Name: Zm_0.001percent_MeJA_P Parameter: Plant Line Value: 35A19
  misc_feature: MA Experiment 20000532 PARAMETER Experiment Name: Zm_0.001percent_MeJA_P Parameter: Timepoint (hr) Value: 48
  misc_feature: MA Experiment 20000532 PARAMETER Experiment Name: Zm_0.001percent_MeJA_P Parameter: Tissue Value: Aerial
  misc_feature: MA Experiment 20000532 PARAMETER Experiment Name: Zm_0.001percent_MeJA_P Parameter: Treatment Value: 0.001percent MeJA vs. No Treatment
  misc_feature: MA Experiment ID: 20000626 Result: Down-regulated in Transcription
  misc_feature: MA Experiment 20000626 PARAMETER Experiment Name: Zm_Herbicide-Treatments_P Parameter: Timepoint (hr) Value: 12
  misc_feature: MA Experiment 20000626 PARAMETER Experiment Name: Zm_Herbicide-Treatments_P Parameter: Tissue Value: Aerial
  misc_feature: MA Experiment 20000626 PARAMETER Experiment Name: Zm_Herbicide-Treatments_P Parameter: Treatment Value: Roundup vs. No Treatment
  misc_feature: MA Experiment ID: 20000629 Result: Down-regulated in Transcription
  misc_feature: MA Experiment 20000629 PARAMETER Experiment Name: Zm_Herbicide-Treatments_P Parameter: Timepoint (hr) Value: 12
  misc_feature: MA Experiment 20000629 PARAMETER Experiment Name: Zm_Herbicide-Treatments_P Parameter: Tissue Value: Aerial
  misc_feature: MA Experiment 20000629 PARAMETER Experiment Name: Zm_Herbicide-Treatments_P Parameter: Treatment Value: Trimec vs. No Treatment
gcccacctaccactaccagtcgcggacgctcctcccacaactcgcgggtctcgagatgttcaggggttgcggcctgttcgccggcgcccgccgggggcgcggcggcgacctcaggaagcgcggggagcaaggcggcgcgagctcgcgggtggcgccggccgagcccgtgtgcgtggacgaggcggaggacggcggcgccgcgcggcagctggcgtgggcggaggtggagaccgccacgggcggcttctcgtccagggtggtcggccgcggcggcttcagcacggtgtacctcgcctcgctctcctcctcgcggctcggcgccgtcaaggtgcactgcagcagcgagcgcctccgccgcgcgttccgccgggagctcgacgtgctgctctccctccgccacccgcacgtcgtccgcctcctcgcctactgcgacgagcgcgacgagggcgtgctggtgttcgagtacgcgcccaacggcgacctccacgagaggctccacggcggcgcgggcgcgggcaccctcccctgggcgcgccgcgtggcggtcgcgttccaggtggcctcggcgctggagtacctccacgagggccgcgacccggccgtcgtccacggggacatcaaggcctccaacgtcctcctcgacgccagcatggacgccaagctctgcgacttcggcttcgcgcacgtcggcgtctcggccacgatgggcggccgccggccctcggaccgcgccgtcatgggctctccgggctacgtcgacccgcacctcctccgctccggagtggccaccaaggcgagcgacgtgtacagctttggcgtgctgctgctcgagctcctgacgggcaaggaggccgtctgccgcgagacagggcaccggctcacggccgcggtgaggcctaagctcagcgatggtgatcaactgccgggcgttctggaccagaggctgggaggagactacgacgccgctgaggcggccgccgtggccgagctcgccatgcagtgcgtcagtgacagccctgggctccgcccgtccatggccgacgtggtgcgcgtgctccaggagaagacctccgccgctggatcgagagtcgaccgcaagcaagatggtgtcctaagttagatgcctatggagtagtgtgtaaatatgtccttgatggtgctataattgtgttgagggtagttagccacaagaattggcgcagtgagatgaggttttagaatcactagatctctgatagaaaattttgtcatgccatcgagttgtcaatttgtcttgttgtgtt

SEQ ID NO: 3006 - protein, 354 aa, Zea mays subsp. mays
  peptide (1)..(354): Ceres Seq. ID no. 12356021
  misc_feature (68)..(334): Pfam Name: Protein kinase domain Pfam Description: Protein kinase domain
  misc_feature (50)..(344): Homolog of NCBI NO: 25405505 NR Description: probable protein kinase [imported] - Arabidopsis
  misc_feature (50)..(344): Homolog of NCBI NO: 15218054 NR Description: receptor-like protein kinase, putative; protein
  misc_feature (50)..(350): Homolog of NCBI NO: 15227018 NR Description: putative receptor-like protein kinase; protein
  misc_feature (54)..(287): Homolog of NCBI NO: 25403176 NR Description: probable protein kinase [imported] - Arabidopsis
  misc_feature (54)..(300): Homolog of NCBI NO: 30692836 NR Description: protein kinase family [Arabidopsis thaliana]
  misc_feature (43)..(334): Homolog of NCBI NO: 15235071 NR Description: putative protein kinase
  misc_feature (162)..(354): Homolog of NCBI NO: 29367339 NR Description: putative receptor protein kinase
  misc_feature (4)..(351): Homolog of NCBI NO: 37536060 NR Description: putative receptor protein kinase
  misc_feature (48)..(342): Homolog of NCBI NO: 27476081 NR Description: Hypothetical protein [Oryza sativa (japonica
  misc_feature (1)..(348): Homolog of NCBI NO: 38344983 NR Description: OSJNBa0011L07.13 [Oryza sativa (japonica
MFRGCGLFAGARRGRGGDLRKRGEQGGASSRVAPAEPVCVDEAEDGGAARQLAWAEVETATGGFSSRVVGRGGFSTVYLASLSSSRLGAVKVHCSSERLRRAFRRELDVLLSLRHPHVVRLLAYCDERDEGVLVFEYAPNGDLHERLHGGAGAGTLPWARRVAVAFQVASALEYLHEGRDPAVVHGDIKASNVLLDASMDAKLCDFGFAHVGVSATMGGRRPSDRAVMGSPGYVDPHLLRSGVATKASDVYSFGVLLLELLTGKEAVCRETGHRLTAAVRPKLSDGDQLPGVLDQRLGGDYDAAEAAAVAELAMQCVSDSPGLRPSMADVVRVLQEKTSAAGSRVDRKQDGVLS

SEQ ID NO: 3007 - protein, 299 aa, Zea mays subsp. mays
  peptide (1)..(299): Ceres Seq. ID no. 12356022
  misc_feature (6)..(288): Homolog of NCBI NO: 29829093 NR Description: putative translation initiation factor IF-2
AHLPLPVADAPPTTRGSRDVQGLRPVRRRPPGARRRPQEARGARRRELAGGAGRARVRGRGGGRRRRAAAGVGGGGDRHGRLLVQGGRPRRLQHGVPRLALLLAARRRQGALQQRAPPPRVPPGARRAALPPPPARRPPPRLLRRARRGRAGVRVRAQRRPPREAPRRRGRGHPPLGAPRGGRVPGGLGAGVPPRGPRPGRRPRGHQGLQRPPRRQHGRQALRLRLRARRRLGHDGRPPALGPRRHGLSGLRRPAPPPLRSGHQGERRVQLWRAAARAPDGQGGRLPRDRAPAHGRGEA

SEQ ID NO: 3008 - protein, 372 aa, Zea mays subsp. mays
  peptide (1)..(372): Ceres Seq. ID no. 12356023
  misc_feature (86)..(352): Pfam Name: Protein kinase domain Pfam Description: Protein kinase domain
  misc_feature (68)..(362): Homolog of NCBI NO: 25405505 NR Description: probable protein kinase [imported] - Arabidopsis
  misc_feature (68)..(362): Homolog of NCBI NO: 15218054 NR Description: receptor-like protein kinase, putative; protein
  misc_feature (68)..(368): Homolog of NCBI NO: 15227018 NR Description: putative receptor-like protein kinase; protein
  misc_feature (72)..(305): Homolog of NCBI NO: 25403176 NR Description: probable protein kinase [imported] - Arabidopsis
  misc_feature (72)..(318): Homolog of NCBI NO: 30692836 NR Description: protein kinase family [Arabidopsis thaliana]
  misc_feature (61)..(352): Homolog of NCBI NO: 15235071 NR Description: putative protein kinase
  misc_feature (180)..(372): Homolog of NCBI NO: 29367339 NR Description: putative receptor protein kinase
  misc_feature (22)..(369): Homolog of NCBI NO: 37536060 NR Description: putative receptor protein kinase
  misc_feature (66)..(360): Homolog of NCBI NO: 27476081 NR Description: Hypothetical protein [Oryza sativa (japonica
  misc_feature (19)..(366): Homolog of NCBI NO: 38344983 NR Description: OSJNBa0011L07.13 [Oryza sativa (japonica
PTYHYQSRTLLPQLAGLEMFRGCGLFAGARRGRGGDLRKRGEQGGASSRVAPAEPVCVDEAEDGGAARQLAWAEVETATGGFSSRVVGRGGFSTVYLASLSSSRLGAVKVHCSSERLRRAFRRELDVLLSLRHPHVVRLLAYCDERDEGVLVFEYAPNGDLHERLHGGAGAGTLPWARRVAVAFQVASALEYLHEGRDPAVVHGDIKASNVLLDASMDAKLCDFGFAHVGVSATMGGRRPSDRAVMGSPGYVDPHLLRSGVATKASDVYSFGVLLLELLTGKEAVCRETGHRLTAAVRPKLSDGDQLPGVLDQRLGGDYDAAEAAAVAELAMQCVSDSPGLRPSMADVVRVLQEKTSAAGSRVDRKQDGVLS

SEQ ID NO: 3009 - DNA, 1544 bp, Zea mays subsp. mays
  misc_feature (1)..(1544): Ceres Seq. ID no. 12405741
  misc_feature: MA Experiment ID: 108543 Result: Up-regulated in Transcription
  misc_feature: MA Experiment ID: 20000477 Result: Down-regulated in Transcription
  misc_feature: MA Experiment 20000477 PARAMETER Experiment Name: Zm_5mM_SA_P Parameter: Age (day) Value: 10
  misc_feature: MA Experiment 20000477 PARAMETER Experiment Name: Zm_5mM_SA_P Parameter: Organism Value: Zea mays
  misc_feature: MA Experiment 20000477 PARAMETER Experiment Name: Zm_5mM_SA_P Parameter: Plant Line Value: 35A19
  misc_feature: MA Experiment 20000477 PARAMETER Experiment Name: Zm_5mM_SA_P Parameter: Timepoint (hr) Value: 48
  misc_feature: MA Experiment 20000477 PARAMETER Experiment Name: Zm_5mM_SA_P Parameter: Tissue Value: Aerial
  misc_feature: MA Experiment 20000477 PARAMETER Experiment Name: Zm_5mM_SA_P Parameter: Treatment Value: 5mM SA vs. No Treatment
  misc_feature: MA Experiment ID: 20000492 Result: Down-regulated in Transcription
  misc_feature: MA Experiment 20000492 PARAMETER Experiment Name: Zm_Hybrid_Seed_Dev_P Parameter: DAP Value: 12
  misc_feature: MA Experiment 20000492 PARAMETER Experiment Name: Zm_Hybrid_Seed_Dev_P Parameter: Organism Value: Zea mays
  misc_feature: MA Experiment 20000492 PARAMETER Experiment Name: Zm_Hybrid_Seed_Dev_P Parameter: Plant Line Value: 35A19
  misc_feature: MA Experiment 20000492 PARAMETER Experiment Name: Zm_Hybrid_Seed_Dev_P Parameter: Tissue Value: Fert Kernel vs. Unfert Floret
  misc_feature: MA Experiment ID: 20000535 Result: Down-regulated in Transcription
  misc_feature: MA Experiment 20000535 PARAMETER Experiment Name: Zm_Hybrid_Seed_Dev_P Parameter: DAP Value: 30 vs. 12
  misc_feature: MA Experiment 20000535 PARAMETER Experiment Name: Zm_Hybrid_Seed_Dev_P Parameter: Organism Value: Zea mays
  misc_feature: MA Experiment 20000535 PARAMETER Experiment Name: Zm_Hybrid_Seed_Dev_P Parameter: Plant Line Value: 35A19
  misc_feature: MA Experiment 20000535 PARAMETER Experiment Name: Zm_Hybrid_Seed_Dev_P Parameter: Tissue Value: Embryo vs. Unfert Floret
aaaggacgggcaaagagccggagccgcgaccgacgactcatcagacatggcgaagccggcggcggcgaggaagccctctgcggcgtcgaccgtcgcactgacactggttctggccctggcttcggctgtcctcctcttcctcctgctccgcttctctccctcctccccgtcccccaacccgcacccgcaccgccgcctccgcctccgcccccgcgcgcatgcgcaccaccaccagatcccattcgaccctgtcgtcgcggacatagagcgccgcctcgaagaccacgagtgggagcgcctcgccgctgcagggctgcacgctccgggcatggaggcggcgccagtcccagaggatctcaccgacggtgaggtcgacgccgacgaggactacatcaatgacgctgcgcgcttcaacgtcacgcttcgcgtggaggcgctgttcccaaagatcgacgtcgaccctgccgatggcgccgtcacgggcgctgagctggccgcgtggaacctcgcaaatgcgcggcgggaggtgctacaccgcaccgcccgggagctcgagctgcacgaccgcgatcacgacggccgggtcgcctacggcgaatacgagcggcccagctgggcctggcgtttcgacgatcataactcaaccgatgacggagcgggatggtggaaggaggagcattttagtgctgcagatatggatggtgatggctttctaaatcttactgagtttaatgactttttacatccagctgatactaccaacccaaagctaatacattggttgtgcaaagaagaagtcagggaaagagataaagacaatgatgggaagctcaatttccaagagttcttcaacggattattttactcaattcgacactatgatgatgaaggcttaacagatgacaccggtggctctgatgcaccagctaaaaagtcattttcacaccttgatctggataatgatgggctcttatcagcagatgagctaaagcctgtaattggtaatctccatccatcagaatacttctatgccaagcaacaagccgactatgtaatatctcaggctgacacgaacaaagatggacaattgagcatgaatgagatgatcgagaacccctatgtcttttacaatgctttattcacagaagatgattatggctttcatgacgagctccgttagttcccaattcaacacaaagctttatggaatcaccactgtaggaagtcggaagactttgttatgcactgctaagaccatttccgttttctgtctgaaatcatccatcatttgacggtgattccatgtaaaacaagcatgtttttagatgcacctattctagaagctgtgttcttttgtactacccttgagccttttttatagtttgttgtttttttaatcatatatgtacggtgaggatgtgagtgagttttgttctttcaacttcttgaatcttgatacgatacaaaactagcgtcttccagaatcacaatttgtaaaccatacaaacccaggaaagcattactgtaagccatgaattgacgtt

SEQ ID NO: 3010 - protein, 392 aa, Zea mays subsp. mays
  peptide (1)..(392): Ceres Seq. ID no. 12405742
  misc_feature (222)..(250): Pfam Name: EF hand Pfam Description: EF hand
  misc_feature (142)..(390): Homolog of NCBI NO: 37904869 NR Description: cardiac calumenin [Oryctolagus cuniculus]
  misc_feature (142)..(390): Homolog of NCBI NO: 6680840 NR Description: calumenin [Mus musculus]
  misc_feature (142)..(390): Homolog of NCBI NO: 30583871 NR Description: Homo sapiens calumenin [synthetic construct]
  misc_feature (142)..(390): Homolog of NCBI NO: 4502551 NR Description: calumenin precursor [Homo sapiens]
  misc_feature (142)..(390): Homolog of NCBI NO: 2809324 NR Description: calumenin [Homo sapiens]
  misc_feature (267)..(392): Homolog of NCBI NO: 34914276 NR Description: B1151A10.4 [Oryza sativa (japonica
  misc_feature (75)..(259): Homolog of NCBI NO: 34914276 NR Description: B1151A10.4 [Oryza sativa (japonica
  misc_feature (35)..(392): Homolog of NCBI NO: 38345557 NR Description: OSJNBa0032F06.6 [Oryza sativa (japonica
  misc_feature (78)..(391): Homolog of NCBI NO: 15234272 NR Description: putative calcium binding protein; protein id:
  misc_feature (63)..(392): Homolog of NCBI NO: 18415883 NR Description: expressed protein
KDGQRAGAATDDSSDMAKPAAARKPSAASTVALTLVLALASAVLLFLLLRFSPSSPSPNPHPHRRLRLRPRAHAHHHQIPFDPVVADIERRLEDHEWERLAAAGLHAPGMEAAPVPEDLTDGEVDADEDYINDAARFNVTLRVEALFPKIDVDPADGAVTGAELAAWNLANARREVLHRTARELELHDRDHDGRVAYGEYERPSWAWRFDDHNSTDDGAGWWKEEHFSAADMDGDGFLNLTEFNDFLHPADTTNPKLIHWLCKEEVRERDKDNDGKLNFQEFFNGLFYSIRHYDDEGLTDDTGGSDAPAKKSFSHLDLDNDGLLSADELKPVIGNLHPSEYFYAKQQADYVISQADTNKDGQLSMNEMIENPYVFYNALFTEDDYGFHDELR

SEQ ID NO: 3011 - protein, 377 aa, Zea mays subsp. mays
  peptide (1)..(377): Ceres Seq. ID no. 12405743
  misc_feature (207)..(235): Pfam Name: EF hand Pfam Description: EF hand
  misc_feature (127)..(375): Homolog of NCBI NO: 2809324 NR Description: calumenin [Homo sapiens]
  misc_feature (252)..(377): Homolog of NCBI NO: 34914276 NR Description: B1151A10.4 [Oryza sativa (japonica
  misc_feature (60)..(244): Homolog of NCBI NO: 34914276 NR Description: B1151A10.4 [Oryza sativa (japonica
  misc_feature (127)..(375): Homolog of NCBI NO: 37904869 NR Description: cardiac calumenin [Oryctolagus cuniculus]
  misc_feature (127)..(375): Homolog of NCBI NO: 30583871 NR Description: Homo sapiens calumenin [synthetic construct]
  misc_feature (127)..(375): Homolog of NCBI NO: 4502551 NR Description: calumenin precursor [Homo sapiens]
  misc_feature (127)..(375): Homolog of NCBI NO: 6680840 NR Description: calumenin [Mus musculus]
  misc_feature (20)..(377): Homolog of NCBI NO: 38345557 NR Description: OSJNBa0032F06.6 [Oryza sativa (japonica
  misc_feature (63)..(376): Homolog of NCBI NO: 15234272 NR Description: putative calcium binding protein; protein id:
  misc_feature (48)..(377): Homolog of NCBI NO: 18415883 NR Description: expressed protein
MAKPAAARKPSAASTVALTLVLALASAVLLFLLLRFSPSSPSPNPHPHRRLRLRPRAHAHHHQIPFDPVVADIERRLEDHEWERLAAAGLHAPGMEAAPVPEDLTDGEVDADEDYINDAARFNVTLRVEALFPKIDVDPADGAVTGAELAAWNLANARREVLHRTARELELHDRDHDGRVAYGEYERPSWAWRFDDHNSTDDGAGWWKEEHFSAADMDGDGFLNLTEFNDFLHPADTTNPKLIHWLCKEEVRERDKDNDGKLNFQEFFNGLFYSIRHYDDEGLTDDTGGSDAPAKKSFSHLDLDNDGLLSADELKPVIGNLHPSEYFYAKQQADYVISQADTNKDGQLSMNEMIENPYVFYNALFTEDDYGFHDELR

SEQ ID NO: 3012 - protein, 283 aa, Zea mays subsp. mays
  peptide (1)..(283): Ceres Seq. ID no. 12405744
  misc_feature (113)..(141): Pfam Name: EF hand Pfam Description: EF hand
  misc_feature (33)..(281): Homolog of NCBI NO: 37904869 NR Description: cardiac calumenin [Oryctolagus cuniculus]
  misc_feature (33)..(281): Homolog of NCBI NO: 6680840 NR Description: calumenin [Mus musculus]
  misc_feature (33)..(281): Homolog of NCBI NO: 30583871 NR Description: Homo sapiens calumenin [synthetic construct]
  misc_feature (33)..(281): Homolog of NCBI NO: 4502551 NR Description: calumenin precursor [Homo sapiens]
  misc_feature (33)..(281): Homolog of NCBI NO: 2809324 NR Description: calumenin [Homo sapiens]
  misc_feature (158)..(283): Homolog of NCBI NO: 34914276 NR Description: B1151A10.4 [Oryza sativa (japonica
  misc_feature (1)..(150): Homolog of NCBI NO: 34914276 NR Description: B1151A10.4 [Oryza sativa (japonica
  misc_feature (1)..(283): Homolog of NCBI NO: 38345557 NR Description: OSJNBa0032F06.6 [Oryza sativa (japonica
  misc_feature (1)..(282): Homolog of NCBI NO: 15234272 NR Description: putative calcium binding protein; protein id:
  misc_feature (1)..(283): Homolog of NCBI NO: 18415883 NR Description: expressed protein
MEAAPVPEDLTDGEVDADEDYINDAARFNVTLRVEALFPKIDVDPADGAVTGAELAAWNLANARREVLHRTARELELHDRDHDGRVAYGEYERPSWAWRFDDHNSTDDGAGWWKEEHFSAADMDGDGFLNLTEFNDFLHPADTTNPKLIHWLCKEEVRERDKDNDGKLNFQEFFNGLFYSIRHYDDEGLTDDTGGSDAPAKKSFSHLDLDNDGLLSADELKPVIGNLHPSEYFYAKQQADYVISQADTNKDGQLSMNEMIENPYVFYNALFTEDDYGFHDELR

SEQ ID NO: 3013 - DNA, 1658 bp, Zea mays subsp. mays
  misc_feature (1)..(1658): Ceres Seq. ID no. 13494433
  misc_feature: MA Experiment ID: 108527 Result: Down-regulated in Transcription
  misc_feature: MA Experiment 108527 PARAMETER Experiment Name: Zm_5mM_NO_P Parameter: Age (day) Value: 8
  misc_feature: MA Experiment 108527 PARAMETER Experiment Name: Zm_5mM_NO_P Parameter: Organism Value: Zea mays
  misc_feature: MA Experiment 108527 PARAMETER Experiment Name: Zm_5mM_NO_P Parameter: Plant Line Value: 35A19
  misc_feature: MA Experiment 108527 PARAMETER Experiment Name: Zm_5mM_NO_P Parameter: Timepoint (hr) Value: 6
  misc_feature: MA Experiment 108527 PARAMETER Experiment Name: Zm_5mM_NO_P Parameter: Tissue Value: Aerial
  misc_feature: MA Experiment 108527 PARAMETER Experiment Name: Zm_5mM_NO_P Parameter: Treatment Value: 5mM NO vs. No Treatment
  misc_feature: MA Experiment ID: 108544 Result: Up-regulated in Transcription
  misc_feature: MA Experiment ID: 108559 Result: Down-regulated in Transcription
  misc_feature: MA Experiment 108559 PARAMETER Experiment Name: Zm_5mM_NO_P Parameter: Age (day) Value: 8
  misc_feature: MA Experiment 108559 PARAMETER Experiment Name: Zm_5mM_NO_P Parameter: Organism Value: Zea mays
  misc_feature: MA Experiment 108559 PARAMETER Experiment Name: Zm_5mM_NO_P Parameter: Plant Line Value: 35A19
  misc_feature: MA Experiment 108559 PARAMETER Experiment Name: Zm_5mM_NO_P Parameter: Timepoint (hr) Value: 12
  misc_feature: MA Experiment 108559 PARAMETER Experiment Name: Zm_5mM_NO_P Parameter: Tissue Value: Aerial
  misc_feature: MA Experiment 108559 PARAMETER Experiment Name: Zm_5mM_NO_P Parameter: Treatment Value: 5mM NO vs. No Treatment
  misc_feature: MA Experiment ID: 108689 Result: Down-regulated in Transcription
  misc_feature: MA Experiment 108689 PARAMETER Experiment Name: Zm_Drought_Roots_P Parameter: Age (day) Value: 9
  misc_feature: MA Experiment 108689 PARAMETER Experiment Name: Zm_Drought_Roots_P Parameter: Organism Value: Zea mays
  misc_feature: MA Experiment 108689 PARAMETER Experiment Name: Zm_Drought_Roots_P Parameter: Plant Line Value: 35A19
  misc_feature: MA Experiment 108689 PARAMETER Experiment Name: Zm_Drought_Roots_P Parameter: Timepoint (hr) Value: 24
  misc_feature: MA Experiment 108689 PARAMETER Experiment Name: Zm_Drought_Roots_P Parameter: Tissue Value: Roots
  misc_feature: MA Experiment 108689 PARAMETER Experiment Name: Zm_Drought_Roots_P Parameter: Treatment Value: Drought vs. No Drought
  misc_feature: MA Experiment ID: 20000535 Result: Down-regulated in Transcription
  misc_feature: MA Experiment 20000535 PARAMETER Experiment Name: Zm_Hybrid_Seed_Dev_P Parameter: DAP Value: 30 vs. 12
  misc_feature: MA Experiment 20000535 PARAMETER Experiment Name: Zm_Hybrid_Seed_Dev_P Parameter: Organism Value: Zea mays
  misc_feature: MA Experiment 20000535 PARAMETER Experiment Name: Zm_Hybrid_Seed_Dev_P Parameter: Plant Line Value: 35A19
  misc_feature: MA Experiment 20000535 PARAMETER Experiment Name: Zm_Hybrid_Seed_Dev_P Parameter: Tissue Value: Embryo vs. Unfert Floret
atcaaacgcccacgcagcgccggggatggagcgcggccggcaccagatgagagctgcctcccacacatggcatcgtggccagcagcgtcaaggaggcggtccagcggcggcatgaaaagcgccgagctttcgggctccggtgcttcttacggctatggccggacgtcctcctcccctgatgcctgcggctacggccggcagctctcggcctacagcgcccgctcctcccaggtcagcaggagtggctccttcagtgcggcggcgcagcgggtcgccggcgccttcaccggctgcttcgtgccgcgccggcaggtcaaagccggggaagaggaggaggaggaggagaagaagagcaagcgctccatggattcaggatcctatcatggatggaatgaagcaaacttgagtgcagcagcaggatcatggcaggaaggcagggctctcaccatcgctgacgtgtcgaaggcaacatcaaacttcagcgaaaagaacgtgataaggcagggacgctcaagcaccatgtacagaggaaagctcagggatggttctcagatcgccgtcaaatgtgtcacgaagctgaacgaccagagtccgacggctgaactctggagggagcttgagaagatccagcacaggaatctggcgaggctctttggattcttcgaacgcgcagctgatagtctcgtcgtagtcgagtatgtcggcaatggttccttgagggaacatttggatgaatcatgtggaaatggtttagagctcgcgcaacggctcaacatcgcgatcgacgttgctcaggccatcacctacctgcacgagtacaaagagcgtccgatcatccatggcggcatccggtcgtcgggcgtgctactgaccgacgcgctgacggcgaaggtggccggctttgggctggccgggactgcggcctcggggtcgggctcaggctccgacgcaacgccggcgaggagcgccgccgggtacgtggacccggagtacctgagcacgtaccagctgaccgacaagagcgacgtgtacgccttcggcgtcctcctcgtcgagctagccaccggccggccgcccgtcgagcgcacccgcggcggcgaggcccggctcaccaccaaatgggcgttgcagaggtgcagagcaggggaagccgtggtggccatggaccccaggatgcggcggagcccggcgtcggtggccgccgtggagagggcgctggcgctggcagcgcagagcgtcgcggcggccagggatgagcggccgtccatgcggcggtgcagcgagctgctgtggaccatccggagagactaccaccgccaggaggagccgcgctgcggcgccgtcgctgaggaacgtagcgacgagtgggtcatcaggtagcttagcttgccagttgaatggatatgattctgctttggattgatcggcatggaactgtaactagcctgtaagtggatgcgaagttctaggaagctgcagattttttttagcacgtacaacttctgtgattactatcaaatgatgtagtcattgcagccaatacctgcgaatttctagaaaacagtagacgttgtaaacaatcagacgactttgctgaagtagccacttgatccctcaatcaaatataaataaccatcgaaggatgaggatgttgatgc

SEQ ID NO: 3014 - protein, 459 aa, Zea mays subsp. mays
  peptide (1)..(459): Ceres Seq. ID no. 13494434
  misc_feature (248)..(437): Homolog of NCBI NO: 7434312 NR Description: receptor-like protein kinase 5 homolog
  misc_feature (148)..(440): Homolog of NCBI NO: 25287604 NR Description: probable protein kinase [imported] - Arabidopsis
  misc_feature (148)..(440): Homolog of NCBI NO: 18397027 NR Description: protein kinase family [Arabidopsis thaliana]
  misc_feature (137)..(441): Homolog of NCBI NO: 38345153 NR Description: OSJNBa0014K14.7 [Oryza sativa (japonica
  misc_feature (144)..(436): Homolog of NCBI NO: 15237782 NR Description: protein kinase family [Arabidopsis thaliana]
  misc_feature (31)..(443): Homolog of NCBI NO: 27261468 NR Description: Hypothetical protein [Oryza sativa (japonica
  misc_feature (85)..(437): Homolog of NCBI NO: 22328175 NR Description: protein kinase family [Arabidopsis thaliana]
  misc_feature (114)..(436): Homolog of NCBI NO: 9759225 NR Description: contains similarity to protein
  misc_feature (148)..(452): Homolog of NCBI NO: 34908354 NR Description: P0529H11.30 [Oryza sativa (japonica
  misc_feature (27)..(457): Homolog of NCBI NO: 34897358 NR Description: putative receptor kinase [Oryza sativa]
IKRPRSAGDGARPAPDESCLPHMASWPAASRRRSSGGMKSAELSGSGASYGYGRTSSSPDACGYGRQLSAYSARSSQVSRSGSFSAAAQRVAGAFTGCFVPRRQVKAGEEEEEEEKKSKRSMDSGSYHGWNEANLSAAAGSWQEGRALTIADVSKATSNFSEKNVIRQGRSSTMYRGKLRDGSQIAVKCVTKLNDQSPTAELWRELEKIQHRNLARLFGFFERAADSLVVVEYVGNGSLREHLDESCGNGLELAQRLNIAIDVAQAITYLHEYKERPIIHGGIRSSGVLLTDALTAKVAGFGLAGTAASGSGSGSDATPARSAAGYVDPEYLSTYQLTDKSDVYAFGVLLVELATGRPPVERTRGGEARLTTKWALQRCRAGEAVVAMDPRMRRSPASVAAVERALALAAQSVAAARDERPSMRRCSELLWTIRRDYHRQEEPRCGAVAEERSDEWVIR

SEQ ID NO: 3015 - protein, 437 aa, Zea mays subsp. mays
  peptide (1)..(437): Ceres Seq. ID no. 13494435
  misc_feature (226)..(415): Homolog of NCBI NO: 7434312 NR Description: receptor-like protein kinase 5 homolog
  misc_feature (126)..(418): Homolog of NCBI NO: 25287604 NR Description: probable protein kinase [imported] - Arabidopsis
  misc_feature (126)..(418): Homolog of NCBI NO: 18397027 NR Description: protein kinase family [Arabidopsis thaliana]
  misc_feature (115)..(419): Homolog of NCBI NO: 38345153 NR Description: OSJNBa0014K14.7 [Oryza sativa (japonica
  misc_feature (122)..(414): Homolog of NCBI NO: 15237782 NR Description: protein kinase family [Arabidopsis thaliana]
  misc_feature (9)..(421): Homolog of NCBI NO: 27261468 NR Description: Hypothetical protein [Oryza sativa (japonica
  misc_feature (63)..(415): Homolog of NCBI NO: 22328175 NR Description: protein kinase family [Arabidopsis thaliana]
  misc_feature (92)..(414): Homolog of NCBI NO: 9759225 NR Description: contains similarity to protein
  misc_feature (126)..(430): Homolog of NCBI NO: 34908354 NR Description: P0529H11.30 [Oryza sativa (japonica
  misc_feature (5)..(435): Homolog of NCBI NO: 34897358 NR Description: putative receptor kinase [Oryza sativa]
MASWPAASRRRSSGGMKSAELSGSGASYGYGRTSSSPDACGYGRQLSAYSARSSQVSRSGSFSAAAQRVAGAFTGCFVPRRQVKAGEEEEEEEKKSKRSMDSGSYHGWNEANLSAAAGSWQEGRALTIADVSKATSNFSEKNVIRQGRSSTMYRGKLRDGSQIAVKCVTKLNDQSPTAELWRELEKIQHRNLARLFGFFERAADSLVVVEYVGNGSLREHLDESCGNGLELAQRLNIAIDVAQAITYLHEYKERPIIHGGIRSSGVLLTDALTAKVAGFGLAGTAASGSGSGSDATPARSAAGYVDPEYLSTYQLTDKSDVYAFGVLLVELATGRPPVERTRGGEARLTTKWALQRCRAGEAVVAMDPRMRRSPASVAAVERALALAAQSVAAARDERPSMRRCSELLWTIRRDYHRQEEPRCGAVAEERSDEWVIR

SEQ ID NO: 3016 - protein, 422 aa, Zea mays subsp. mays
  peptide (1)..(422): Ceres Seq. ID no. 13494436
  misc_feature (211)..(400): Homolog of NCBI NO: 7434312 NR Description: receptor-like protein kinase 5 homolog
  misc_feature (111)..(403): Homolog of NCBI NO: 25287604 NR Description: probable protein kinase [imported] - Arabidopsis
  misc_feature (111)..(403): Homolog of NCBI NO: 18397027 NR Description: protein kinase family [Arabidopsis thaliana]
  misc_feature (100)..(404): Homolog of NCBI NO: 38345153 NR Description: OSJNBa0014K14.7 [Oryza sativa (japonica
  misc_feature (107)..(399): Homolog of NCBI NO: 15237782 NR Description: protein kinase family [Arabidopsis thaliana]
  misc_feature (1)..(406): Homolog of NCBI NO: 27261468 NR Description: Hypothetical protein [Oryza sativa (japonica
  misc_feature (48)..(400): Homolog of NCBI NO: 22328175 NR Description: protein kinase family [Arabidopsis thaliana]
  misc_feature (77)..(399): Homolog of NCBI NO: 9759225 NR Description: contains similarity to protein
  misc_feature (111)..(415): Homolog of NCBI NO: 34908354 NR Description: P0529H11.30 [Oryza sativa (japonica
  misc_feature (1)..(420): Homolog of NCBI NO: 34897358 NR Description: putative receptor kinase [Oryza sativa]
MKSAELSGSGASYGYGRTSSSPDACGYGRQLSAYSARSSQVSRSGSFSAAAQRVAGAFTGCFVPRRQVKAGEEEEEEEKKSKRSMDSGSYHGWNEANLSAAAGSWQEGRALTIADVSKATSNFSEKNVIRQGRSSTMYRGKLRDGSQIAVKCVTKLNDQSPTAELWRELEKIQHRNLARLFGFFERAADSLVVVEYVGNGSLREHLDESCGNGLELAQRLNIAIDVAQAITYLHEYKERPIIHGGIRSSGVLLTDALTAKVAGFGLAGTAASGSGSGSDATPARSAAGYVDPEYLSTYQLTDKSDVYAFGVLLVELATGRPPVERTRGGEARLTTKWALQRCRAGEAVVAMDPRMRRSPASVAAVERALALAAQSVAAARDERPSMRRCSELLWTIRRDYHRQEEPRCGAVAEERSDEWVIR

SEQ ID NO: 3017 - DNA, 1565 bp, Zea mays subsp. mays
  misc_feature (1)..(1565): Ceres Seq. ID no. 12410445
  misc_feature: MA Experiment ID: 108523 Result: Up-regulated in Transcription
  misc_feature: MA Experiment 108523 PARAMETER Experiment Name: Zm_42deg_Heat_P Parameter: Age (day) Value: 8
  misc_feature: MA Experiment 108523 PARAMETER Experiment Name: Zm_42deg_Heat_P Parameter: Organism Value: Zea mays
  misc_feature: MA Experiment 108523 PARAMETER Experiment Name: Zm_42deg_Heat_P Parameter: Plant Line Value: 35A19
  misc_feature: MA Experiment 108523 PARAMETER Experiment Name: Zm_42deg_Heat_P Parameter: Temperature (deg C) Value: 42 vs. 22
  misc_feature: MA Experiment 108523 PARAMETER Experiment Name: Zm_42deg_Heat_P Parameter: Timepoint (hr) Value: 6
  misc_feature: MA Experiment 108523 PARAMETER Experiment Name: Zm_42deg_Heat_P Parameter: Tissue Value: Aerial
  misc_feature: MA Experiment ID: 108535 Result: Down-regulated in Transcription
  misc_feature: MA Experiment 108535 PARAMETER Experiment Name: Zm_Meristem_P Parameter: Age (day) Value: 8
  misc_feature: MA Experiment 108535 PARAMETER Experiment Name: Zm_Meristem_P Parameter: Organism Value: Zea mays
  misc_feature: MA Experiment 108535 PARAMETER Experiment Name: Zm_Meristem_P Parameter: Plant Line Value: 35A19
  misc_feature: MA Experiment 108535 PARAMETER Experiment Name: Zm_Meristem_P Parameter: Tissue Value: Root Meristem vs. Above Root Meristem
  misc_feature: MA Experiment ID: 108543 Result: Down-regulated in Transcription
  misc_feature: MA Experiment ID: 20000477 Result: Up-regulated in Transcription
  misc_feature: MA Experiment 20000477 PARAMETER Experiment Name: Zm_5mM_SA_P Parameter: Age (day) Value: 10
  misc_feature: MA Experiment 20000477 PARAMETER Experiment Name: Zm_5mM_SA_P Parameter: Organism Value: Zea mays
  misc_feature: MA Experiment 20000477 PARAMETER Experiment Name: Zm_5mM_SA_P Parameter: Plant Line Value: 35A19
  misc_feature: MA Experiment 20000477 PARAMETER Experiment Name: Zm_5mM_SA_P Parameter: Timepoint (hr) Value: 48
  misc_feature: MA Experiment 20000477 PARAMETER Experiment Name: Zm_5mM_SA_P Parameter: Tissue Value: Aerial
  misc_feature: MA Experiment 20000477 PARAMETER Experiment Name: Zm_5mM_SA_P Parameter: Treatment Value: 5mM SA vs. No Treatment
  misc_feature: MA Experiment ID: 20000479 Result: Up-regulated in Transcription
  misc_feature: MA Experiment 20000479 PARAMETER Experiment Name: Zm_Drought_P Parameter: Age (day) Value: 10
  misc_feature: MA Experiment 20000479 PARAMETER Experiment Name: Zm_Drought_P Parameter: Organism Value: Zea mays
  misc_feature: MA Experiment 20000479 PARAMETER Experiment Name: Zm_Drought_P Parameter: Plant Line Value: 35A19
  misc_feature: MA Experiment 20000479 PARAMETER Experiment Name: Zm_Drought_P Parameter: Timepoint (hr) Value: 48
  misc_feature: MA Experiment 20000479 PARAMETER Experiment Name: Zm_Drought_P Parameter: Tissue Value: Aerial
  misc_feature: MA Experiment 20000479 PARAMETER Experiment Name: Zm_Drought_P Parameter: Treatment Value: Drought vs. No Drought
  misc_feature: MA Experiment ID: 20000480 Result: Up-regulated in Transcription
  misc_feature: MA Experiment 20000480 PARAMETER Experiment Name: Zm_Drought_P Parameter: Age (day) Value: 11
  misc_feature: MA Experiment 20000480 PARAMETER Experiment Name: Zm_Drought_P Parameter: Organism Value: Zea mays
  misc_feature: MA Experiment 20000480 PARAMETER Experiment Name: Zm_Drought_P Parameter: Plant Line Value: 35A19
  misc_feature: MA Experiment 20000480 PARAMETER Experiment Name: Zm_Drought_P Parameter: Timepoint (hr) Value: 72
  misc_feature: MA Experiment 20000480 PARAMETER Experiment Name: Zm_Drought_P Parameter: Tissue Value: Aerial
  misc_feature: MA Experiment 20000480 PARAMETER Experiment Name: Zm_Drought_P Parameter: Treatment Value: Drought vs. No Drought
  misc_feature: MA Experiment ID: 20000535 Result: Down-regulated in Transcription
  misc_feature: MA Experiment 20000535 PARAMETER Experiment Name: Zm_Hybrid_Seed_Dev_P Parameter: DAP Value: 30 vs. 12
  misc_feature: MA Experiment 20000535 PARAMETER Experiment Name: Zm_Hybrid_Seed_Dev_P Parameter: Organism Value: Zea mays
  misc_feature: MA Experiment 20000535 PARAMETER Experiment Name: Zm_Hybrid_Seed_Dev_P Parameter: Plant Line Value: 35A19
  misc_feature: MA Experiment 20000535 PARAMETER Experiment Name: Zm_Hybrid_Seed_Dev_P Parameter: Tissue Value: Embryo vs. Unfert Floret
ggcaacgagcctgctgctccagctaccccgaaaccccgtccaacgtccatggctatccacctccgggcacacgccttcgcggccaacccgctgcgtggcgtctccgccgccaccaccgccatgtccccctccgcggccgccgaggcactccgctacctcctcgaccccagctccgccgccgccgccgccaatcccagccagtacctctccaagatccttcctttccgcaggggccgcccactcgcgcgctccactgaccctcccgcggcgccggcctggcgcctcgcgtggctcccgccgtcccgcgtccccggggtggccccggacgccttcgtcttcctgggcgcgctcgtcgagggggacggcaaggaggccgccgcgtactgggcggtcgacgtcagcgagggcgagggagccagggttggtgggccggcggacggggatgggccgtcggcgtttgtggacttgaggacgctcatggtggccacggactggagcgacaaggacgccatggcggagctcgccatcgcaggacatgctcgagcactgctagaatggcacagcacggcaaaattttgtggagcttgtggagcaaaggctgtacctactgaagccgggaggcgtaagcagtgcagcaacgattcctgcaagaagaggatataccctagaattgatccggttgtgatcatgttggtcattgataaagaaaatgatcgggcactcttaagccgccagtcaagatttgtgcctcgtatgtggagttgtcttgctggtttcatagagccaggagaaagcctggaagaggcagtgagacgagaaacatgggaggaaactggtatcgaagttgggcaagtcgtttatcacagttctcaaccatggcctgttgggccaaatactatgccgtgtcaactgatggtgggcttctttgcttatgctaaatcattggagataaacgtggaacaagcaggagcttgaagatgcccagtggcacaaccgcgaagacgtcaagaaagcgttgacgtttgctgaatacgagaaagcccagagaacaagcgctgccaaggtcgatcagatctgcaagggcgctgagaaagggcagaacccctctgccgacttcaaagttggaagcggcgagcctgctccaatgtttgtcccaggaccctacgccattgctcaccaccttatctcgtcgtgggctttcgagggagcaccgaagctgcctagttcattctcaaacctataagcctggaccctggtgttcagacagacgatgacaggaactggacccctgtgctgcgggctcatggatcacctgtgttgccgtgagtgtaattctgatagtgtgtgtccgttgccggttgtgataaaataaaatagcaatagagtactgggtacagaagacttgccggaggatttggcatcaatggacatgtatatccattgcctttttacatgttgatcctctttgtatcacacgtaatgttgcatacttgcatagatacaacaatgatatacatcacacagtgtactcatgcatttatacatgtattcagataactggattc

SEQ ID NO: 3018 - protein, 324 aa, Zea mays subsp. mays
  peptide (1)..(324): Ceres Seq. ID no. 12410446
  misc_feature (225)..(321): Pfam Name: NUDIX domain Pfam Description: NUDIX domain
  misc_feature (173)..(320): Homolog of NCBI NO: 23109722 NR Description: hypothetical protein [Novosphingobium
  misc_feature (173)..(321): Homolog of NCBI NO: 13899267 NR Description: nudix (nucleoside diphosphate linked moiety
  misc_feature (155)..(317): Homolog of NCBI NO: 15887452 NR Description: AGR_C_150p [Agrobacterium tumefaciens]
  misc_feature (72)..(307): Homolog of NCBI NO: 22960495 NR Description: hypothetical protein [Rhodobacter sphaeroides]
  misc_feature (180)..(321): Homolog of NCBI NO: 15963981 NR Description: HYPOTHETICAL PROTEIN [Sinorhizobium meliloti]
  misc_feature (97)..(320): Homolog of NCBI NO: 22988758 NR Description: hypothetical protein [Burkholderia fungorum]
  misc_feature (173)..(321): Homolog of NCBI NO: 21312664 NR Description: RIKEN cDNA 0610016O18 [Mus musculus]
  misc_feature (256)..(278): Homolog of NCBI NO: 5803245 NR Description: hypothetical protein [Oryza sativa (japonica
  misc_feature (17)..(185): Homolog of NCBI NO: 5803245 NR Description: hypothetical protein [Oryza sativa (japonica
  misc_feature (16)..(321): Homolog of NCBI NO: 15241252 NR Description: putative protein
GNEPAAPATPKPRPTSMAIHLRAHAFAANPLRGVSAATTAMSPSAAAEALRYLLDPSSAAAAANPSQYLSKILPFRRGRPLARSTDPPAAPAWRLAWLPPSRVPGVAPDAFVFLGALVEGDGKEAAAYWAVDVSEGEGARVGGPADGDGPSAFVDLRTLMVATDWSDKDAMAELAIAGHARALLEWHSTAKFCGACGAKAVPTEAGRRKQCSNDSCKKRIYPRIDPVVIMLVIDKENDRALLSRQSRFVPRMWSCLAGFIEPGESLEEAVRRETWEETGIEVGQVVYHSSQPWPVGPNTMPCQLMVGFFAYAKSLEINVEQAGA

SEQ ID NO: 3019 - protein, 308 aa, Zea mays subsp. mays
  peptide (1)..(308): Ceres Seq. ID no. 12410447
  misc_feature (209)..(305): Pfam Name: NUDIX domain Pfam Description: NUDIX domain
  misc_feature (157)..(304): Homolog of NCBI NO: 23109722 NR Description: hypothetical protein [Novosphingobium
  misc_feature (157)..(305): Homolog of NCBI NO: 13899267 NR Description: nudix (nucleoside diphosphate linked moiety
  misc_feature (139)..(301): Homolog of NCBI NO: 15887452 NR Description: AGR_C_150p [Agrobacterium tumefaciens]
  misc_feature (56)..(291): Homolog of NCBI NO: 22960495 NR Description: hypothetical protein [Rhodobacter sphaeroides]
  misc_feature (164)..(305): Homolog of NCBI NO: 15963981 NR Description: HYPOTHETICAL PROTEIN [Sinorhizobium meliloti]
  misc_feature (81)..(304): Homolog of NCBI NO: 22988758 NR Description: hypothetical protein [Burkholderia fungorum]
  misc_feature (157)..(305): Homolog of NCBI NO: 21312664 NR Description: RIKEN cDNA 0610016O18 [Mus musculus]
  misc_feature (240)..(262): Homolog of NCBI NO: 5803245 NR Description: hypothetical protein [Oryza sativa (japonica
  misc_feature (1)..(169): Homolog of NCBI NO: 5803245 NR Description: hypothetical protein [Oryza sativa (japonica
  misc_feature (1)..(305): Homolog of NCBI NO: 15241252 NR Description: putative protein
MAIHLRAHAFAANPLRGVSAATTAMSPSAAAEALRYLLDPSSAAAAANPSQYLSKILPFRRGRPLARSTDPPAAPAWRLAWLPPSRVPGVAPDAFVFLGALVEGDGKEAAAYWAVDVSEGEGARVGGPADGDGPSAFVDLRTLMVATDWSDKDAMAELAIAGHARALLEWHSTAKFCGACGAKAVPTEAGRRKQCSNDSCKKRIYPRIDPVVIMLVIDKENDRALLSRQSRFVPRMWSCLAGFIEPGESLEEAVRRETWEETGIEVGQVVYHSSQPWPVGPNTMPCQLMVGFFAYAKSLEINVEQAGA

SEQ ID NO: 3020 - protein, 284 aa, Zea mays subsp. mays
  peptide (1)..(284): Ceres Seq. ID no. 12410448
  misc_feature (185)..(281): Pfam Name: NUDIX domain Pfam Description: NUDIX domain
  misc_feature (133)..(280): Homolog of NCBI NO: 23109722 NR Description: hypothetical protein [Novosphingobium
  misc_feature (133)..(281): Homolog of NCBI NO: 13899267 NR Description: nudix (nucleoside diphosphate linked moiety
  misc_feature (115)..(277): Homolog of NCBI NO: 15887452 NR Description: AGR_C_150p [Agrobacterium tumefaciens]
  misc_feature (32)..(267): Homolog of NCBI NO: 22960495 NR Description: hypothetical protein [Rhodobacter sphaeroides]
  misc_feature (140)..(281): Homolog of NCBI NO: 15963981 NR Description: HYPOTHETICAL PROTEIN [Sinorhizobium meliloti]
  misc_feature (57)..(280): Homolog of NCBI NO: 22988758 NR Description: hypothetical protein [Burkholderia fungorum]
  misc_feature (133)..(281): Homolog of NCBI NO: 21312664 NR Description: RIKEN cDNA 0610016O18 [Mus musculus]
  misc_feature (216)..(238): Homolog of NCBI NO: 5803245 NR Description: hypothetical protein [Oryza sativa (japonica
  misc_feature (1)..(145): Homolog of NCBI NO: 5803245 NR Description: hypothetical protein [Oryza sativa (japonica
  misc_feature (1)..(281): Homolog of NCBI NO: 15241252 NR Description: putative protein
MSPSAAAEALRYLLDPSSAAAAANPSQYLSKILPFRRGRPLARSTDPPAAPAWRLAWLPPSRVPGVAPDAFVFLGALVEGDGKEAAAYWAVDVSEGEGARVGGPADGDGPSAFVDLRTLMVATDWSDKDAMAELAIAGHARALLEWHSTAKFCGACGAKAVPTEAGRRKQCSNDSCKKRIYPRIDPVVIMLVIDKENDRALLSRQSRFVPRMWSCLAGFIEPGESLEEAVRRETWEETGIEVGQVVYHSSQPWPVGPNTMPCQLMVGFFAYAKSLEINVEQAGA

SEQ ID NO: 3021 - DNA, 1320 bp, Zea mays subsp. mays
  misc_feature (1)..(1320): Ceres Seq. ID no. 12367593
  misc_feature: MA Experiment ID: 108522 Result: Up-regulated in Transcription
  misc_feature: MA Experiment 108522 PARAMETER Experiment Name: Zm_42deg_Heat_P Parameter: Age (day) Value: 8
  misc_feature: MA Experiment 108522 PARAMETER Experiment Name: Zm_42deg_Heat_P Parameter: Organism Value: Zea mays
  misc_feature: MA Experiment 108522 PARAMETER Experiment Name: Zm_42deg_Heat_P Parameter: Plant Line Value: 35A19
  misc_feature: MA Experiment 108522 PARAMETER Experiment Name: Zm_42deg_Heat_P Parameter: Temperature (deg C) Value: 42 vs. 22
  misc_feature: MA Experiment 108522 PARAMETER Experiment Name: Zm_42deg_Heat_P Parameter: Timepoint (hr) Value: 1
  misc_feature: MA Experiment 108522 PARAMETER Experiment Name: Zm_42deg_Heat_P Parameter: Tissue Value: Aerial
  misc_feature: MA Experiment ID: 108523 Result: Up-regulated in Transcription
  misc_feature: MA Experiment 108523 PARAMETER Experiment Name: Zm_42deg_Heat_P Parameter: Age (day) Value: 8
  misc_feature: MA Experiment 108523 PARAMETER Experiment Name: Zm_42deg_Heat_P Parameter: Organism Value: Zea mays
  misc_feature: MA Experiment 108523 PARAMETER Experiment Name: Zm_42deg_Heat_P Parameter: Plant Line Value: 35A19
  misc_feature: MA Experiment 108523 PARAMETER Experiment Name: Zm_42deg_Heat_P Parameter: Temperature (deg C) Value: 42 vs. 22
  misc_feature: MA Experiment 108523 PARAMETER Experiment Name: Zm_42deg_Heat_P Parameter: Timepoint (hr) Value: 6
  misc_feature: MA Experiment 108523 PARAMETER Experiment Name: Zm_42deg_Heat_P Parameter: Tissue Value: Aerial
  misc_feature: MA Experiment ID: 108559 Result: Up-regulated in Transcription
  misc_feature: MA Experiment 108559 PARAMETER Experiment Name: Zm_5mM_NO_P Parameter: Age (day) Value: 8
  misc_feature: MA Experiment 108559 PARAMETER Experiment Name: Zm_5mM_NO_P Parameter: Organism Value: Zea mays
  misc_feature: MA Experiment 108559 PARAMETER Experiment Name: Zm_5mM_NO_P Parameter: Plant Line Value: 35A19
  misc_feature: MA Experiment 108559 PARAMETER Experiment Name: Zm_5mM_NO_P Parameter: Timepoint (hr) Value: 12
  misc_feature: MA Experiment 108559 PARAMETER Experiment Name: Zm_5mM_NO_P Parameter: Tissue Value: Aerial
  misc_feature: MA Experiment 108559 PARAMETER Experiment Name: Zm_5mM_NO_P Parameter: Treatment Value: 5mM NO vs. No Treatment
agatgggacaaaaaaaaaatcgcgccgagtaccagagcgacgctacgcggcgtgacttctcccgaaacctccacatacccaaacccaccgaccgccgcctaggcttccacctctcccgctcaaactccggccactgaggtcgaacccgagcccgcgccgcagcggcacgatggtgaacgacgccgcggcgatggccgtcgtgagggcggcgcgcccagccctccgtggcgcccacgatggcgtcgccttcgccgcccacgccgccttcctcgccgatgggtactcgctctgcgccgtcggccctgccgcgctcgccgacccctcgcccttaggtgatgaggaggtggggattgatggttggaacatcatggagaattgttacgcctttttgtatagcaaggaggagaagggcaagaagaaaagggtactagtgaaatgtctggtgatcggtgaagtacttgcaattgatgtcttggatcttgaggcacaagataaggcgccttataatatccagattaatgtgaaagacttctttgtcgaagagcagccaaagaattatggggatatgtacaagaattttacaagtctcattgagactgtgaactcaaatgtgttgtgcaaattggatggagacggttccggtgctgaggctgctaagagcactgccgccgctgctgctaagaactctgatgggagaagttcaccaatacagagctctggagatccaggtcctagaactgctgacccttccggcctaatttatcctccaatagcaccgattggttctgatgatctctaccctgggcctggtgcaggcttctaccctcacagtggcattgggagcggtggcagcatgcatgttggtcctaatgatccgcgcttctttccttctaatcccttctctgccccatttggtgggcttgggagtgttccaccaggtagtcgctatgatccaattggcccacctgacgtcccagggtttgagccatctagctttgttaggcgtccaaggcggcctccaggcgggagcacccaccccgacctcgagttcttccagcaaggcccagacttctgagagtcgcgcagaggccggccggagcctcgccctaccctcacgaaataacttcaaaatgctgagccctcgagctagatatctcgcttggtgtgattgcaactgctgtatcaagtatagtcctagtgcgctttggctgtaaagatggatgtgaacatcgtcctagtgtatttactcttaattccaaaccatcgcctgtcatagcctaatatactcttttgtgtataatatcgggtgtaccggagccc

SEQ ID NO: 3022 - protein, 301 aa, Zea mays subsp. mays
  peptide (1)..(301): Ceres Seq. ID no. 12367594
  misc_feature (141)..(283): Homolog of NCBI NO: 7630123 NR Description: hypothetical protein [Schizosaccharomyces pombe]
  misc_feature (1)..(165): Homolog of NCBI NO: 15221211 NR Description: hypothetical protein; protein id: At1g48530.1
  misc_feature (237)..(301): Homolog of NCBI NO: 7489377 NR Description: hypothetical protein - barley (fragment)
  misc_feature (196)..(299): Homolog of NCBI NO: 34898580 NR Description: P0534A03.16 [Oryza sativa (japonica
  misc_feature (1)..(301): Homolog of NCBI NO: 15232382 NR Description: putative protein
  misc_feature (1)..(265): Homolog of NCBI NO: 34898580 NR Description: P0534A03.16 [Oryza sativa (japonica
MVNDAAAMAVVRAARPALRGAHDGVAFAAHAAFLADGYSLCAVGPAALADPSPLGDEEVGIDGWNIMENCYAFLYSKEEKGKKKRVLVKCLVIGEVLAIDVLDLEAQDKAPYNIQINVKDFFVEEQPKNYGDMYKNFTSLIETVNSNVLCKLDGDGSGAEAAKSTAAAAAKNSDGRSSPIQSSGDPGPRTADPSGLIYPPIAPIGSDDLYPGPGAGFYPHSGIGSGGSMHVGPNDPRFFPSNPFSAPFGGLGSVPPGSRYDPIGPPDVPGFEPSSFVRRPRRPPGGSTHPDLEFFQQGPDF

SEQ ID NO: 3023 - protein, 294 aa, Zea mays subsp. mays
  peptide (1)..(294): Ceres Seq. ID no. 12367595
  misc_feature (134)..(276): Homolog of NCBI NO: 7630123 NR Description: hypothetical protein [Schizosaccharomyces pombe]
  misc_feature (1)..(158): Homolog of NCBI NO: 15221211 NR Description: hypothetical protein; protein id: At1g48530.1
  misc_feature (230)..(294): Homolog of NCBI NO: 7489377 NR Description: hypothetical protein - barley (fragment)
  misc_feature (189)..(292): Homolog of NCBI NO: 34898580 NR Description: P0534A03.16 [Oryza sativa (japonica
  misc_feature (1)..(294): Homolog of NCBI NO: 15232382 NR Description: putative protein
  misc_feature (1)..(258): Homolog of NCBI NO: 34898580 NR Description: P0534A03.16 [Oryza sativa (japonica
MAVVRAARPALRGAHDGVAFAAHAAFLADGYSLCAVGPAALADPSPLGDEEVGIDGWNIMENCYAFLYSKEEKGKKKRVLVKCLVIGEVLAIDVLDLEAQDKAPYNIQINVKDFFVEEQPKNYGDMYKNFTSLIETVNSNVLCKLDGDGSGAEAAKSTAAAAAKNSDGRSSPIQSSGDPGPRTADPSGLIYPPIAPIGSDDLYPGPGAGFYPHSGIGSGGSMHVGPNDPRFFPSNPFSAPFGGLGSVPPGSRYDPIGPPDVPGFEPSSFVRRPRRPPGGSTHPDLEFFQQGPDF

SEQ ID NO: 3024 - protein, 235 aa, Zea mays subsp. mays
  peptide (1)..(235): Ceres Seq. ID no. 12367596
  misc_feature (1)..(199): Homolog of NCBI NO: 34898580 NR Description: P0534A03.16 [Oryza sativa (japonica
  misc_feature (75)..(217): Homolog of NCBI NO: 7630123 NR Description: hypothetical protein [Schizosaccharomyces pombe]
  misc_feature (1)..(99): Homolog of NCBI NO: 15221211 NR Description: hypothetical protein; protein id: At1g48530.1
  misc_feature (171)..(235): Homolog of NCBI NO: 7489377 NR Description: hypothetical protein - barley (fragment)
  misc_feature (130)..(233): Homolog of NCBI NO: 34898580 NR Description: P0534A03.16 [Oryza sativa (japonica
  misc_feature (1)..(235): Homolog of NCBI NO: 15232382 NR Description: putative protein
MENCYAFLYSKEEKGKKKRVLVKCLVIGEVLAIDVLDLEAQDKAPYNIQINVKDFFVEEQPKNYGDMYKNFTSLIETVNSNVLCKLDGDGSGAEAAKSTAAAAAKNSDGRSSPIQSSGDPGPRTADPSGLIYPPIAPIGSDDLYPGPGAGFYPHSGIGSGGSMHVGPNDPRFFPSNPFSAPFGGLGSVPPGSRYDPIGPPDVPGFEPSSFVRRPRRPPGGSTHPDLEFFQQGPDF

SEQ ID NO: 3025 - DNA, 1482 bp, Zea mays subsp. mays
  misc_feature (1)..(1482): Ceres Seq. ID no. 12373828
  misc_feature: MA Experiment ID: 108687 Result: Down-regulated in Transcription
  misc_feature: MA Experiment 108687 PARAMETER Experiment Name: Zm_Embryos-Flowers__P Parameter: Tissue Value: Embryo vs. Aerial+
gcacgagaccattacctagaacatcctaatcaaaaaacggtctgctctctttctctctcttcccctattacgagtcccagcagctagaacaacacaaaccctctcctgtagctagatgtgtggtagtaagctctcgctgttaacctcggcaaagaacctactggaagtcggaagggaaaaagcaaagtaggagtagctagctagtatagcaaacaagctcccccgtgtgccgacgagccgccgactaggtcagccgccatggacttcgacgagcacgatgacggcgacgaggagatgacgccgatgcccgtgagctcgagctacgatgcgccgatgcagccggggctgggactgggcggaggaggcggcgagaccccgaagcacggggattctgctggagccgggagcttcaggacgccgccagcaggcggcttcgggggaggaggcgcaggcgcaggcgcaggcgcaggcggtggcggggccaccaggtaccgggagtgcctcaagaaccacgcggtcggcatcggcgggcacgcggtggacggctgcggcgaattcatggccgctggcgaggagggctccatcgacgcgctgcgctgcgcggcctgcggctgccaccgcaacttccaccgcaaggagtccgacaactcgccagcgggaggcgggggcgtcgcgccgcccgatcccgccgccgccctgtccccggccgccatcacagcctacggcgccgccgtggcggcgcaccaccaccagttctccccctactaccgcacccctgccgggtacttcctgcaccagcagctggcggccgccgccgggcacatgcagcgcccgctcgcgctgccgtccacctcccactcgctggggcgcgaagagggcgacgacgtgtccgggctgatcggccccatggtggtggcgcccatgatgggcatgtcgctgggcccgggcggcggcccgtcggggggctcgtccggcggctcggggtccggcaagaagcggttccgcaccaagttcacgcaggagcagaaggaccggatgctggcgttcgcggagcggctggggtggcgcatccagaagcacgacgaggccgccgtgcagcagttctgcgaggaggtctgcgtcaagcgccacgtgctcaaggtgtggatgcacaacaacaagcacaccctcggcaagaagccatgaccgaccgccggccanttcttcgcgccggcgcctgcactgtgtgctagctaggtacaccaccactgatcgcattgcatcatagatctcctcctctctttctcagcaccgtattgcttgctagccttttttttttgggggtactcctctccttgccttcctttttttagagttttagctagaaatgtaagctagctacttaggtcagtagcgagcagcagttcttggattttagctacgatggagaagacggccgttgttctcttgtcatcttcattattttattgtacttctttggcc

SEQ ID NO: 3026 - protein, 308 aa, Zea mays subsp. mays
  peptide (1)..(308): Ceres Seq. ID no. 12373829
  misc_feature (73)..(127): Pfam Name: ZF-HD protein dimerisation region Pfam Description: ZF-HD protein dimerisation region
  misc_feature (77)..(129): Homolog of NCBI NO: 15226993 NR Description: hypothetical protein
  misc_feature (229)..(307): Homolog of NCBI NO: 20148768 NR Description: hypothetical protein At2g02540/T822.16
  misc_feature (229)..(307): Homolog of NCBI NO: 15226993 NR Description: hypothetical protein
  misc_feature (77)..(129): Homolog of NCBI NO: 18410804 NR Description: expressed protein
  misc_feature (222)..(308): Homolog of NCBI NO: 18410804 NR Description: expressed protein
  misc_feature (43)..(308): Homolog of NCBI NO: 19387257 NR Description: hypothetical protein [Oryza sativa (japonica
  misc_feature (46)..(127): Homolog of NCBI NO: 15238445 NR Description: hypothetical protein common family; protein id:
  misc_feature (216)..(308): Homolog of NCBI NO: 15238445 NR Description: hypothetical protein common family; protein id:
  misc_feature (241)..(308): Homolog of NCBI NO: 15233925 NR Description: putative protein
  misc_feature (57)..(130): Homolog of NCBI NO: 15233925 NR Description: putative protein
MDFDEHDDGDEEMTPMPVSSSYDAPMQPGLGLGGGGGETPKHGDSAGAGSFRTPPAGGFGGGGAGAGAGAGGGGATRYRECLKNHAVGIGGHAVDGCGEFMAAGEEGSIDALRCAACGCHRNFHRKESDNSPAGGGGVAPPDPAAALSPAAITAYGAAVAAHHHQFSPYYRTPAGYFLHQQLAAAAGHMQRPLALPSTSHSLGREEGDDVSGLIGPMVVAPMMGMSLGPGGGPSGGSSGGSGSGKKRFRTKFTQEQKDRMLAFAERLGWRIQKHDEAAVQQFCEEVCVKRHVLKVWMHNNKHTLGKKP

SEQ ID NO: 3027 - protein, 296 aa, Zea mays subsp. mays
  peptide (1)..(296): Ceres Seq. ID no. 12373830
  misc_feature (61)..(115): Pfam Name: ZF-HD protein dimerisation region Pfam Description: ZF-HD protein dimerisation region
  misc_feature (65)..(117): Homolog of NCBI NO: 15226993 NR Description: hypothetical protein
  misc_feature (217)..(295): Homolog of NCBI NO: 20148768 NR Description: hypothetical protein At2g02540/T822.16
  misc_feature (217)..(295): Homolog of NCBI NO: 15226993 NR Description: hypothetical protein
  misc_feature (65)..(117): Homolog of NCBI NO: 18410804 NR Description: expressed protein
  misc_feature (210)..(296): Homolog of NCBI NO: 18410804 NR Description: expressed protein
  misc_feature (31)..(296): Homolog of NCBI NO: 19387257 NR Description: hypothetical protein [Oryza sativa (japonica
  misc_feature (34)..(115): Homolog of NCBI NO: 15238445 NR Description: hypothetical protein common family; protein id:
  misc_feature (204)..(296): Homolog of NCBI NO: 15238445 NR Description: hypothetical protein common family; protein id:
  misc_feature (229)..(296): Homolog of NCBI NO: 15233925 NR Description: putative protein
  misc_feature (45)..(118): Homolog of NCBI NO: 15233925 NR Description: putative protein
MTPMPVSSSYDAPMQPGLGLGGGGGETPKHGDSAGAGSFRTPPAGGFGGGGAGAGAGAGGGGATRYRECLKNHAVGIGGHAVDGCGEFMAAGEEGSIDALRCAACGCHRNFHRKESDNSPAGGGGVAPPDPAAALSPAAITAYGAAVAAHHHQFSPYYRTPAGYFLHQQLAAAAGHMQRPLALPSTSHSLGREEGDDVSGLIGPMVVAPMMGMSLGPGGGPSGGSSGGSGSGKKRFRTKFTQEQKDRMLAFAERLGWRIQKHDEAAVQQFCEEVCVKRHVLKVWMHNNKHTLGKKP

SEQ ID NO: 3028 - protein, 293 aa, Zea mays subsp. mays
  peptide (1)..(293): Ceres Seq. ID no. 12373831
  misc_feature (58)..(112): Pfam Name: ZF-HD protein dimerisation region Pfam Description: ZF-HD protein dimerisation region
  misc_feature (62)..(114): Homolog of NCBI NO: 15226993 NR Description: hypothetical protein
  misc_feature (214)..(292): Homolog of NCBI NO: 20148768 NR Description: hypothetical protein At2g02540/T822.16
  misc_feature (214)..(292): Homolog of NCBI NO: 15226993 NR Description: hypothetical protein
  misc_feature (62)..(114): Homolog of NCBI NO: 18410804 NR Description: expressed protein
  misc_feature (207)..(293): Homolog of NCBI NO: 18410804 NR Description: expressed protein
  misc_feature (28)..(293): Homolog of NCBI NO: 19387257 NR Description: hypothetical protein [Oryza sativa (japonica
  misc_feature (31)..(112): Homolog of NCBI NO: 15238445 NR Description: hypothetical protein common family; protein id:
  misc_feature (201)..(293): Homolog of NCBI NO: 15238445 NR Description: hypothetical protein common family; protein id:
  misc_feature (226)..(293): Homolog of NCBI NO: 15233925 NR Description: putative protein
  misc_feature (42)..(115): Homolog of NCBI NO: 15233925 NR Description: putative protein
MPVSSSYDAPMQPGLGLGGGGGETPKHGDSAGAGSFRTPPAGGFGGGGAGAGAGAGGGGATRYRECLKNHAVGIGGHAVDGCGEFMAAGEEGSIDALRCAACGCHRNFHRKESDNSPAGGGGVAPPDPAAALSPAAITAYGAAVAAHHHQFSPYYRTPAGYFLHQQLAAAAGHMQRPLALPSTSHSLGREEGDDVSGLIGPMVVAPMMGMSLGPGGGPSGGSSGGSGSGKKRFRTKFTQEQKDRMLAFAERLGWRIQKHDEAAVQQFCEEVCVKRHVLKVWMHNNKHTLGKKP

SEQ ID NO: 3029 - DNA, 1149 bp, Zea mays subsp. mays
  misc_feature (1)..(1149): Ceres Seq. ID no. 12407816
  misc_feature: MA Experiment ID: 108535 Result: Up-regulated in Transcription
  misc_feature: MA Experiment 108535 PARAMETER Experiment Name: Zm_Meristem_P Parameter: Age (day) Value: 8
  misc_feature: MA Experiment 108535 PARAMETER Experiment Name: Zm_Meristem_P Parameter: Organism Value: Zea mays
  misc_feature: MA Experiment 108535 PARAMETER Experiment Name: Zm_Meristem_P Parameter: Plant Line Value: 35A19
  misc_feature: MA Experiment 108535 PARAMETER Experiment Name: Zm_Meristem_P Parameter: Tissue Value: Root Meristem vs. Above Root Meristem
agttcgcttcgtgagttatctcctctcgatcgatcgcttcctccatcgaggcgggaaagcgccgcccagatcgccggatagcaagctggcgacctcaccagctccgagcagcagcagggaggctcgtggaaccattagtcgttttctgtcagcggcaacagagcacaccatggaggggctgagctggagaacggtgtgttgtttatcggtgctctgtgccgtgctgttcttgcgcccggccgagggcatccgcttcgtgatcgacagggaagagtgcttctcgcataacgtggaatacgagggggatactgtccatgtatccttcgtcgtcatcaaggctgacaccccgtggcattacagcgaggagggcgtcgatcttgtggttaaggatcctaatggcgctcaagtccgtgattcccgagataagactagtgacaagtttgagttcatagttcagaagagaggcgtccatcgcttctgcttcacgaacaaatccccatatcacgaaacgatagacttcgatgttcatgttggccatttttcatatttcgagcagcatgccaaagatgagcattttgcaccactttttgatcaaataggcaagttggatgaggcactttataatattcagttcgaacagcactggctagaggcccagactgaccgtcaagcaatattgaacgagaacatgagcaggagggcagtccataaggcgctcttcgagtcagcggcgctgatcgccgccagcgtcatccaagtctacctcctgcgccggctcttcgagcgcaagctggggacgtctcgggtttaaggcaacagtagccaacttgcccttcgcagccaccatgatcacaccgacataaccgttacgaattcgaatggttgctagatcagctaaataccacatgtttgtggacttcagttacatgtaatattttttttgtgattccacagatgagaactcttcaaagtttaaaccgtcgatttagccttcattctgcctcagcattttatcgccttgtttctgtagtagcaaccagtaacaacaaggttgcctgtagtctgtacaagatagtagaggttttttttttctgtgctggttgtacgacacaactgtgaatgacttgccgtagacggatactatactgt

SEQ ID NO: 3030 - protein, 269 aa, Zea mays subsp. mays
  peptide (1)..(269): Ceres Seq. ID no. 12407817
  misc_feature (70)..(265): Pfam Name: emp24/gp25L/p24 family Pfam Description: emp24/gp25L/p24 family
  misc_feature (64)..(261): Homolog of NCBI NO: 13929014 NR Description: coated vesicle membrane protein [Rattus
  misc_feature (69)..(269): Homolog of NCBI NO: 12585535 NR Description: Hypothetical protein CGI-109 precursor
  misc_feature (90)..(263): Homolog of NCBI NO: 18921123 NR Description: CG3564-PA [Drosophila melanogaster]
  misc_feature (70)..(261): Homolog of NCBI NO: 29477153 NR Description: Similar to coated vesicle membrane protein [Danio
  misc_feature (71)..(269): Homolog of NCBI NO: 14042242 NR Description: unnamed protein product [Homo sapiens]
  misc_feature (156)..(269): Homolog of NCBI NO: 22331264 NR Description: hypothetical protein
  misc_feature (87)..(269): Homolog of NCBI NO: 17979492 NR Description: AT3g22845/MWI23_22 [Arabidopsis thaliana]
  misc_feature (60)..(269): Homolog of NCBI NO: 30017578 NR Description: putative cop-coated vesicle membrane protein
  misc_feature (70)..(269): Homolog of NCBI NO: 21595553 NR Description: putative coated vesicle membrane protein
  misc_feature (70)..(269): Homolog of NCBI NO: 15231496 NR Description: putative coated vesicle membrane protein
VRFVSYLLSIDRFLHRGGKAPPRSPDSKLATSPAPSSSREARGTISRFLSAATEHTMEGLSWRTVCCLSVLCAVLFLRPAEGIRFVIDREECFSHNVEYEGDTVHVSFVVIKADTPWHYSEEGVDLVVKDPNGAQVRDSRDKTSDKFEFIVQKRGVHRFCFTNKSPYHETIDFDVHVGHFSYFEQHAKDEHFAPLFDQIGKLDEALYNIQFEQHWLEAQTDRQAILNENMSRRAVHKALFESAALIAASVIQVYLLRRLFERKLGTSRV

SEQ ID NO: 3031 - protein, 213 aa, Zea mays subsp. mays
  peptide (1)..(213): Ceres Seq. ID no. 12407818
  misc_feature (14)..(209): Pfam Name: emp24/gp25L/p24 family Pfam Description: emp24/gp25L/p24 family
  misc_feature (8)..(205): Homolog of NCBI NO: 13929014 NR Description: coated vesicle membrane protein [Rattus
  misc_feature (13)..(213): Homolog of NCBI NO: 12585535 NR Description: Hypothetical protein CGI-109 precursor
  misc_feature (34)..(207): Homolog of NCBI NO: 18921123 NR Description: CG3564-PA [Drosophila melanogaster]
  misc_feature (14)..(205): Homolog of NCBI NO: 29477153 NR Description: Similar to coated vesicle membrane protein [Danio
  misc_feature (15)..(213): Homolog of NCBI NO: 14042242 NR Description: unnamed protein product [Homo sapiens]
  misc_feature (100)..(213): Homolog of NCBI NO: 22331264 NR Description: hypothetical protein
  misc_feature (31)..(213): Homolog of NCBI NO: 17979492 NR Description: AT3g22845/MWI23_22 [Arabidopsis thaliana]
  misc_feature (4)..(213): Homolog of NCBI NO: 30017578 NR Description: putative cop-coated vesicle membrane protein
  misc_feature (14)..(213): Homolog of NCBI NO: 21595553 NR Description: putative coated vesicle membrane protein
  misc_feature (14)..(213): Homolog of NCBI NO: 15231496 NR Description: putative coated vesicle membrane protein
MEGLSWRTVCCLSVLCAVLFLRPAEGIRFVIDREECFSHNVEYEGDTVHVSFVVIKADTPWHYSEEGVDLVVKDPNGAQVRDSRDKTSDKFEFIVQKRGVHRFCFTNKSPYHETIDFDVHVGHFSYFEQHAKDEHFAPLFDQIGKLDEALYNIQFEQHWLEAQTDRQAILNENMSRRAVHKALFESAALIAASVIQVYLLRRLFERKLGTSRV

SEQ ID NO: 3032 - DNA, 1597 bp, Zea mays subsp. mays
  misc_feature (1)..(1597): Ceres Seq. ID no. 12352156
  misc_feature: MA Experiment ID: 108522 Result: Down-regulated in Transcription
  misc_feature: MA Experiment 108522 PARAMETER Experiment Name: Zm_42deg_Heat_P Parameter: Age (day) Value: 8
  misc_feature: MA Experiment 108522 PARAMETER Experiment Name: Zm_42deg_Heat_P Parameter: Organism Value: Zea mays
  misc_feature: MA Experiment 108522 PARAMETER Experiment Name: Zm_42deg_Heat_P Parameter: Plant Line Value: 35A19
  misc_feature: MA Experiment 108522 PARAMETER Experiment Name: Zm_42deg_Heat_P Parameter: Temperature (deg C) Value: 42 vs. 22
  misc_feature: MA Experiment 108522 PARAMETER Experiment Name: Zm_42deg_Heat_P Parameter: Timepoint (hr) Value: 1
  misc_feature: MA Experiment 108522 PARAMETER Experiment Name: Zm_42deg_Heat_P Parameter: Tissue Value: Aerial
  misc_feature: MA Experiment ID: 108527 Result: Down-regulated in Transcription
  misc_feature: MA Experiment 108527 PARAMETER Experiment Name: Zm_5mM_NO_P Parameter: Age (day) Value: 8
  misc_feature: MA Experiment 108527 PARAMETER Experiment Name: Zm_5mM_NO_P Parameter: Organism Value: Zea mays
  misc_feature: MA Experiment 108527 PARAMETER Experiment Name: Zm_5mM_NO_P Parameter: Plant Line Value: 35A19
  misc_feature: MA Experiment 108527 PARAMETER Experiment Name: Zm_5mM_NO_P Parameter: Timepoint (hr) Value: 6
  misc_feature: MA Experiment 108527 PARAMETER Experiment Name: Zm_5mM_NO_P Parameter: Tissue Value: Aerial
  misc_feature: MA Experiment 108527 PARAMETER Experiment Name: Zm_5mM_NO_P Parameter: Treatment Value: 5mM NO vs. No Treatment
  misc_feature: MA Experiment ID: 108528 Result: Up-regulated in Transcription
  misc_feature: MA Experiment 108528 PARAMETER Experiment Name: Zm_Imbibed_Seeds_P Parameter: Age (day) Value: 5 vs. 2
  misc_feature: MA Experiment 108528 PARAMETER Experiment Name: Zm_Imbibed_Seeds_P Parameter: Organism Value: Zea mays
  misc_feature: MA Experiment 108528 PARAMETER Experiment Name: Zm_Imbibed_Seeds_P Parameter: Plant Line Value: 35A19
  misc_feature: MA Experiment 108528 PARAMETER Experiment Name: Zm_Imbibed_Seeds_P Parameter: Tissue Value: Aerial vs. Embryo
  misc_feature: MA Experiment ID: 108530 Result: Up-regulated in Transcription
  misc_feature: MA Experiment 108530 PARAMETER Experiment Name: Zm_Imbibed_Seeds_P Parameter: Age (day) Value: 6 vs. 2
  misc_feature: MA Experiment 108530 PARAMETER Experiment Name: Zm_Imbibed_Seeds_P Parameter: Organism Value: Zea mays
  misc_feature: MA Experiment 108530 PARAMETER Experiment Name: Zm_Imbibed_Seeds_P Parameter: Plant Line Value: 35A19
  misc_feature: MA Experiment 108530 PARAMETER Experiment Name: Zm_Imbibed_Seeds_P Parameter: Tissue Value: Aerial vs. Embryo
  misc_feature: MA Experiment ID: 108535 Result: Up-regulated in Transcription
  misc_feature: MA Experiment 108535 PARAMETER Experiment Name: Zm_Meristem_P Parameter: Age (day) Value: 8
  misc_feature: MA Experiment 108535 PARAMETER Experiment Name: Zm_Meristem_P Parameter: Organism Value: Zea mays
  misc_feature: MA Experiment 108535 PARAMETER Experiment Name: Zm_Meristem_P Parameter: Plant Line Value: 35A19
  misc_feature: MA Experiment 108535 PARAMETER Experiment Name: Zm_Meristem_P Parameter: Tissue Value: Root Meristem vs. Above Root Meristem
  misc_feature: MA Experiment ID: 108536 Result: Down-regulated in Transcription
  misc_feature: MA Experiment 108536 PARAMETER Experiment Name: Zm_Meristem_P Parameter: Age (day) Value: 8
  misc_feature: MA Experiment 108536 PARAMETER Experiment Name: Zm_Meristem_P Parameter: Organism Value: Zea mays
  misc_feature: MA Experiment 108536 PARAMETER Experiment Name: Zm_Meristem_P Parameter: Plant Line Value: 35A19
  misc_feature: MA Experiment 108536 PARAMETER Experiment Name: Zm_Meristem_P Parameter: Tissue Value: Shoot Meristem vs. Above Shoot Meristem
  misc_feature: MA Experiment ID: 108543 Result: Up-regulated in Transcription
  misc_feature: MA Experiment ID: 108544 Result: Down-regulated in Transcription
  misc_feature: MA Experiment ID: 108545 Result: Up-regulated in Transcription
  misc_feature: MA Experiment 108545 PARAMETER Experiment Name: Zm_Imbibed_Seeds_P Parameter: Age (day) Value: 3 vs. 2
  misc_feature: MA Experiment 108545 PARAMETER Experiment Name: Zm_Imbibed_Seeds_P Parameter: Organism Value: Zea mays
  misc_feature: MA Experiment 108545 PARAMETER Experiment Name: Zm_Imbibed_Seeds_P Parameter: Plant Line Value: 35A19
  misc_feature: MA Experiment 108545 PARAMETER Experiment Name: Zm_Imbibed_Seeds_P Parameter: Tissue Value: Aerial vs. Embryo
  misc_feature: MA Experiment ID: 108547 Result: Up-regulated in Transcription
  misc_feature: MA Experiment 108547 PARAMETER Experiment Name: Zm_Imbibed_Seeds_P Parameter: Age (day) Value: 4 vs. 2
  misc_feature: MA Experiment 108547 PARAMETER Experiment Name: Zm_Imbibed_Seeds_P Parameter: Organism Value: Zea mays
  misc_feature: MA Experiment 108547 PARAMETER Experiment Name: Zm_Imbibed_Seeds_P Parameter: Plant Line Value: 35A19
  misc_feature: MA Experiment 108547 PARAMETER Experiment Name: Zm_Imbibed_Seeds_P Parameter: Tissue Value: Aerial vs. Embryo
  misc_feature: MA Experiment ID: 108556 Result: Down-regulated in Transcription
  misc_feature: MA Experiment 108556 PARAMETER Experiment Name: Zm_Drought_P Parameter: Age (day) Value: 9
  misc_feature: MA Experiment 108556 PARAMETER Experiment Name: Zm_Drought_P Parameter: Organism Value: Zea mays
  misc_feature: MA Experiment 108556 PARAMETER Experiment Name: Zm_Drought_P Parameter: Plant Line Value: 35A19
  misc_feature: MA Experiment 108556 PARAMETER Experiment Name: Zm_Drought_P Parameter: Timepoint (hr) Value: 24
  misc_feature: MA Experiment 108556 PARAMETER Experiment Name: Zm_Drought_P Parameter: Tissue Value: Aerial
  misc_feature: MA Experiment 108556 PARAMETER Experiment Name: Zm_Drought_P Parameter: Treatment Value: Drought vs. No Drought
  misc_feature: MA Experiment ID: 108559 Result: Down-regulated in Transcription
  misc_feature: MA Experiment 108559 PARAMETER Experiment Name: Zm_5mM_NO_P Parameter: Age (day) Value: 8
  misc_feature: MA Experiment 108559 PARAMETER Experiment Name: Zm_5mM_NO_P Parameter: Organism Value: Zea mays
  misc_feature: MA Experiment 108559 PARAMETER Experiment Name: Zm_5mM_NO_P Parameter: Plant Line Value: 35A19
  misc_feature: MA Experiment 108559 PARAMETER Experiment Name: Zm_5mM_NO_P Parameter: Timepoint (hr) Value: 12
  misc_feature: MA Experiment 108559 PARAMETER Experiment Name: Zm_5mM_NO_P Parameter: Tissue Value: Aerial
  misc_feature: MA Experiment 108559 PARAMETER Experiment Name: Zm_5mM_NO_P Parameter: Treatment Value: 5mM NO vs. No Treatment
  misc_feature: MA Experiment ID: 108597 Result: Down-regulated in Transcription
  misc_feature: MA Experiment 108597 PARAMETER Experiment Name: Zm_100uM_ABA_P Parameter: Age (day) Value: 9
  misc_feature: MA Experiment 108597 PARAMETER Experiment Name: Zm_100uM_ABA_P Parameter: Organism Value: Zea mays
  misc_feature: MA Experiment 108597 PARAMETER Experiment Name: Zm_100uM_ABA_P Parameter: Plant Line Value: 35A19
  misc_feature: MA Experiment 108597 PARAMETER Experiment Name: Zm_100uM_ABA_P Parameter: Timepoint (hr) Value: 24
  misc_feature: MA Experiment 108597 PARAMETER Experiment Name: Zm_100uM_ABA_P Parameter: Tissue Value: Aerial
  misc_feature: MA Experiment 108597 PARAMETER Experiment Name: Zm_100uM_ABA_P Parameter: Treatment Value: 100uM ABA vs. No Treatment
  misc_feature: MA Experiment ID: 108689 Result: Down-regulated in Transcription
  misc_feature: MA Experiment 108689 PARAMETER Experiment Name: Zm_Drought_Roots_P Parameter: Age (day) Value: 9
  misc_feature: MA Experiment 108689 PARAMETER Experiment Name: Zm_Drought_Roots_P Parameter: Organism Value: Zea mays
  misc_feature: MA Experiment 108689 PARAMETER Experiment Name: Zm_Drought_Roots_P Parameter: Plant Line Value: 35A19
  misc_feature: MA Experiment 108689 PARAMETER Experiment Name: Zm_Drought_Roots_P Parameter: Timepoint (hr) Value: 24
  misc_feature: MA Experiment 108689 PARAMETER Experiment Name: Zm_Drought_Roots_P Parameter: Tissue Value: Roots
  misc_feature: MA Experiment 108689 PARAMETER Experiment Name: Zm_Drought_Roots_P Parameter: Treatment Value: Drought vs. No Drought
  misc_feature: MA Experiment ID: 20000479 Result: Down-regulated in Transcription
  misc_feature: MA Experiment 20000479 PARAMETER Experiment Name: Zm_Drought_P Parameter: Age (day) Value: 10
  misc_feature: MA Experiment 20000479 PARAMETER Experiment Name: Zm_Drought_P Parameter: Organism Value: Zea mays
  misc_feature: MA Experiment 20000479 PARAMETER Experiment Name: Zm_Drought_P Parameter: Plant Line Value: 35A19
  misc_feature: MA Experiment 20000479 PARAMETER Experiment Name: Zm_Drought_P Parameter: Timepoint (hr) Value: 48
  misc_feature: MA Experiment 20000479 PARAMETER Experiment Name: Zm_Drought_P Parameter: Tissue Value: Aerial
  misc_feature: MA Experiment 20000479 PARAMETER Experiment Name: Zm_Drought_P Parameter: Treatment Value: Drought vs. No Drought
  misc_feature: MA Experiment ID: 20000626 Result: Down-regulated in Transcription
  misc_feature: MA Experiment 20000626 PARAMETER Experiment Name: Zm_Herbicide-Treatments_P Parameter: Timepoint (hr) Value: 12
  misc_feature: MA Experiment 20000626 PARAMETER Experiment Name: Zm_Herbicide-Treatments_P Parameter: Tissue Value: Aerial
  misc_feature: MA Experiment 20000626 PARAMETER Experiment Name: Zm_Herbicide-Treatments_P Parameter: Treatment Value: Roundup vs. No Treatment
tcacactctgcccagctaagctaagctccctccgtccatcggcatggcgactaccactactaccatcctcctcctcctcctcgtcgcagccacagccgtctcggcggccgacctctccgtgtaccacaacgtgcacccgccgtccccgtccccgctcgagtccatcatcgcgctcgcccgcgccgacgacgcgcggctcctcttcctctcatccaaggcggcctcgtccggcggcgtcacctccgctcccgtcgcctccggccagactccgccctcgtacgtcgtccgcgcggggctcggcaccccggtccagcagctgctcctcgcgctcgacaccagcgccgacgccacctggtcgcactgcgcgccgtgcgacacgtgccccgccggcagccgcttcatcccggccagctcctcctcgtacgcctccctcccgtgcgcctccgactggtgcccgctcttcgagggccagccgtgcccggcgaatcaggacgcctcggcgccgctgccggcgtgcgccttctccaagccgttcgcggacacctcgttccaggcgtcgctgggcagcgacacgctgcgcctgggcaaggacgccatcgccggctacgcgttcgggtgcgtgggcgcggtggccgggccgacgaccaacctgccgaagcaggggctcctcggcctcggccggggccccatgtctctgctatcccagaccgggagcacgtacaacggcgtcttctcctactgcctgcccagctacaggtcctactacttctccggctccctccggctgggagccgccgggcagcccaggaacgtccggtacacgccgctgctgaccaacccgcaccgcccgtcgctctactacgtgaacgtgacggggctcagcgtgggtcggacctgggtgaaggtccccgcggggtcgttcgcgttcgacccggccaccggcgccggcacggtgatcgactcgggcacggtgatcacgcggtggacagcacccgtgtacgcggcgctgcgcgaggagttccggcggcaggtggcggcgccgagcgggtacacgtcgctgggagcgttcgacacgtgcttcaacacggacgaggtggcggcgggcggcgcgccgcccgtgacgctgcacatggacggcggcgtggacctgacgctgccgatggagaacacgctgatccacagcagcgccacgccgctggcgtgcctggccatggccgaggcgccgcagaacgtgaacgccgtcgtgaacgtggtggccaaccttcagcagcagaacgtgcgggtcgtcgtcgacgtcgccggctcgcgcgtcgggttcgcgagggagccctgcaactgagcccctgaatccgtccgtgccctatgcacgggaggaaggaggagacgcgctgcggctgctgcatcggtcggtgtgcagttagttgtcctgttagtctatgctacgttgtctgcactctgcaataacggacgtgacccggggaaaaaaactgtttcgtcacgggtagctagagaatcacgtaaggctcttgttttcgtttgtgtcctataatgtatggctattggcctgtttcgagaggttaaaatttggaggtgctgc

SEQ ID NO: 3033 - protein, 431 aa, Zea mays subsp. mays
  peptide (1)..(431): Ceres Seq. ID no. 12352157
  misc_feature (38)..(428): Pfam Name: Eukaryotic aspartyl protease Pfam Description: Eukaryotic aspartyl protease
  misc_feature (1)..(430): Homolog of NCBI NO: 15228618 NR Description: putative protein
  misc_feature (20)..(430): Homolog of NCBI NO: 21594980 NR Description: chloroplast nucleoid DNA binding protein,
  misc_feature (38)..(430): Homolog of NCBI NO: 15223368 NR Description: chloroplast nucleoid DNA binding protein, putative
  misc_feature (21)..(430): Homolog of NCBI NO: 15232503 NR Description: nucleoid DNA-binding - like protein
  misc_feature (21)..(430): Homolog of NCBI NO: 21617933 NR Description: nucleoid DNA-binding-like protein [Arabidopsis
  misc_feature (17)..(431): Homolog of NCBI NO: 15240680 NR Description: nucleoid DNA-binding-like protein
  misc_feature (1)..(430): Homolog of NCBI NO: 20161865 NR Description: putative nucleoid DNA-binding-like protein
  misc_feature (20)..(430): Homolog of NCBI NO: 34899068 NR Description: similar to nucleoid DNA-binding-like protein
  misc_feature (52)..(431): Homolog of NCBI NO: 21450872 NR Description: unknown protein [Arabidopsis thaliana]
  misc_feature (34)..(431): Homolog of NCBI NO: 18391062 NR Description: expressed protein
MATTTTTILLLLLVAATAVSAADLSVYHNVHPPSPSPLESIIALARADDARLLFLSSKAASSGGVTSAPVASGQTPPSYVVRAGLGTPVQQLLLALDTSADATWSHCAPCDTCPAGSRFIPASSSSYASLPCASDWCPLFEGQPCPANQDASAPLPACAFSKPFADTSFQASLGSDTLRLGKDAIAGYAFGCVGAVAGPTTNLPKQGLLGLGRGPMSLLSQTGSTYNGVFSYCLPSYRSYYFSGSLRLGAAGQPRNVRYTPLLTNPHRPSLYYVNVTGLSVGRTWVKVPAGSFAFDPATGAGTVIDSGTVITRWTAPVYAALREEFRRQVAAPSGYTSLGAFDTCFNTDEVAAGGAPPVTLHMDGGVDLTLPMENTLIHSSATPLACLAMAEAPQNVNAVVNVVANLQQQNVRVVVDVAGSRVGFAREPCN

SEQ ID NO: 3034 - protein, 276 aa, Zea mays subsp. mays
  peptide (1)..(276): Ceres Seq. ID no. 12352158
  misc_feature (49)..(268): Pfam Name: Extensin-like region Pfam Description: Extensin-like region
  misc_feature (12)..(276): Homolog of NCBI NO: 6649242 NR Description: splicing coactivator subunit SRm300 [Homo sapiens]
  misc_feature (21)..(276): Homolog of NCBI NO: 27375632 NR Description: blr0521 [Bradyrhizobium japonicum]
  misc_feature (16)..(276): Homolog of NCBI NO: 19923466 NR Description: splicing coactivator subunit SRm300
  misc_feature (16)..(276): Homolog of NCBI NO: 6649242 NR Description: splicing coactivator subunit SRm300 [Homo sapiens]
  misc_feature (16)..(276): Homolog of NCBI NO: 7512967 NR Description: hypothetical protein KIAA0324 - human (fragment)
  misc_feature (16)..(276): Homolog of NCBI NO: 6634015 NR Description: KIAA0324 protein [Homo sapiens]
  misc_feature (16)..(276): Homolog of NCBI NO: 5821151 NR Description: RNA binding protein [Homo sapiens]
  misc_feature (4)..(276): Homolog of NCBI NO: 19923466 NR Description: splicing coactivator subunit SRm300
  misc_feature (4)..(276): Homolog of NCBI NO: 5821143 NR Description: RNA binding protein [Homo sapiens]
  misc_feature (4)..(276): Homolog of NCBI NO: 5821145 NR Description: RNA binding protein [Homo sapiens]
TLCPAKLSSLRPSAWRLPLLPSSSSSSSQPQPSRRPTSPCTTTCTRRPRPRSSPSSRSPAPTTRGSSSSHPRRPRPAASPPLPSPPARLRPRTSSARGSAPRSSSCSSRSTPAPTPPGRTARRATRAPPAAASSRPAPPRTPPSRAPPTGARSSRASRARRIRTPRRRCRRAPSPSRSRTPRSRRRWAATRCAWARTPSPATRSGAWARWPGRRPTCRSRGSSASAGAPCLCYPRPGARTTASSPTACPATGPTTSPAPSGWEPPGSPGTSGTRRC

SEQ ID NO: 3035 - protein, 216 aa, Zea mays subsp. mays
  peptide (1)..(216): Ceres Seq. ID no. 12352159
  misc_feature (1)..(213): Pfam Name: Eukaryotic aspartyl protease Pfam Description: Eukaryotic aspartyl protease
  misc_feature (1)..(215): Homolog of NCBI NO: 15228618 NR Description: putative protein
  misc_feature (1)..(215): Homolog of NCBI NO: 21594980 NR Description: chloroplast nucleoid DNA binding protein,
  misc_feature (1)..(215): Homolog of NCBI NO: 15223368 NR Description: chloroplast nucleoid DNA binding protein, putative
  misc_feature (1)..(215): Homolog of NCBI NO: 15232503 NR Description: nucleoid DNA-binding - like protein
  misc_feature (1)..(215): Homolog of NCBI NO: 21617933 NR Description: nucleoid DNA-binding-like protein [Arabidopsis
  misc_feature (1)..(216): Homolog of NCBI NO: 15240680 NR Description: nucleoid DNA-binding-like protein
  misc_feature (1)..(215): Homolog of NCBI NO: 20161865 NR Description: putative nucleoid DNA-binding-like protein
  misc_feature (1)..(215): Homolog of NCBI NO: 34899068 NR Description: similar to nucleoid DNA-binding-like protein
  misc_feature (1)..(216): Homolog of NCBI NO: 21450872 NR Description: unknown protein [Arabidopsis thaliana]
  misc_feature (1)..(216): Homolog of NCBI NO: 18391062 NR Description: expressed protein
MSLLSQTGSTYNGVFSYCLPSYRSYYFSGSLRLGAAGQPRNVRYTPLLTNPHRPSLYYVNVTGLSVGRTWVKVPAGSFAFDPATGAGTVIDSGTVITRWTAPVYAALREEFRRQVAAPSGYTSLGAFDTCFNTDEVAAGGAPPVTLHMDGGVDLTLPMENTLIHSSATPLACLAMAEAPQNVNAVVNVVANLQQQNVRVVVDVAGSRVGFAREPCN

SEQ ID NO: 3036 - DNA, 1481 bp, Zea mays subsp. mays
  misc_feature (1)..(1481): Ceres Seq. ID no. 12373824
  misc_feature: MA Experiment ID: 108522 Result: Up-regulated in Transcription
  misc_feature: MA Experiment 108522 PARAMETER Experiment Name: Zm_42deg_Heat_P Parameter: Age (day) Value: 8
  misc_feature: MA Experiment 108522 PARAMETER Experiment Name: Zm_42deg_Heat_P Parameter: Organism Value: Zea mays
  misc_feature: MA Experiment 108522 PARAMETER Experiment Name: Zm_42deg_Heat_P Parameter: Plant Line Value: 35A19
  misc_feature: MA Experiment 108522 PARAMETER Experiment Name: Zm_42deg_Heat_P Parameter: Temperature (deg C) Value: 42 vs. 22
  misc_feature: MA Experiment 108522 PARAMETER Experiment Name: Zm_42deg_Heat_P Parameter: Timepoint (hr) Value: 1
  misc_feature: MA Experiment 108522 PARAMETER Experiment Name: Zm_42deg_Heat_P Parameter: Tissue Value: Aerial
aacaaaataccgatcgcccgaccccttcagtgccttgactcacgcccgcggcaaccggcgacgaggcggcacgaccctccagtccggagtccgccatgcctcacgccgccgccaccgccgctgcggcgctcccgcgtgcctctctgctcgttatctcggcgccgctccgcgactccctcgccgcggcgccgtacgagccccccgcgggcgcatccgcctccgtcaagtccctcctcgcctctctcctcccttcgccttcccctccccagccccagcttcaggagccggcgggtaaggagtctggggacctcctcctcttctgcgctgccgtactcgcggcctccccggagtaccccgcgctgcactgggtcccggcgagcctcgtgggcgcggccgccgccgcggtgaacgagctggcggcggcgggaggttggggcagcgttggggatatggtggtggccgtggcaccggaggtggtgcctcctctcaaggccgtggtgaaggactcgtgcgtcgatgctgacagcgacgagattggggctgtgaagccgcccaaggagcacgcagcagtcgccgcgcaccagttccggtggctggtgtctcaggtaagctaccctaagctcggggatttgtgttcgttagtcattccatgtgccctgacaaccttagatcattggtcaccagaagttaaggtacagggaatggtaagctttgtacacatagcgaagaatgtgaaagcaacggaattaagtttgtatgaagatgccatacttgatgcgtgctgtcagaacattcctgcagatgatgagttatggtaccaggttattgaggtatctgtgatgttgctgacattcacccagcggagcaatcctcgtagcccctggtatgatcgaatgcttagtgagatgttgggccacctggaacggcagccactaaataaagagcgtcgtgttgcatggttgacccttattgggccagtttttgatgctatgggcctcttcctgttggcacattttcgccgccttttctcactgtttttccaatggatgcacactgatgataataagacagttcttctgactttaaagcaaatacatgccattatcaagcttacctggatcaggaagtcaccttatactttgaggctggtggacgagcttgttctattatataaagaatcagccacaaggagcaaccgtgaaatcatgcgagatcatatcctggagatacttgtactgcttcagaactgcaagggacatcaatttgaggaagcttggaagaaacatgaactagacccagacttgacgatgctgctgtccactttcaataagctttgtataaaaaacagttcaccgtgatgttgagttcaactacatgtgttatcagtgtaaatatttcaccatcgcctatcctgtcactgaatatttcactactgcctattctgccactctcatctgctgaaggaaatcagccttgattct

SEQ ID NO: 3037 - protein, 420 aa, Zea mays subsp. mays
  peptide (1)..(420): Ceres Seq. ID no. 12373825
  misc_feature (121)..(263): Homolog of NCBI NO: 25370807 NR Description: hypothetical protein At2g39910 [imported] -
  misc_feature (121)..(404): Homolog of NCBI NO: 26451294 NR Description: unknown protein [Arabidopsis thaliana]
  misc_feature (121)..(404): Homolog of NCBI NO: 30688076 NR Description: expressed protein [Arabidopsis thaliana]
  misc_feature (121)..(404): Homolog of NCBI NO: 20198306 NR Description: expressed protein [Arabidopsis thaliana]
MPHAAATAAAALPRASLLVISAPLRDSLAAAPYEPPAGASASVKSLLASLLPSPSPPQPQLQEPAGKESGDLLLFCAAVLAASPEYPALHWVPASLVGAAAAAVNELAAAGGWGSVGDMVVAVAPEVVPPLKAVVKDSCVDADSDEIGAVKPPKEHAAVAAHQFRWLVSQVSYPKLGDLCSLVIPCALTTLDHWSPEVKVQGMVSFVHIAKNVKATELSLYEDAILDACCQNIPADDELWYQVIEVSVMLLTFTQRSNPRSPWYDRMLSEMLGHLERQPLNKERRVAWLTLIGPVFDAMGLFLLAHFRRLFSLFFQWMHTDDNKTVLLTLKQIHAIIKLTWIRKSPYTLRLVDELVLLYKESATRSNREIMRDHILEILVLLQNCKGHQFEEAWKKHELDPDLTMLLSTFNKLCIKNSSP

SEQ ID NO: 3038 - protein, 302 aa, Zea mays subsp. mays
  peptide (1)..(302): Ceres Seq. ID no. 12373826
  misc_feature (3)..(145): Homolog of NCBI NO: 25370807 NR Description: hypothetical protein At2g39910 [imported] -
  misc_feature (3)..(286): Homolog of NCBI NO: 26451294 NR Description: unknown protein [Arabidopsis thaliana]
  misc_feature (3)..(286): Homolog of NCBI NO: 30688076 NR Description: expressed protein [Arabidopsis thaliana]
  misc_feature (3)..(286): Homolog of NCBI NO: 20198306 NR Description: expressed protein [Arabidopsis thaliana]
MVVAVAPEVVPPLKAVVKDSCVDADSDEIGAVKPPKEHAAVAAHQFRWLVSQVSYPKLGDLCSLVIPCALTTLDHWSPEVKVQGMVSFVHIAKNVKATELSLYEDAILDACCQNIPADDELWYQVIEVSVMLLTFTQRSNPRSPWYDRMLSEMLGHLERQPLNKERRVAWLTLIGPVFDAMGLFLLAHFRRLFSLFFQWMHTDDNKTVLLTLKQIHAIIKLTWIRKSPYTLRLVDELVLLYKESATRSNREIMRDHILEILVLLQNCKGHQFEEAWKKHELDPDLTMLLSTFNKLCIKNSSP

SEQ ID NO: 3039 - protein, 218 aa, Zea mays subsp. mays
  peptide (1)..(218): Ceres Seq. ID no. 12373827
  misc_feature (1)..(61): Homolog of NCBI NO: 25370807 NR Description: hypothetical protein At2g39910 [imported] -
  misc_feature (1)..(202): Homolog of NCBI NO: 26451294 NR Description: unknown protein [Arabidopsis thaliana]
  misc_feature (1)..(202): Homolog of NCBI NO: 30688076 NR Description: expressed protein [Arabidopsis thaliana]
  misc_feature (1)..(202): Homolog of NCBI NO: 20198306 NR Description: expressed protein [Arabidopsis thaliana]
MVSFVHIAKNVKATELSLYEDAILDACCQNIPADDELWYQVIEVSVMLLTFTQRSNPRSPWYDRMLSEMLGHLERQPLNKERRVAWLTLIGPVFDAMGLFLLAHFRRLFSLFFQWMHTDDNKTVLLTLKQIHAIIKLTWIRKSPYTLRLVDELVLLYKESATRSNREIMRDHILEILVLLQNCKGHQFEEAWKKHELDPDLTMLLSTFNKLCIKNSSP

SEQ ID NO: 3040 - DNA, 1671 bp, Zea mays subsp. mays
  misc_feature (1)..(1671): Ceres Seq. ID no. 12594232
  misc_feature: MA Experiment ID: 20000492 Result: Up-regulated in Transcription
  misc_feature: MA Experiment 20000492 PARAMETER Experiment Name: Zm_Hybrid_Seed_Dev_P Parameter: DAP Value: 12
  misc_feature: MA Experiment 20000492 PARAMETER Experiment Name: Zm_Hybrid_Seed_Dev_P Parameter: Organism Value: Zea mays
  misc_feature: MA Experiment 20000492 PARAMETER Experiment Name: Zm_Hybrid_Seed_Dev_P Parameter: Plant Line Value: 35A19
  misc_feature: MA Experiment 20000492 PARAMETER Experiment Name: Zm_Hybrid_Seed_Dev_P Parameter: Tissue Value: Fert Kernel vs. Unfert Floret
aaaaatttccccatctccgacctcccccttcctctccccctgccgctccccgcgccgagaaggagaaccccagccgccgcgcagcgcgccgcccatggcctcctcgtcggagaacgcggctgtgccgccggaggaggagccccaggccccgccgccgccggacacagagcctaccgaggcggcgcccggcgaggcggaggatgagccgcaaaccctagagcgggcgcaggagctcttcgacaggggttccaaggccatcgaggatgaggacttcgtcgacgccgtagactgtctcagccgagcgctcgagatcagggcttcacattatggagagctcgcaccggagtgtgccagcacatacttcaaatatggatgtgccctgctatacaaagctcaggaggagagtgatgttttgggaaatgttcccaagagcttgccaaatgaagactcagtgaagagtacagctactaaagatgacagtggaacctcaaaggtctctggtaccgatgcggaggatgctgcgtcatcagaaaaagttgatgctgaagaaggtcacaactcaaatggcaaaaatcaggagaatgggaatggtgaagttgagaaagatgatgacgacgtcgacgatgatgagaagatgggagatgaagaggataatgatttggatctttcttggaaaatgttggacattgctagggcaatagttgagaagagccaagataacactatggagaaagtaaaaatatattctgctcttgctgaagtggcaacggaaagagaggacatggacaactcactcagtgactatatgaaagctttatccatgttggagcatttggttgagcctgaccatcgtcgagttgtggaattaaacttccgcatttgtttggtttatgaactagtttccaagatcggagaagcaatttcatactgtgcaaaagcaatttcgctatgcaagtcacgcatacagagcctgaaaagttccaaggatgctttgttggctggtatagatggtgatgcatctgctgctgaagctgaaggaggctcagaaaaatctgccattgaaaaagagctagagcagcttactagcatattgcctgatcttgagaagaagcttgaggacctgtctgaagcaaacccaagcgctgacatggatgagatggtgaaggcaatcgtgtccagggtaactgatgtgatgccaaaagctgcatcttttacttcttcccagatggcaacctcaagcaatggattcgactcctcggttatgtctacggcagcgacaaccggaagctctggaagcaccgtgactgaccttggggttgtaggcagaggcgtcaaacgagctagcatcaagccgatctctgctgaacctgctgctaagaaacctgcacttgattcaccatctcaacaaggtgacagcagcatcaactctgaggttgttcctgcaacgcagactggagacgagtcagtatctaagtaaattacaatttcattagccctactgtaatgttaacttgctggaacatattagctgctatgtaaacgcttaagaagggactgctggggccatagactcatcgtgagctgaccattgaaatgttaaattgctgagatcatcatggcggtaaatcatgtctgctatatcaaatatgcttggtgagatgtgtactttcc

SEQ ID NO: 3041 - protein, 491 aa, Zea mays subsp. mays
  peptide (1)..(491): Ceres Seq. ID no. 12594233
  misc_feature (75)..(108): Pfam Name: TPR Domain Pfam Description: TPR Domain
  misc_feature (32)..(491): Homolog of NCBI NO: 38175649 NR Description: tetratricopeptide repeat-containing protein-like
  misc_feature (140)..(491): Homolog of NCBI NO: 32352192 NR Description: hypothetical protein [Oryza sativa (japonica
  misc_feature (54)..(432): Homolog of NCBI NO: 18419996 NR Description: putative protein; protein id: At4g37210.1 thaliana] >gi|13877853|gb|AAK44004.1|AF370189_1 unknown protein thaliana] >gi|17065596|gb|AAL33778.1| unknown protein
  misc_feature (54)..(375): Homolog of NCBI NO: 25407799 NR Description: hypothetical protein AT4g37210 [imported] - thaliana >gi|4006859|emb|CAB16777.1| putative protein thaliana] >gi|7270704|emb|CAB80387.1| putative protein
  misc_feature (61)..(330): Homolog of NCBI NO: 4104353 NR Description: nuclear autoantigenic sperm protein autosomal
  misc_feature (59)..(136): Homolog of NCBI NO: 18129310 NR Description: hypothetical protein [Pinus pinaster]
  misc_feature (52)..(482): Homolog of NCBI NO: 123127 NR Description: HISTONE-BINDING PROTEIN N1/N2
  misc_feature (32)..(330): Homolog of NCBI NO: 13435642 NR Description: Unknown (protein for MGC:5829) [Mus musculus]
  misc_feature (61)..(330): Homolog of NCBI NO: 27262630 NR Description: nuclear autoantigenic sperm protein isoform 3;
  misc_feature (61)..(330): Homolog of NCBI NO: 30584691 NR Description: Homo sapiens nuclear autoantigenic sperm protein
KISPSPTSPFLSPCRSPRREGEPQPPRSAPPMASSSENAAVPPEEEPQAPPPPDTEPTEAAPGEAEDEPQTLERAQELFDRGSKAIEDEDFVDAVDCLSRALEIRASHYGELAPECASTYFKYGCALLYKAQEESDVLGNVPKSLPNEDSVKSTATKDDSGTSKVSGTDAEDAASSEKVDAEEGHNSNGKNQENGNGEVEKDDDDVDDDEKMGDEEDNDLDLSWKMLDIARAIVEKSQDNTMEKVKIYSALAEVATEREDMDNSLSDYMKALSMLEHLVEPDHRRVVELNFRICLVYELVSKIGEAISYCAKAISLCKSRIQSLKSSKDALLAGIDGDASAAEAEGGSEKSAIEKELEQLTSILPDLEKKLEDLSEANPSADMDEMVKAIVSRVTDVMPKAASFTSSQMATSSNGFDSSVMSTAATTGSSGSTVTDLGVVGRGVKRASIKPISAEPAAKKPALDSPSQQGDSSINSEVVPATQTGDESVSK

SEQ ID NO: 3042 - protein, 460 aa, Zea mays subsp. mays
  peptide (1)..(460): Ceres Seq. ID no. 12594234
  misc_feature (44)..(77): Pfam Name: TPR Domain Pfam Description: TPR Domain
  misc_feature (1)..(460): Homolog of NCBI NO: 38175649 NR Description: tetratricopeptide repeat-containing protein-like
  misc_feature (109)..(460): Homolog of NCBI NO: 32352192 NR Description: hypothetical protein [Oryza sativa (japonica
  misc_feature (23)..(401): Homolog of NCBI NO: 18419996 NR Description: putative protein; protein id: At4g37210.1 thaliana] >gi|13877853|gb|AAK44004.1|AF370189_1 unknown protein thaliana] >gi|17065596|gb|AAL33778.1| unknown protein
  misc_feature (23)..(344): Homolog of NCBI NO: 25407799 NR Description: hypothetical protein AT4g37210 [imported] - thaliana >gi|4006859|emb|CAB16777.1| putative protein thaliana] >gi|7270704|emb|CAB80387.1| putative protein
  misc_feature (30)..(299): Homolog of NCBI NO: 4104353 NR Description: nuclear autoantigenic sperm protein autosomal
  misc_feature (28)..(105): Homolog of NCBI NO: 18129310 NR Description: hypothetical protein [Pinus pinaster]
  misc_feature (21)..(451): Homolog of NCBI NO: 123127 NR Description: HISTONE-BINDING PROTEIN N1/N2
  misc_feature (1)..(299): Homolog of NCBI NO: 13435642 NR Description: Unknown (protein for MGC:5829) [Mus musculus]
  misc_feature (30)..(299): Homolog of NCBI NO: 27262630 NR Description: nuclear autoantigenic sperm protein isoform 3;
  misc_feature (30)..(299): Homolog of NCBI NO: 30584691 NR Description: Homo sapiens nuclear autoantigenic sperm protein
MASSSENAAVPPEEEPQAPPPPDTEPTEAAPGEAEDEPQTLERAQELFDRGSKAIEDEDFVDAVDCLSRALEIRASHYGELAPECASTYFKYGCALLYKAQEESDVLGNVPKSLPNEDSVKSTATKDDSGTSKVSGTDAEDAASSEKVDAEEGHNSNGKNQENGNGEVEKDDDDVDDDEKMGDEEDNDLDLSWKMLDIARAIVEKSQDNTMEKVKIYSALAEVATEREDMDNSLSDYMKALSMLEHLVEPDHRRVVELNFRICLVYELVSKIGEAISYCAKAISLCKSRIQSLKSSKDALLAGIDGDASAAEAEGGSEKSAIEKELEQLTSILPDLEKKLEDLSEANPSADMDEMVKAIVSRVTDVMPKAASFTSSQMATSSNGFDSSVMSTAATTGSSGSTVTDLGVVGRGVKRASIKPISAEPAAKKPALDSPSQQGDSSINSEVVPATQTGDESVSK

SEQ ID NO: 3043 - protein, 280 aa, Zea mays subsp. mays; identical to SEQ ID NO: 2639
  peptide (1)..(280): Ceres Seq. ID no. 12594235
  misc_feature (1)..(119): Homolog of NCBI NO: 4104353 NR Description: nuclear autoantigenic sperm protein autosomal
  misc_feature (1)..(271): Homolog of NCBI NO: 123127 NR Description: HISTONE-BINDING PROTEIN N1/N2
  misc_feature (1)..(119): Homolog of NCBI NO: 13435642 NR Description: Unknown (protein for MGC:5829) [Mus musculus]
  misc_feature (1)..(119): Homolog of NCBI NO: 27262630 NR Description: nuclear autoantigenic sperm protein isoform 3;
  misc_feature (1)..(119): Homolog of NCBI NO: 30584691 NR Description: Homo sapiens nuclear autoantigenic sperm protein
  misc_feature (1)..(268): Homolog of NCBI NO: 28277791 NR Description: Unknown (protein for MGC:56007) [Danio rerio]
  misc_feature (1)..(280): Homolog of NCBI NO: 38175649 NR Description: tetratricopeptide repeat-containing protein-like
  misc_feature (1)..(280): Homolog of NCBI NO: 32352192 NR Description: hypothetical protein [Oryza sativa (japonica
  misc_feature (1)..(221): Homolog of NCBI NO: 18419996 NR Description: putative protein; protein id: At4g37210.1 thaliana] >gi|13877853|gb|AAK44004.1|AF370189_1 unknown protein thaliana] >gi|17065596|gb|AAL33778.1| unknown protein
  misc_feature (1)..(164): Homolog of NCBI NO: 25407799 NR Description: hypothetical protein AT4g37210 [imported] - thaliana >gi|4006859|emb|CAB16777.1| putative protein thaliana] >gi|7270704|emb|CAB80387.1| putative protein

SEQ ID NO: 3044 - DNA, 1252 bp, Zea mays subsp. mays
  misc_feature (1)..(1252): Ceres Seq. ID no. 12412175
  misc_feature: MA Experiment ID: 108515 Result: Up-regulated in Transcription
  misc_feature: MA Experiment 108515 PARAMETER Experiment Name: Zm_2mM_SA_P Parameter: Age (day) Value: 8
  misc_feature: MA Experiment 108515 PARAMETER Experiment Name: Zm_2mM_SA_P Parameter: Organism Value: Zea mays
  misc_feature: MA Experiment 108515 PARAMETER Experiment Name: Zm_2mM_SA_P Parameter: Plant Line Value: 35A19
  misc_feature: MA Experiment 108515 PARAMETER Experiment Name: Zm_2mM_SA_P Parameter: Timepoint (hr) Value: 12
  misc_feature: MA Experiment 108515 PARAMETER Experiment Name: Zm_2mM_SA_P Parameter: Tissue Value: Aerial
  misc_feature: MA Experiment 108515 PARAMETER Experiment Name: Zm_2mM_SA_P Parameter: Treatment Value: 2mM SA vs. No Treatment
  misc_feature: MA Experiment ID: 108527 Result: Up-regulated in Transcription
  misc_feature: MA Experiment 108527 PARAMETER Experiment Name: Zm_5mM_NO_P Parameter: Age (day) Value: 8
  misc_feature: MA Experiment 108527 PARAMETER Experiment Name: Zm_5mM_NO_P Parameter: Organism Value: Zea mays
  misc_feature: MA Experiment 108527 PARAMETER Experiment Name: Zm_5mM_NO_P Parameter: Plant Line Value: 35A19
  misc_feature: MA Experiment 108527 PARAMETER Experiment Name: Zm_5mM_NO_P Parameter: Timepoint (hr) Value: 6
  misc_feature: MA Experiment 108527 PARAMETER Experiment Name: Zm_5mM_NO_P Parameter: Tissue Value: Aerial
  misc_feature: MA Experiment 108527 PARAMETER Experiment Name: Zm_5mM_NO_P Parameter: Treatment Value: 5mM NO vs. No Treatment
  misc_feature: MA Experiment ID: 108528 Result: Down-regulated in Transcription
  misc_feature: MA Experiment 108528 PARAMETER Experiment Name: Zm_Imbibed_Seeds_P Parameter: Age (day) Value: 5 vs. 2
  misc_feature: MA Experiment 108528 PARAMETER Experiment Name: Zm_Imbibed_Seeds_P Parameter: Organism Value: Zea mays
  misc_feature: MA Experiment 108528 PARAMETER Experiment Name: Zm_Imbibed_Seeds_P Parameter: Plant Line Value: 35A19
  misc_feature: MA Experiment 108528 PARAMETER Experiment Name: Zm_Imbibed_Seeds_P Parameter: Tissue Value: Aerial vs. Embryo
  misc_feature: MA Experiment ID: 108530 Result: Down-regulated in Transcription
  misc_feature: MA Experiment 108530 PARAMETER Experiment Name: Zm_Imbibed_Seeds_P Parameter: Age (day) Value: 6 vs. 2
  misc_feature: MA Experiment 108530 PARAMETER Experiment Name: Zm_Imbibed_Seeds_P Parameter: Organism Value: Zea mays
  misc_feature: MA Experiment 108530 PARAMETER Experiment Name: Zm_Imbibed_Seeds_P Parameter: Plant Line Value: 35A19
  misc_feature: MA Experiment 108530 PARAMETER Experiment Name: Zm_Imbibed_Seeds_P Parameter: Tissue Value: Aerial vs. Embryo
  misc_feature: MA Experiment ID: 108534 Result: Up-regulated in Transcription
  misc_feature: MA Experiment 108534 PARAMETER Experiment Name: Zm_4deg_Cold_P Parameter: Age (hr) Value: 8
  misc_feature: MA Experiment 108534 PARAMETER Experiment Name: Zm_4deg_Cold_P Parameter: Organism Value: Zea mays
  misc_feature: MA Experiment 108534 PARAMETER Experiment Name: Zm_4deg_Cold_P Parameter: Plant Line Value: 35A19
  misc_feature: MA Experiment 108534 PARAMETER Experiment Name: Zm_4deg_Cold_P Parameter: Temperature (deg C) Value: 4 vs. 22
  misc_feature: MA Experiment 108534 PARAMETER Experiment Name: Zm_4deg_Cold_P Parameter: Timepoint (hr) Value: 6
  misc_feature: MA Experiment 108534 PARAMETER Experiment Name: Zm_4deg_Cold_P Parameter: Tissue Value: Aerial
  misc_feature: MA Experiment ID: 108536 Result: Up-regulated in Transcription
  misc_feature: MA Experiment 108536 PARAMETER Experiment Name: Zm_Meristem_P Parameter: Age (day) Value: 8
  misc_feature: MA Experiment 108536 PARAMETER Experiment Name: Zm_Meristem_P Parameter: Organism Value: Zea mays
  misc_feature: MA Experiment 108536 PARAMETER Experiment Name: Zm_Meristem_P Parameter: Plant Line Value: 35A19
  misc_feature: MA Experiment 108536 PARAMETER Experiment Name: Zm_Meristem_P Parameter: Tissue Value: Shoot Meristem vs. Above Shoot Meristem
  misc_feature: MA Experiment ID: 108544 Result: Down-regulated in Transcription
  misc_feature: MA Experiment ID: 108545 Result: Down-regulated in Transcription
  misc_feature: MA Experiment 108545 PARAMETER Experiment Name: Zm_Imbibed_Seeds_P Parameter: Age (day) Value: 3 vs. 2
  misc_feature: MA Experiment 108545 PARAMETER Experiment Name: Zm_Imbibed_Seeds_P Parameter: Organism Value: Zea mays
  misc_feature: MA Experiment 108545 PARAMETER Experiment Name: Zm_Imbibed_Seeds_P Parameter: Plant Line Value: 35A19
  misc_feature: MA Experiment 108545 PARAMETER Experiment Name: Zm_Imbibed_Seeds_P Parameter: Tissue Value: Aerial vs. Embryo
  misc_feature: MA Experiment ID: 108547 Result: Down-regulated in Transcription
  misc_feature: MA Experiment 108547 PARAMETER Experiment Name: Zm_Imbibed_Seeds_P Parameter: Age (day) Value: 4 vs. 2
  misc_feature: MA Experiment 108547 PARAMETER Experiment Name: Zm_Imbibed_Seeds_P Parameter: Organism Value: Zea mays
  misc_feature: MA Experiment 108547 PARAMETER Experiment Name: Zm_Imbibed_Seeds_P Parameter: Plant Line Value: 35A19
  misc_feature: MA Experiment 108547 PARAMETER Experiment Name: Zm_Imbibed_Seeds_P Parameter: Tissue Value: Aerial vs. Embryo
  misc_feature: MA Experiment ID: 20000478 Result: Down-regulated in Transcription
  misc_feature: MA Experiment 20000478 PARAMETER Experiment Name: Zm_5mM_SA_P Parameter: Age (day) Value: 11
  misc_feature: MA Experiment 20000478 PARAMETER Experiment Name: Zm_5mM_SA_P Parameter: Organism Value: Zea mays
  misc_feature: MA Experiment 20000478 PARAMETER Experiment Name: Zm_5mM_SA_P Parameter: Plant Line Value: 35A19
  misc_feature: MA Experiment 20000478 PARAMETER Experiment Name: Zm_5mM_SA_P Parameter: Timepoint (hr) Value: 72
  misc_feature: MA Experiment 20000478 PARAMETER Experiment Name: Zm_5mM_SA_P Parameter: Tissue Value: Aerial
  misc_feature: MA Experiment 20000478 PARAMETER Experiment Name: Zm_5mM_SA_P Parameter: Treatment Value: 5mM SA vs. No Treatment
  misc_feature: MA Experiment ID: 20000535 Result: Down-regulated in Transcription
  misc_feature: MA Experiment 20000535 PARAMETER Experiment Name: Zm_Hybrid_Seed_Dev_P Parameter: DAP Value: 30 vs. 12
  misc_feature: MA Experiment 20000535 PARAMETER Experiment Name: Zm_Hybrid_Seed_Dev_P Parameter: Organism Value: Zea mays
  misc_feature: MA Experiment 20000535 PARAMETER Experiment Name: Zm_Hybrid_Seed_Dev_P Parameter: Plant Line Value: 35A19
  misc_feature: MA Experiment 20000535 PARAMETER Experiment Name: Zm_Hybrid_Seed_Dev_P Parameter: Tissue Value: Embryo vs. Unfert Floret
atgcagcagcgaacaacacaaattaagtagtggagtgtcagaacttgggaggcacaaattaagtacaaagcagtctaattaatgacgggcccgatggagattccggtgatcgatctcggcggcctcaacggcggcggcgaggagaggtcgcggaccttggcggagctccacgacgcctgcaaggactggggcttcttctgggtggagaaccacggcgtggacgcgccgctgatggacgaggtcaagcgcttcgtctacggccactacgaggagcacctggaggccaagttctacgcctccgccctcgccatggacctcgaggccgccaccagaggtgacactgatgagaagccctccgacgaggtggactgggagtccacctacttcatccagcaccaccccaagaccaacgtcgccgacttcccagagatcacgccgccgacacgagagacgctggacgcgtacgtcgcccagatggtgtccctcgcggagcgtctggcggagtgcatgagcctcaacctgggcctccccggcgcccacgtggccgccaccttcgcgccgccgttcgtgggcaccaagttcgccatgtacccgtcctgcccgcgcccggagctggtgtggggcctgcgcgcgcacaccgacgccggcggcatcatcctgctcctccaggacgacgtcgtgggcggcctcgagttcctcagggccggcgcccactgggtccccgtcggccccaccaaggggggcaggctcttcgtcaacatcggggaccagatcgaggtcctcagcgccggcgcctaccggagcgtcctgcaccgcgtcgcggccggggaccagggccgccgcctgtccgtggccacgttctacaaccctggcaccgacgccgtggtcgcgccagcgcccggcagggacgatcagggcgccggcgccgccgcgtaccccggtccctacaggttcggggactacctcgactactaccagggcaccaagttcggcgacaaggacgccaggttccaggccgtcaagaagctgctcggctaagcgaacagctgcaagtaggcagaggcagcttagctcgtggactatgcatagtttcaagcttgctgcttgcttcttgttcgatccattgtctgcatgcgtactgttgcgtgtttaaatttagcaaatcttatacgtagtcgttactggtactacgtattctgtggttgacaatacattgttgcggtttaagggcgcatccgtttggtggacttgc

SEQ ID NO: 3045 - protein, 318 aa, Zea mays subsp. mays
  peptide (1)..(318): Ceres Seq. ID no. 12412176
  misc_feature (161)..(263): Pfam Name: 2OG-Fe(II) oxygenase superfamily Pfam Description: 2OG-Fe(II) oxygenase superfamily
  misc_feature (1)..(314): Homolog of NCBI NO: 7433198 NR Description: probable 1-aminocyclopropane-1-carboxylate
  misc_feature (5)..(316): Homolog of NCBI NO: 7433206 NR Description: probable 1-aminocyclopropane-1-carboxylate
  misc_feature (8)..(316): Homolog of NCBI NO: 29467012 NR Description: ACC oxidase [Striga hermonthica]
  misc_feature (8)..(316): Homolog of NCBI NO: 2492612 NR Description: 1-aminocyclopropane-1-carboxylate oxidase 1 (ACC
  misc_feature (1)..(316): Homolog of NCBI NO: 12862572 NR Description: 1-aminocyclopropane-1-carboxylate oxidase
  misc_feature (5)..(316): Homolog of NCBI NO: 2129503 NR Description: ACC oxidase (clone ACO2) oxidase - muskmelon
  misc_feature (2)..(316): Homolog of NCBI NO: 25989506 NR Description: ACC oxidase [Solanum tuberosum]
  misc_feature (5)..(318): Homolog of NCBI NO: 15224803 NR Description: 1-aminocyclopropane-1-carboxylate oxidase
  misc_feature (5)..(316): Homolog of NCBI NO: 30060226 NR Description: 1-aminocyclopropane-1-carboxylic acid oxidase
  misc_feature (5)..(316): Homolog of NCBI NO: 34913082 NR Description: putative 1-aminocyclopropane-1-carboxylate
MTGPMEIPVIDLGGLNGGGEERSRTLAELHDACKDWGFFWVENHGVDAPLMDEVKRFVYGHYEEHLEAKFYASALAMDLEAATRGDTDEKPSDEVDWESTYFIQHHPKTNVADFPEITPPTRETLDAYVAQMVSLAERLAECMSLNLGLPGAHVAATFAPPFVGTKFAMYPSCPRPELVWGLRAHTDAGGIILLLQDDVVGGLEFLRAGAHWVPVGPTKGGRLFVNIGDQIEVLSAGAYRSVLHRVAAGDQGRRLSVATFYNPGTDAVVAPAPGRDDQGAGAAAYPGPYRFGDYLDYYQGTKFGDKDARFQAVKKLLG

SEQ ID NO: 3046 - protein, 314 aa, Zea mays subsp. mays
  peptide (1)..(314): Ceres Seq. ID no. 12412177
  misc_feature (157)..(259): Pfam Name: 2OG-Fe(II) oxygenase superfamily Pfam Description: 2OG-Fe(II) oxygenase superfamily
  misc_feature (1)..(310): Homolog of NCBI NO: 7433198 NR Description: probable 1-aminocyclopropane-1-carboxylate
  misc_feature (1)..(312): Homolog of NCBI NO: 7433206 NR Description: probable 1-aminocyclopropane-1-carboxylate
  misc_feature (4)..(312): Homolog of NCBI NO: 29467012 NR Description: ACC oxidase [Striga hermonthica]
  misc_feature (4)..(312): Homolog of NCBI NO: 2492612 NR Description: 1-aminocyclopropane-1-carboxylate oxidase 1 (ACC
  misc_feature (1)..(312): Homolog of NCBI NO: 12862572 NR Description: 1-aminocyclopropane-1-carboxylate oxidase
  misc_feature (1)..(312): Homolog of NCBI NO: 2129503 NR Description: ACC oxidase (clone ACO2) oxidase - muskmelon
  misc_feature (1)..(312): Homolog of NCBI NO: 25989506 NR Description: ACC oxidase [Solanum tuberosum]
  misc_feature (1)..(314): Homolog of NCBI NO: 15224803 NR Description: 1-aminocyclopropane-1-carboxylate oxidase
  misc_feature (1)..(312): Homolog of NCBI NO: 30060226 NR Description: 1-aminocyclopropane-1-carboxylic acid oxidase
  misc_feature (1)..(312): Homolog of NCBI NO: 34913082 NR Description: putative 1-aminocyclopropane-1-carboxylate
MEIPVIDLGGLNGGGEERSRTLAELHDACKDWGFFWVENHGVDAPLMDEVKRFVYGHYEEHLEAKFYASALAMDLEAATRGDTDEKPSDEVDWESTYFIQHHPKTNVADFPEITPPTRETLDAYVAQMVSLAERLAECMSLNLGLPGAHVAATFAPPFVGTKFAMYPSCPRPELVWGLRAHTDAGGIILLLQDDVVGGLEFLRAGAHWVPVGPTKGGRLFVNIGDQIEVLSAGAYRSVLHRVAAGDQGRRLSVATFYNPGTDAVVAPAPGRDDQGAGAAAYPGPYRFGDYLDYYQGTKFGDKDARFQAVKKLLG

SEQ ID NO: 3047 - protein, 268 aa, Zea mays subsp. mays
  peptide (1)..(268): Ceres Seq. ID no. 12412178
  misc_feature (111)..(213): Pfam Name: 2OG-Fe(II) oxygenase superfamily Pfam Description: 2OG-Fe(II) oxygenase superfamily
  misc_feature (1)..(264): Homolog of NCBI NO: 7433198 NR Description: probable 1-aminocyclopropane-1-carboxylate
  misc_feature (1)..(266): Homolog of NCBI NO: 7433206 NR Description: probable 1-aminocyclopropane-1-carboxylate
  misc_feature (1)..(266): Homolog of NCBI NO: 29467012 NR Description: ACC oxidase [Striga hermonthica]
  misc_feature (1)..(266): Homolog of NCBI NO: 2492612 NR Description: 1-aminocyclopropane-1-carboxylate oxidase 1 (ACC
  misc_feature (1)..(266): Homolog of NCBI NO: 12862572 NR Description: 1-aminocyclopropane-1-carboxylate oxidase
  misc_feature (1)..(266): Homolog of NCBI NO: 2129503 NR Description: ACC oxidase (clone ACO2) oxidase - muskmelon
  misc_feature (1)..(266): Homolog of NCBI NO: 25989506 NR Description: ACC oxidase [Solanum tuberosum]
  misc_feature (1)..(268): Homolog of NCBI NO: 15224803 NR Description: 1-aminocyclopropane-1-carboxylate oxidase
  misc_feature (1)..(266): Homolog of NCBI NO: 30060226 NR Description: 1-aminocyclopropane-1-carboxylic acid oxidase
  misc_feature (1)..(266): Homolog of NCBI NO: 34913082 NR Description: putative 1-aminocyclopropane-1-carboxylate
MDEVKRFVYGHYEEHLEAKFYASALAMDLEAATRGDTDEKPSDEVDWESTYFIQHHPKTNVADFPEITPPTRETLDAYVAQMVSLAERLAECMSLNLGLPGAHVAATFAPPFVGTKFAMYPSCPRPELVWGLRAHTDAGGIILLLQDDVVGGLEFLRAGAHWVPVGPTKGGRLFVNIGDQIEVLSAGAYRSVLHRVAAGDQGRRLSVATFYNPGTDAVVAPAPGRDDQGAGAAAYPGPYRFGDYLDYYQGTKFGDKDARFQAVKKLLG

SEQ ID NO: 3048 - DNA, 1189 bp, Zea mays subsp. mays
  misc_feature (1)..(1189): Ceres Seq. ID no. 12356089
  misc_feature: MA Experiment ID: 108535 Result: Up-regulated in Transcription
  misc_feature: MA Experiment 108535 PARAMETER Experiment Name: Zm_Meristem_P Parameter: Age (day) Value: 8
  misc_feature: MA Experiment 108535 PARAMETER Experiment Name: Zm_Meristem_P Parameter: Organism Value: Zea mays
  misc_feature: MA Experiment 108535 PARAMETER Experiment Name: Zm_Meristem_P Parameter: Plant Line Value: 35A19
  misc_feature: MA Experiment 108535 PARAMETER Experiment Name: Zm_Meristem_P Parameter: Tissue Value: Root Meristem vs. Above Root Meristem
accgcaccaccgcaccgggcctcctccgagtctccgacctcctcctgtcttcggtgtcgtcgcccgcctccccatgaggccgccctcgagacatgcctcgtagcctcggcgtcagtagcagcagcagcaccaggcgctccctccgcgtcgcgccccccgcctcacccccgctgcggcggccgccgtcgccggcatggccatgccgttcgcgcgccgcgacatcgaggcggcgggcgccggcgccagcagcgacgactctcctgccgctaagaagggcaagcccgagctcgcaggggcgcgcccggctttgacgaggtccgaggcgttcgcgttcgcggccgtgctcgcgctcttcaccgccgggatcttctgcgtcttcctcaccgcgccacgcggcgagtttgggcagatcctccgcctcccgcgcagccttgccgacgtccgccttctcaaagacaatcttgctgtttacgcgagagattaccaaacgaattttatattgggttattgctcaatatacatcttcatgcaaacattcatgatccctgggacaatattcatgtctttacttgctggggctctttttggagtgattaaaggtggcattttggtagttttcactgccacagccggtggatcttcttgctattttgtctccaagctgattggcaggcccttggttagttggttgtggcctgaaaaactgagatatttccaatcagagattgctaagaggaaagaaaagctgctgaattatatgctttttctgagaataactccaactttgcccaatacattcataaatatggcgtcaccgattgttgacatacctttccatattttctttgctgcaacactagttggtcttattccagcatcttatattactgtaaaggctggtagagccctaggcgatctgaaatcagttagagagttgtatgacttcaagacattagtggttctgttccttattggatctgttgttgtcgttccaacaatcctgaaaaggaagagaacatacgaatgatgtcttagagcatctacatactttctttagatgttcaaaatgtattaggatttttttaccttttgttttcttgatatcgtatacattttcaattctatacgtagagatgtaaaatcgaatcgaatgctttctaatactagatgatgccatcattgtatctgc

SEQ ID NO: 3049 - protein, 277 aa, Zea mays subsp. mays
  peptide (1)..(277): Ceres Seq. ID no. 12356090
  misc_feature (12)..(179): Homolog of NCBI NO: 25407510 NR Description: hypothetical protein AT4g09580 [imported] -
  misc_feature (43)..(274): Homolog of NCBI NO: 21593768 NR Description: unknown [Arabidopsis thaliana]
  misc_feature (43)..(274): Homolog of NCBI NO: 18414967 NR Description: expressed protein
  misc_feature (8)..(277): Homolog of NCBI NO: 18409951 NR Description: expressed protein
  misc_feature (12)..(277): Homolog of NCBI NO: 30681121 NR Description: expressed protein [Arabidopsis thaliana]
  misc_feature (13)..(277): Homolog of NCBI NO: 22268065 NR Description: D7Ertd743e protein [Mus musculus]
  misc_feature (15)..(273): Homolog of NCBI NO: 20558053 NR Description: similar to KIAA0033 [Homo sapiens]
  misc_feature (1)..(273): Homolog of NCBI NO: 436224 NR Description: KIAA0033 [Homo sapiens]
  misc_feature (13)..(273): Homolog of NCBI NO: 34858940 NR Description: similar to D7Ertd743e protein [Rattus norvegicus]
  misc_feature (58)..(273): Homolog of NCBI NO: 28850296 NR Description: similar to Mus musculus (Mouse). Colon RCB-0549 cDNA, RIKEN full-length enriched library, clone:G430121L01 N-terminal nucleophile aminohydrolases (Ntn hydrolases) structure
MAMPFARRDIEAAGAGASSDDSPAAKKGKPELAGARPALTRSEAFAFAAVLALFTAGIFCVFLTAPRGEFGQILRLPRSLADVRLLKDNLAVYARDYQTNFILGYCSIYIFMQTFMIPGTIFMSLLAGALFGVIKGGILVVFTATAGGSSCYFVSKLIGRPLVSWLWPEKLRYFQSEIAKRKEKLLNYMLFLRITPTLPNTFINMASPIVDIPFHIFFAATLVGLIPASYITVKAGRALGDLKSVRELYDFKTLVVLFLIGSVVVVPTILKRKRTYE

SEQ ID NO: 3050 - protein, 275 aa, Zea mays subsp. mays
  peptide (1)..(275): Ceres Seq. ID no. 12356091
  misc_feature (11)..(275): Homolog of NCBI NO: 22268065 NR Description: D7Ertd743e protein [Mus musculus]
  misc_feature (13)..(271): Homolog of NCBI NO: 20558053 NR Description: similar to KIAA0033 [Homo sapiens]
  misc_feature (1)..(271): Homolog of NCBI NO: 436224 NR Description: KIAA0033 [Homo sapiens]
  misc_feature (11)..(271): Homolog of NCBI NO: 34858940 NR Description: similar to D7Ertd743e protein [Rattus norvegicus]
  misc_feature (56)..(271): Homolog of NCBI NO: 28850296 NR Description: similar to Mus musculus (Mouse). Colon RCB-0549 cDNA, RIKEN full-length enriched library, clone:G430121L01 N-terminal nucleophile aminohydrolases (Ntn hydrolases) structure
  misc_feature (10)..(177): Homolog of NCBI NO: 25407510 NR Description: hypothetical protein AT4g09580 [imported] -
  misc_feature (41)..(272): Homolog of NCBI NO: 21593768 NR Description: unknown [Arabidopsis thaliana]
  misc_feature (41)..(272): Homolog of NCBI NO: 18414967 NR Description: expressed protein
  misc_feature (6)..(275): Homolog of NCBI NO: 18409951 NR Description: expressed protein
  misc_feature (10)..(275): Homolog of NCBI NO: 30681121 NR Description: expressed protein [Arabidopsis thaliana]
MPFARRDIEAAGAGASSDDSPAAKKGKPELAGARPALTRSEAFAFAAVLALFTAGIFCVFLTAPRGEFGQILRLPRSLADVRLLKDNLAVYARDYQTNFILGYCSIYIFMQTFMIPGTIFMSLLAGALFGVIKGGILVVFTATAGGSSCYFVSKLIGRPLVSWLWPEKLRYFQSEIAKRKEKLLNYMLFLRITPTLPNTFINMASPIVDIPFHIFFAATLVGLIPASYITVKAGRALGDLKSVRELYDFKTLVVLFLIGSVVVVPTILKRKRTYE

SEQ ID NO: 3051 - protein, 166 aa, Zea mays subsp. mays
  peptide (1)..(166): Ceres Seq. ID no. 12356092
  misc_feature (1)..(166): Homolog of NCBI NO: 22268065 NR Description: D7Ertd743e protein [Mus musculus]
  misc_feature (1)..(162): Homolog of NCBI NO: 20558053 NR Description: similar to KIAA0033 [Homo sapiens]
  misc_feature (1)..(162): Homolog of NCBI NO: 436224 NR Description: KIAA0033 [Homo sapiens]
  misc_feature (1)..(162): Homolog of NCBI NO: 34858940 NR Description: similar to D7Ertd743e protein [Rattus norvegicus]
  misc_feature (1)..(162): Homolog of NCBI NO: 28850296 NR Description: similar to Mus musculus (Mouse). Colon RCB-0549 cDNA, RIKEN full-length enriched library, clone:G430121L01 N-terminal nucleophile aminohydrolases (Ntn hydrolases) structure
  misc_feature (1)..(68): Homolog of NCBI NO: 25407510 NR Description: hypothetical protein AT4g09580 [imported] -
  misc_feature (1)..(163): Homolog of NCBI NO: 21593768 NR Description: unknown [Arabidopsis thaliana]
  misc_feature (1)..(163): Homolog of NCBI NO: 18414967 NR Description: expressed protein
  misc_feature (1)..(166): Homolog of NCBI NO: 18409951 NR Description: expressed protein
  misc_feature (1)..(166): Homolog of NCBI NO: 30681121 NR Description: expressed protein [Arabidopsis thaliana]
MQTFMIPGTIFMSLLAGALFGVIKGGILVVFTATAGGSSCYFVSKLIGRPLVSWLWPEKLRYFQSEIAKRKEKLLNYMLFLRITPTLPNTFINMASPIVDIPFHIFFAATLVGLIPASYITVKAGRALGDLKSVRELYDFKTLVVLFLIGSVVVVPTILKRKRTYE

SEQ ID NO: 3052 - DNA, 1620 bp, Zea mays subsp. mays
  misc_feature (1)..(1620): Ceres Seq. ID no. 12352160
  misc_feature: MA Experiment ID: 108522 Result: Down-regulated in Transcription
  misc_feature: MA Experiment 108522 PARAMETER Experiment Name: Zm_42deg_Heat_P Parameter: Age (day) Value: 8
  misc_feature: MA Experiment 108522 PARAMETER Experiment Name: Zm_42deg_Heat_P Parameter: Organism Value: Zea mays
  misc_feature: MA Experiment 108522 PARAMETER Experiment Name: Zm_42deg_Heat_P Parameter: Plant Line Value: 35A19
  misc_feature: MA Experiment 108522 PARAMETER Experiment Name: Zm_42deg_Heat_P Parameter: Temperature (deg C) Value: 42 vs. 22
  misc_feature: MA Experiment 108522 PARAMETER Experiment Name: Zm_42deg_Heat_P Parameter: Timepoint (hr) Value: 1
  misc_feature: MA Experiment 108522 PARAMETER Experiment Name: Zm_42deg_Heat_P Parameter: Tissue Value: Aerial
  misc_feature: MA Experiment ID: 108529 Result: Up-regulated in Transcription
  misc_feature: MA Experiment 108529 PARAMETER Experiment Name: Zm_Imbibed_Seeds_P Parameter: Age (day) Value: 5 vs. 2
  misc_feature: MA Experiment 108529 PARAMETER Experiment Name: Zm_Imbibed_Seeds_P Parameter: Organism Value: Zea mays
  misc_feature: MA Experiment 108529 PARAMETER Experiment Name: Zm_Imbibed_Seeds_P Parameter: Plant Line Value: 35A19
  misc_feature: MA Experiment 108529 PARAMETER Experiment Name: Zm_Imbibed_Seeds_P Parameter: Tissue Value: Roots vs. Embryo
  misc_feature: MA Experiment ID: 108530 Result: Up-regulated in Transcription
  misc_feature: MA Experiment 108530 PARAMETER Experiment Name: Zm_Imbibed_Seeds_P Parameter: Age (day) Value: 6 vs. 2
  misc_feature: MA Experiment 108530 PARAMETER Experiment Name: Zm_Imbibed_Seeds_P Parameter: Organism Value: Zea mays
  misc_feature: MA Experiment 108530 PARAMETER Experiment Name: Zm_Imbibed_Seeds_P Parameter: Plant Line Value: 35A19
  misc_feature: MA Experiment 108530 PARAMETER Experiment Name: Zm_Imbibed_Seeds_P Parameter: Tissue Value: Aerial vs. Embryo
  misc_feature: MA Experiment ID: 108535 Result: Down-regulated in Transcription
  misc_feature: MA Experiment 108535 PARAMETER Experiment Name: Zm_Meristem_P Parameter: Age (day) Value: 8
  misc_feature: MA Experiment 108535 PARAMETER Experiment Name: Zm_Meristem_P Parameter: Organism Value: Zea mays
  misc_feature: MA Experiment 108535 PARAMETER Experiment Name: Zm_Meristem_P Parameter: Plant Line Value: 35A19
  misc_feature: MA Experiment 108535 PARAMETER Experiment Name: Zm_Meristem_P Parameter: Tissue Value: Root Meristem vs. Above Root Meristem
  misc_feature: MA Experiment ID: 108543 Result: Up-regulated in Transcription
  misc_feature: MA Experiment ID: 108546 Result: Up-regulated in Transcription
  misc_feature: MA Experiment 108546 PARAMETER Experiment Name: Zm_Imbibed_Seeds_P Parameter: Age (day) Value: 3 vs. 2
  misc_feature: MA Experiment 108546 PARAMETER Experiment Name: Zm_Imbibed_Seeds_P Parameter: Organism Value: Zea mays
  misc_feature: MA Experiment 108546 PARAMETER Experiment Name: Zm_Imbibed_Seeds_P Parameter: Plant Line Value: 35A19
  misc_feature: MA Experiment 108546 PARAMETER Experiment Name: Zm_Imbibed_Seeds_P Parameter: Tissue Value: Roots vs. Embryo
  misc_feature: MA Experiment ID: 108556 Result: Down-regulated in Transcription
  misc_feature: MA Experiment 108556 PARAMETER Experiment Name: Zm_Drought_P Parameter: Age (day) Value: 9
  misc_feature: MA Experiment 108556 PARAMETER Experiment Name: Zm_Drought_P Parameter: Organism Value: Zea mays
  misc_feature: MA Experiment 108556 PARAMETER Experiment Name: Zm_Drought_P Parameter: Plant Line Value: 35A19
  misc_feature: MA Experiment 108556 PARAMETER Experiment Name: Zm_Drought_P Parameter: Timepoint (hr) Value: 24
  misc_feature: MA Experiment 108556 PARAMETER Experiment Name: Zm_Drought_P Parameter: Tissue Value: Aerial
  misc_feature: MA Experiment 108556 PARAMETER Experiment Name: Zm_Drought_P Parameter: Treatment Value: Drought vs. No Drought
  misc_feature: MA Experiment ID: 108689 Result: Down-regulated in Transcription
  misc_feature: MA Experiment 108689 PARAMETER Experiment Name: Zm_Drought_Roots_P Parameter: Age (day) Value: 9
  misc_feature: MA Experiment 108689 PARAMETER Experiment Name: Zm_Drought_Roots_P Parameter: Organism Value: Zea mays
  misc_feature: MA Experiment 108689 PARAMETER Experiment Name: Zm_Drought_Roots_P Parameter: Plant Line Value: 35A19
  misc_feature: MA Experiment 108689 PARAMETER Experiment Name: Zm_Drought_Roots_P Parameter: Timepoint (hr) Value: 24
  misc_feature: MA Experiment 108689 PARAMETER Experiment Name: Zm_Drought_Roots_P Parameter: Tissue Value: Roots
  misc_feature: MA Experiment 108689 PARAMETER Experiment Name: Zm_Drought_Roots_P Parameter: Treatment Value: Drought vs. No Drought
  misc_feature: MA Experiment ID: 20000108 Result: Down-regulated in Transcription
  misc_feature: MA Experiment 20000108 PARAMETER Experiment Name: Zm_Root-Tips_P Parameter: Age (day) Value: 12
  misc_feature: MA Experiment 20000108 PARAMETER Experiment Name: Zm_Root-Tips_P Parameter: Organism Value: Zea mays
  misc_feature: MA Experiment 20000108 PARAMETER Experiment Name: Zm_Root-Tips_P Parameter: Tissue Value: Root tips vs. Root mid region    35
  misc_feature: MA Experiment 20000108 PARAMETER Experiment Name: Zm_Root-Tips_P Parameter: Tissue Value: Root tips vs. Root mid region   Sequence Listing-Misc Features (4)
  misc_feature: MA Experiment ID: 20000480 Result: Down-regulated in Transcription
  misc_feature: MA Experiment 20000480 PARAMETER Experiment Name: Zm_Drought_P Parameter: Age (day) Value: 11
  misc_feature: MA Experiment 20000480 PARAMETER Experiment Name: Zm_Drought_P Parameter: Organism Value: Zea mays
  misc_feature: MA Experiment 20000480 PARAMETER Experiment Name: Zm_Drought_P Parameter: Plant Line Value: 35A19
  misc_feature: MA Experiment 20000480 PARAMETER Experiment Name: Zm_Drought_P Parameter: Timepoint (hr) Value: 72
  misc_feature: MA Experiment 20000480 PARAMETER Experiment Name: Zm_Drought_P Parameter: Tissue Value: Aerial
  misc_feature: MA Experiment 20000480 PARAMETER Experiment Name: Zm_Drought_P Parameter: Treatment Value: Drought vs. No Drought
  misc_feature: MA Experiment ID: 20000488 Result: Down-regulated in Transcription
  misc_feature: MA Experiment 20000488 PARAMETER Experiment Name: Zm_50mM_NH4NO3_L_to_H_P Parameter: Organism Value: Zea mays
  misc_feature: MA Experiment 20000488 PARAMETER Experiment Name: Zm_50mM_NH4NO3_L_to_H_P Parameter: Timepoint (hr) Value: 8
  misc_feature: MA Experiment 20000488 PARAMETER Experiment Name: Zm_50mM_NH4NO3_L_to_H_P Parameter: Tissue Value: Leaves
  misc_feature: MA Experiment 20000488 PARAMETER Experiment Name: Zm_50mM_NH4NO3_L_to_H_P Parameter: Treatment Value: 50mM NH4NO3 vs. 100mM Mannitol
  misc_feature: MA Experiment ID: 20000492 Result: Down-regulated in Transcription
  misc_feature: MA Experiment 20000492 PARAMETER Experiment Name: Zm_Hybrid_Seed_Dev_P Parameter: DAP Value: 12
  misc_feature: MA Experiment 20000492 PARAMETER Experiment Name: Zm_Hybrid_Seed_Dev_P Parameter: Organism Value: Zea mays
  misc_feature: MA Experiment 20000492 PARAMETER Experiment Name: Zm_Hybrid_Seed_Dev_P Parameter: Plant Line Value: 35A19
  misc_feature: MA Experiment 20000492 PARAMETER Experiment Name: Zm_Hybrid_Seed_Dev_P Parameter: Tissue Value: Fert Kernel vs. Unfert Floret
  misc_feature: MA Experiment ID: 20000535 Result: Down-regulated in Transcription
  misc_feature: MA Experiment 20000535 PARAMETER Experiment Name: Zm_Hybrid_Seed_Dev_P Parameter: DAP Value: 30 vs. 12
  misc_feature: MA Experiment 20000535 PARAMETER Experiment Name: Zm_Hybrid_Seed_Dev_P Parameter: Organism Value: Zea mays
  misc_feature: MA Experiment 20000535 PARAMETER Experiment Name: Zm_Hybrid_Seed_Dev_P Parameter: Plant Line Value: 35A19
  misc_feature: MA Experiment 20000535 PARAMETER Experiment Name: Zm_Hybrid_Seed_Dev_P Parameter: Tissue Value: Embryo vs. Unfert Floret
  misc_feature: MA Experiment ID: 20000627 Result: Up-regulated in Transcription
  misc_feature: MA Experiment 20000627 PARAMETER Experiment Name: Zm_Herbicide-Treatments_P Parameter: Timepoint (hr) Value: 12
  misc_feature: MA Experiment 20000627 PARAMETER Experiment Name: Zm_Herbicide-Treatments_P Parameter: Tissue Value: Aerial
  misc_feature: MA Experiment 20000627 PARAMETER Experiment Name: Zm_Herbicide-Treatments_P Parameter: Treatment Value: Finale vs. No Treatment
gacatgcccgatcccgacgccctggcggccgcggtcgccgtcgccgggtgcgagggggtcgcctctcctgtgtcctgtgcccgtagataaggtcctcaatcctgaggaaagttccggtccaatctcttccaattgacaccgtgttggtgttgttctgacttctgttgaataggatgaacctgcatttacggaaaaaattctccctttgatgacccaacccctgtgaaaacaaaacaaccctcagaagatgtccaaactccaaacacacgaaaaggggagcgtgcgacgactttccgccgacctgcagagctgaatgtgcatttttggtcgtttgcatccttcgccgccggctctttctgcgtgttcttcttcttgtcgatttccgtcttgtgtatatactatatactatgctgctgtgctgggttacaagacaagcaagtggcaactggcaatatacggacaagccgtggcgggtatatacggacgaagaggaggaccggaggaggaagcttcagtgaggccctggactgcagcgggatggcgtcgccgccgccaccacgcgtgtgcgtaaccggtggcggcgggtacgtcgcctcatggctcgtcaagctcctgctctcccgcggctacgccgtgcacgccactgtccgcgacccaagtgatcccaagaacgcccacctgcaacagctggacggggcccgggagaggttgcgcctgttcaaggccgacgtgctcgaccgcgacgccctggcgaccgcggtcgtcgcgtgcgagggcgtcttccacgtcgcctcccctgtgcccgcggacaaagtcctcgatcccgagtccgaggtgctgtctcctgctgtcaagggcactctgaacgtcctccaggcctgctcggcaaacaacgttcagaaagttgtcgtggtttcgtccacggctgctgtttactttaacccgagctggccccaaggtagaaccaaagacgagagttgctggtcagacagagatttatgcattaagaacgagaactggtactgtgctgccaagacgattgctgaagaaactgcagtggagtatggagagaagaacgggctggttgttgtcacggtctgcccttgtatcgttttaggcccactcctgcagccgctgatcaatgccagcagcgaattactcatctacattataaaaggaggtcctagggtgctgaaaaacctcccctggaacatagtcgacgtccgtgacgtagctgatgctttgctcctagtatacgagaaagtggaatcatccgggagatacatctgtgcgcctaatcggatcagcacaaacaacatggtgaacttgtttaaaaagtcctaccctaactacaattatgtgaactgcgacaacaaggactatgaatctgaaatctcaccagttacatcggagaaacttaagagtctaggctggaacccaaggacaatggagaaaactttgttggacaacattgagtatttcgagaaggcagggtttttgcgtgatgcagagggttatccttgtcgtctactacctcatatttttcatttcgcttctgactaatgaaatagattctgtaaaacaattacgacaactactataactgtctttggacaattc

SEQ ID NO: 3053 - protein, 341 aa, Zea mays subsp. mays
  peptide (1)..(341): Ceres Seq. ID no. 12352161
  misc_feature (11)..(219): Pfam Name: NAD dependent epimerase/dehydratase family Pfam Description: NAD dependent epimerase/dehydratase family
  misc_feature (9)..(321): Homolog of NCBI NO: 3242328 NR Description: cinnamoyl-CoA reductase [Zea mays]
  misc_feature (1)..(321): Homolog of NCBI NO: 12034897 NR Description: cinnamoyl CoA reductase isoform 1 [Arabidopsis
  misc_feature (9)..(321): Homolog of NCBI NO: 9964087 NR Description: cinnamoyl CoA reductase [Lolium perenne]
  misc_feature (1)..(321): Homolog of NCBI NO: 15218377 NR Description: cinnamoyl CoA reductase, puitative
  misc_feature (9)..(321): Homolog of NCBI NO: 3341511 NR Description: cinnamoyl-CoA reductase [Saccharum officinarum]
  misc_feature (9)..(321): Homolog of NCBI NO: 17978649 NR Description: cinnamoyl-CoA reductase [Pinus taeda]
  misc_feature (1)..(318): Homolog of NCBI NO: 15226135 NR Description: putative cinnamoyl-CoA reductase
  misc_feature (8)..(324): Homolog of NCBI NO: 6554472 NR Description: putative cinnamoyl-CoA reductase; 14056-15506
  misc_feature (8)..(324): Homolog of NCBI NO: 15223068 NR Description: putative cinnamoyl-CoA reductase; protein id:
  misc_feature (1)..(318): Homolog of NCBI NO: 15226134 NR Description: putative cinnamoyl-CoA reductase
MASPPPPRVCVTGGGGYVASWLVKLLLSRGYAVHATVRDPSDPKNAHLQQLDGARERLRLFKADVLDRDALATAVVACEGVFHVASPVPADKVLDPESEVLSPAVKGTLNVLQACSANNVQKVVVVSSTAAVYFNPSWPQGRTKDESCWSDRDLCIKNENWYCAAKTIAEETAVEYGEKNGLVVVTVCPCIVLGPLLQPLINASSELLIYIIKGGPRVLKNLPWNIVDVRDVADALLLVYEKVESSGRYICAPNRISTNNMVNLFKKSYPNYNYVNCDNKDYESEISPVTSEKLKSLGWNPRTMEKTLLDNIEYFEKAGFLRDAEGYPCRLLPHIFHFASD

SEQ ID NO: 3054 - DNA, 1406 bp, Zea mays subsp. mays
  misc_feature (1)..(1406): Ceres Seq. ID no. 13498652
  misc_feature: MA Experiment ID: 108522 Result: Down-regulated in Transcription
  misc_feature: MA Experiment 108522 PARAMETER Experiment Name: Zm_42deg_Heat_P Parameter: Age (day) Value: 8
  misc_feature: MA Experiment 108522 PARAMETER Experiment Name: Zm_42deg_Heat_P Parameter: Organism Value: Zea mays
  misc_feature: MA Experiment 108522 PARAMETER Experiment Name: Zm_42deg_Heat_P Parameter: Plant Line Value: 35A19
  misc_feature: MA Experiment 108522 PARAMETER Experiment Name: Zm_42deg_Heat_P Parameter: Temperature (deg C) Value: 42 vs. 22
  misc_feature: MA Experiment 108522 PARAMETER Experiment Name: Zm_42deg_Heat_P Parameter: Timepoint (hr) Value: 1
  misc_feature: MA Experiment 108522 PARAMETER Experiment Name: Zm_42deg_Heat_P Parameter: Tissue Value: Aerial
  misc_feature: MA Experiment ID: 108527 Result: Up-regulated in Transcription
  misc_feature: MA Experiment 108527 PARAMETER Experiment Name: Zm_5mM_NO_P Parameter: Age (day) Value: 8
  misc_feature: MA Experiment 108527 PARAMETER Experiment Name: Zm_5mM_NO_P Parameter: Organism Value: Zea mays
  misc_feature: MA Experiment 108527 PARAMETER Experiment Name: Zm_5mM_NO_P Parameter: Plant Line Value: 35A19
  misc_feature: MA Experiment 108527 PARAMETER Experiment Name: Zm_5mM_NO_P Parameter: Timepoint (hr) Value: 6
  misc_feature: MA Experiment 108527 PARAMETER Experiment Name: Zm_5mM_NO_P Parameter: Tissue Value: Aerial
  misc_feature: MA Experiment 108527 PARAMETER Experiment Name: Zm_5mM_NO_P Parameter: Treatment Value: 5mM NO vs. No Treatment
  misc_feature: MA Experiment ID: 108535 Result: Down-regulated in Transcription
  misc_feature: MA Experiment 108535 PARAMETER Experiment Name: Zm_Meristem_P Parameter: Age (day) Value: 8
  misc_feature: MA Experiment 108535 PARAMETER Experiment Name: Zm_Meristem_P Parameter: Organism Value: Zea mays
  misc_feature: MA Experiment 108535 PARAMETER Experiment Name: Zm_Meristem_P Parameter: Plant Line Value: 35A19
  misc_feature: MA Experiment 108535 PARAMETER Experiment Name: Zm_Meristem_P Parameter: Tissue Value: Root Meristem vs. Above Root Meristem
  misc_feature: MA Experiment ID: 108543 Result: Up-regulated in Transcription
  misc_feature: MA Experiment ID: 108545 Result: Down-regulated in Transcription
  misc_feature: MA Experiment 108545 PARAMETER Experiment Name: Zm_Imbibed_Seeds_P Parameter: Age (day) Value: 3 vs. 2
  misc_feature: MA Experiment 108545 PARAMETER Experiment Name: Zm_Imbibed_Seeds_P Parameter: Organism Value: Zea mays
  misc_feature: MA Experiment 108545 PARAMETER Experiment Name: Zm_Imbibed_Seeds_P Parameter: Plant Line Value: 35A19
  misc_feature: MA Experiment 108545 PARAMETER Experiment Name: Zm_Imbibed_Seeds_P Parameter: Tissue Value: Aerial vs. Embryo
  misc_feature: MA Experiment ID: 108546 Result: Up-regulated in Transcription
  misc_feature: MA Experiment 108546 PARAMETER Experiment Name: Zm_Imbibed_Seeds_P Parameter: Age (day) Value: 3 vs. 2
  misc_feature: MA Experiment 108546 PARAMETER Experiment Name: Zm_Imbibed_Seeds_P Parameter: Organism Value: Zea mays
  misc_feature: MA Experiment 108546 PARAMETER Experiment Name: Zm_Imbibed_Seeds_P Parameter: Plant Line Value: 35A19
  misc_feature: MA Experiment 108546 PARAMETER Experiment Name: Zm_Imbibed_Seeds_P Parameter: Tissue Value: Roots vs. Embryo
  misc_feature: MA Experiment ID: 108547 Result: Down-regulated in Transcription
  misc_feature: MA Experiment 108547 PARAMETER Experiment Name: Zm_Imbibed_Seeds_P Parameter: Age (day) Value: 4 vs. 2
  misc_feature: MA Experiment 108547 PARAMETER Experiment Name: Zm_Imbibed_Seeds_P Parameter: Organism Value: Zea mays
  misc_feature: MA Experiment 108547 PARAMETER Experiment Name: Zm_Imbibed_Seeds_P Parameter: Plant Line Value: 35A19
  misc_feature: MA Experiment 108547 PARAMETER Experiment Name: Zm_Imbibed_Seeds_P Parameter: Tissue Value: Aerial vs. Embryo
  misc_feature: MA Experiment ID: 108597 Result: Down-regulated in Transcription
  misc_feature: MA Experiment 108597 PARAMETER Experiment Name: Zm_100uM_ABA_P Parameter: Age (day) Value: 9
  misc_feature: MA Experiment 108597 PARAMETER Experiment Name: Zm_100uM_ABA_P Parameter: Organism Value: Zea mays
  misc_feature: MA Experiment 108597 PARAMETER Experiment Name: Zm_100uM_ABA_P Parameter: Plant Line Value: 35A19
  misc_feature: MA Experiment 108597 PARAMETER Experiment Name: Zm_100uM_ABA_P Parameter: Timepoint (hr) Value: 24
  misc_feature: MA Experiment 108597 PARAMETER Experiment Name: Zm_100uM_ABA_P Parameter: Tissue Value: Aerial
  misc_feature: MA Experiment 108597 PARAMETER Experiment Name: Zm_100uM_ABA_P Parameter: Treatment Value: 100uM ABA vs. No Treatment
  misc_feature: MA Experiment ID: 108689 Result: Down-regulated in Transcription
  misc_feature: MA Experiment 108689 PARAMETER Experiment Name: Zm_Drought_Roots_P Parameter: Age (day) Value: 9
  misc_feature: MA Experiment 108689 PARAMETER Experiment Name: Zm_Drought_Roots_P Parameter: Organism Value: Zea mays
  misc_feature: MA Experiment 108689 PARAMETER Experiment Name: Zm_Drought_Roots_P Parameter: Plant Line Value: 35A19
  misc_feature: MA Experiment 108689 PARAMETER Experiment Name: Zm_Drought_Roots_P Parameter: Timepoint (hr) Value: 24
  misc_feature: MA Experiment 108689 PARAMETER Experiment Name: Zm_Drought_Roots_P Parameter: Tissue Value: Roots
  misc_feature: MA Experiment 108689 PARAMETER Experiment Name: Zm_Drought_Roots_P Parameter: Treatment Value: Drought vs. No Drought
  misc_feature: MA Experiment ID: 20000477 Result: Down-regulated in Transcription
  misc_feature: MA Experiment 20000477 PARAMETER Experiment Name: Zm_5mM_SA_P Parameter: Age (day) Value: 10
  misc_feature: MA Experiment 20000477 PARAMETER Experiment Name: Zm_5mM_SA_P Parameter: Organism Value: Zea mays
  misc_feature: MA Experiment 20000477 PARAMETER Experiment Name: Zm_5mM_SA_P Parameter: Plant Line Value: 35A19
  misc_feature: MA Experiment 20000477 PARAMETER Experiment Name: Zm_5mM_SA_P Parameter: Timepoint (hr) Value: 48
  misc_feature: MA Experiment 20000477 PARAMETER Experiment Name: Zm_5mM_SA_P Parameter: Tissue Value: Aerial
  misc_feature: MA Experiment 20000477 PARAMETER Experiment Name: Zm_5mM_SA_P Parameter: Treatment Value: 5mM SA vs. No Treatment
  misc_feature: MA Experiment ID: 20000479 Result: Down-regulated in Transcription
  misc_feature: MA Experiment 20000479 PARAMETER Experiment Name: Zm_Drought_P Parameter: Age (day) Value: 10
  misc_feature: MA Experiment 20000479 PARAMETER Experiment Name: Zm_Drought_P Parameter: Organism Value: Zea mays
  misc_feature: MA Experiment 20000479 PARAMETER Experiment Name: Zm_Drought_P Parameter: Plant Line Value: 35A19
  misc_feature: MA Experiment 20000479 PARAMETER Experiment Name: Zm_Drought_P Parameter: Timepoint (hr) Value: 48
  misc_feature: MA Experiment 20000479 PARAMETER Experiment Name: Zm_Drought_P Parameter: Tissue Value: Aerial
  misc_feature: MA Experiment 20000479 PARAMETER Experiment Name: Zm_Drought_P Parameter: Treatment Value: Drought vs. No Drought
  misc_feature: MA Experiment ID: 20000492 Result: Down-regulated in Transcription
  misc_feature: MA Experiment 20000492 PARAMETER Experiment Name: Zm_Hybrid_Seed_Dev_P Parameter: DAP Value: 12
  misc_feature: MA Experiment 20000492 PARAMETER Experiment Name: Zm_Hybrid_Seed_Dev_P Parameter: Organism Value: Zea mays
  misc_feature: MA Experiment 20000492 PARAMETER Experiment Name: Zm_Hybrid_Seed_Dev_P Parameter: Plant Line Value: 35A19
  misc_feature: MA Experiment 20000492 PARAMETER Experiment Name: Zm_Hybrid_Seed_Dev_P Parameter: Tissue Value: Fert Kernel vs. Unfert Floret
  misc_feature: MA Experiment ID: 20000535 Result: Down-regulated in Transcription
  misc_feature: MA Experiment 20000535 PARAMETER Experiment Name: Zm_Hybrid_Seed_Dev_P Parameter: DAP Value: 30 vs. 12
  misc_feature: MA Experiment 20000535 PARAMETER Experiment Name: Zm_Hybrid_Seed_Dev_P Parameter: Organism Value: Zea mays
  misc_feature: MA Experiment 20000535 PARAMETER Experiment Name: Zm_Hybrid_Seed_Dev_P Parameter: Plant Line Value: 35A19
  misc_feature: MA Experiment 20000535 PARAMETER Experiment Name: Zm_Hybrid_Seed_Dev_P Parameter: Tissue Value: Embryo vs. Unfert Floret
aaatcggacacacggcaacagcacacactggacacgaatcgctagtagacacagcgcacagcggcagccggcaagcaagaacccaaacattccagtgcccttaccgttgcatgcagccatgacgaggatgagcttggcggtgtcggcgacgttctttgtgctcgcggtcgcctcggcggcgcagccggcgccgagcatgcccccgccggcggtggccgtgaacagctcccggctggagaaggcgtacgtggcgctgcaggcgctgaggcgcgccatcacggacgaccccaagaagctgacggagaactggtgcgggcccgacgtgtgcaactacttcggcgtgtactgcgcgccggcgcccgacgacccctgccagcgcaccgtggcctccgtggacctcaaccacggcgacctcgccgggacgctccccgaggagctgggcctgctgtccgacctcgccgtcttccacctcaactccaaccgcttctgcggctccctccccgagtcgctccggtccctgcacctcctccacgagatcgatgtcagcaacaacaggctgtccgggcccttcccgtcgcagctcctctgcctccccagtgtccagtacgtcgacatcaggtttaacaacttctgcggcgaggtgccggcggccatcttcgacaagaagatcgacgcgcttttcatcaacaacaaccacttcgagttcacgctgccggccagcttcaccaactcgacggcgtcggtgatcgtgctggcgaaccttccgcgggtgagcggctgcctgccgagcagcatcggcgacatggccggcacgctcaacgagctcatcctcctcaacagcggcatctcctcctgcatcccgccggagatcggcaagctggacaagctcaccgtgctcgacctcagcttcaacagcatcgccggcgcgctgccggacacgatcggcggcatgcgggcgctggagcagctggacgtcgcgcacaaccggctcaccggcgagatccccgagagcatctgcgagctgccgcacctcaagaacttcacctactcgtacaacttcttctgcggcgagccacgccggtgcctcgaggtgccgcgcgtcgacgaccggcagaactgcatcgctggccgccccgaccagcggccaggcgaggagtgcgtctcattcctacaccaaccgcaagtccactgcgacgcccacgggtgcatcgcgccaccacctccagcggtgcatgctcctccgccgcctgtatactgaattactgatcagtggtaacttgtaaatgtttcctgctcctgcctcgtggtgtgaaaacttggagggtaaacgcatacacatggtatatactgtaatttttattcatcagcagaagagagtaataatggattcatagatttacattacg

SEQ ID NO: 3055 - protein, 418 aa, Zea mays subsp. mays
  peptide (1)..(418): Ceres Seq. ID no. 13498653
  misc_feature (393)..(418): Homolog of NCBI NO: 30685162 NR Description: leucine-rich repeat extensin family [Arabidopsis
  misc_feature (75)..(416): Homolog of NCBI NO: 30685162 NR Description: leucine-rich repeat extensin family [Arabidopsis
  misc_feature (69)..(416): Homolog of NCBI NO: 15233976 NR Description: leucine-rich repeat extensin family [Arabidopsis
  misc_feature (69)..(416): Homolog of NCBI NO: 15235668 NR Description: leucine-rich repeat extensin family [Arabidopsis
  misc_feature (69)..(416): Homolog of NCBI NO: 15230120 NR Description: leucine-rich repeat extensin family [Arabidopsis
  misc_feature (64)..(416): Homolog of NCBI NO: 15228861 NR Description: leucine-rich repeat extensin family [Arabidopsis
  misc_feature (75)..(416): Homolog of NCBI NO: 34906174 NR Description: putative extensin-like protein
  misc_feature (69)..(416): Homolog of NCBI NO: 34912294 NR Description: putative extensin-like protein
  misc_feature (62)..(408): Homolog of NCBI NO: 37718858 NR Description: putative leucine-rich receptor-like protein
  misc_feature (39)..(354): Homolog of NCBI NO: 34393830 NR Description: extensin-like protein [Oryza sativa (japonica
  misc_feature (393)..(418): Homolog of NCBI NO: 30685162 NR Description: leucine-rich repeat extensin family [Arabidopsis
  misc_feature (75)..(416): Homolog of NCBI NO: 30685162 NR Description: leucine-rich repeat extensin family [Arabidopsis
  misc_feature (69)..(416): Homolog of NCBI NO: 15233976 NR Description: leucine-rich repeat extensin family [Arabidopsis
  misc_feature (69)..(416): Homolog of NCBI NO: 15235668 NR Description: leucine-rich repeat extensin family [Arabidopsis
  misc_feature (69)..(416): Homolog of NCBI NO: 15230120 NR Description: leucine-rich repeat extensin family [Arabidopsis
  misc_feature (64)..(416): Homolog of NCBI NO: 15228861 NR Description: leucine-rich repeat extensin family [Arabidopsis
  misc_feature (75)..(416): Homolog of NCBI NO: 34906174 NR Description: putative extensin-like protein
  misc_feature (69)..(416): Homolog of NCBI NO: 34912294 NR Description: putative extensin-like protein
  misc_feature (62)..(408): Homolog of NCBI NO: 37718858 NR Description: putative leucine-rich receptor-like protein
  misc_feature (39)..(354): Homolog of NCBI NO: 34393830 NR Description: extensin-like protein [Oryza sativa (japonica
NRTHGNSTHWTRIASRHSAQRQPASKNPNIPVPLPLHAAMTRMSLAVSATFFVLAVASAAQPAPSMPPPAVAVNSSRLEKAYVALQALRRAITDDPKKLTENWCGPDVCNYFGVYCAPAPDDPCQRTVASVDLNHGDLAGTLPEELGLLSDLAVFHLNSNRFCGSLPESLRSLHLLHEIDVSNNRLSGPFPSQLLCLPSVQYVDIRFNNFCGEVPAAIFDKKIDALFINNNHFEFTLPASFTNSTASVIVLANLPRVSGCLPSSIGDMAGTLNELILLNSGISSCIPPEIGKLDKLTVLDLSFNSIAGALPDTIGGMRALEQLDVAHNRLTGEIPESICELPHLKNFTYSYNFFCGEPRRCLEVPRVDDRQNCIAGRPDQRPGEECVSFLHQPQVHCDAHGCIAPPPPAVHAPPPPVY

SEQ ID NO: 3056 - protein, 379 aa, Zea mays subsp. mays
  peptide (1)..(379): Ceres Seq. ID no. 13498654
  misc_feature (354)..(379): Homolog of NCBI NO: 30685162 NR Description: leucine-rich repeat extensin family [Arabidopsis
  misc_feature (36)..(377): Homolog of NCBI NO: 30685162 NR Description: leucine-rich repeat extensin family [Arabidopsis
  misc_feature (30)..(377): Homolog of NCBI NO: 15233976 NR Description: leucine-rich repeat extensin family [Arabidopsis
  misc_feature (30)..(377): Homolog of NCBI NO: 15235668 NR Description: leucine-rich repeat extensin family [Arabidopsis
  misc_feature (30)..(377): Homolog of NCBI NO: 15230120 NR Description: leucine-rich repeat extensin family [Arabidopsis
  misc_feature (25)..(377): Homolog of NCBI NO: 15228861 NR Description: leucine-rich repeat extensin family [Arabidopsis
  misc_feature (36)..(377): Homolog of NCBI NO: 34906174 NR Description: putative extensin-like protein
  misc_feature (30)..(377): Homolog of NCBI NO: 34912294 NR Description: putative extensin-like protein
  misc_feature (23)..(369): Homolog of NCBI NO: 37718858 NR Description: putative leucine-rich receptor-like protein
  misc_feature (1)..(315): Homolog of NCBI NO: 34393830 NR Description: extensin-like protein [Oryza sativa (japonica
  misc_feature (354)..(379): Homolog of NCBI NO: 30685162 NR Description: leucine-rich repeat extensin family [Arabidopsis
  misc_feature (36)..(377): Homolog of NCBI NO: 30685162 NR Description: leucine-rich repeat extensin family [Arabidopsis
  misc_feature (30)..(377): Homolog of NCBI NO: 15233976 NR Description: leucine-rich repeat extensin family [Arabidopsis
  misc_feature (30)..(377): Homolog of NCBI NO: 15235668 NR Description: leucine-rich repeat extensin family [Arabidopsis
  misc_feature (30)..(377): Homolog of NCBI NO: 15230120 NR Description: leucine-rich repeat extensin family [Arabidopsis
  misc_feature (25)..(377): Homolog of NCBI NO: 15228861 NR Description: leucine-rich repeat extensin family [Arabidopsis
  misc_feature (36)..(377): Homolog of NCBI NO: 34906174 NR Description: putative extensin-like protein
  misc_feature (30)..(377): Homolog of NCBI NO: 34912294 NR Description: putative extensin-like protein
  misc_feature (23)..(369): Homolog of NCBI NO: 37718858 NR Description: putative leucine-rich receptor-like protein
  misc_feature (1)..(315): Homolog of NCBI NO: 34393830 NR Description: extensin-like protein [Oryza sativa (japonica
MTRMSLAVSATFFVLAVASAAQPAPSMPPPAVAVNSSRLEKAYVALQALRRAITDDPKKLTENWCGPDVCNYFGVYCAPAPDDPCQRTVASVDLNHGDLAGTLPEELGLLSDLAVFHLNSNRFCGSLPESLRSLHLLHEIDVSNNRLSGPFPSQLLCLPSVQYVDIRFNNFCGEVPAAIFDKKIDALFINNNHFEFTLPASFTNSTASVIVLANLPRVSGCLPSSIGDMAGTLNELILLNSGISSCIPPEIGKLDKLTVLDLSFNSIAGALPDTIGGMRALEQLDVAHNRLTGEIPESICELPHLKNFTYSYNFFCGEPRRCLEVPRVDDRQNCIAGRPDQRPGEECVSFLHQPQVHCDAHGCIAPPPPAVHAPPPPVY

SEQ ID NO: 3057 - protein, 376 aa, Zea mays subsp. mays
  peptide (1)..(376): Ceres Seq. ID no. 13498655
  misc_feature (351)..(376): Homolog of NCBI NO: 30685162 NR Description: leucine-rich repeat extensin family [Arabidopsis
  misc_feature (33)..(374): Homolog of NCBI NO: 30685162 NR Description: leucine-rich repeat extensin family [Arabidopsis
  misc_feature (27)..(374): Homolog of NCBI NO: 15233976 NR Description: leucine-rich repeat extensin family [Arabidopsis
  misc_feature (27)..(374): Homolog of NCBI NO: 15235668 NR Description: leucine-rich repeat extensin family [Arabidopsis
  misc_feature (27)..(374): Homolog of NCBI NO: 15230120 NR Description: leucine-rich repeat extensin family [Arabidopsis
  misc_feature (22)..(374): Homolog of NCBI NO: 15228861 NR Description: leucine-rich repeat extensin family [Arabidopsis
  misc_feature (33)..(374): Homolog of NCBI NO: 34906174 NR Description: putative extensin-like protein
  misc_feature (27)..(374): Homolog of NCBI NO: 34912294 NR Description: putative extensin-like protein
  misc_feature (20)..(366): Homolog of NCBI NO: 37718858 NR Description: putative leucine-rich receptor-like protein
  misc_feature (1)..(312): Homolog of NCBI NO: 34393830 NR Description: extensin-like protein [Oryza sativa (japonica
  misc_feature (351)..(376): Homolog of NCBI NO: 30685162 NR Description: leucine-rich repeat extensin family [Arabidopsis
  misc_feature (33)..(374): Homolog of NCBI NO: 30685162 NR Description: leucine-rich repeat extensin family [Arabidopsis
  misc_feature (27)..(374): Homolog of NCBI NO: 15233976 NR Description: leucine-rich repeat extensin family [Arabidopsis
  misc_feature (27)..(374): Homolog of NCBI NO: 15235668 NR Description: leucine-rich repeat extensin family [Arabidopsis
  misc_feature (27)..(374): Homolog of NCBI NO: 15230120 NR Description: leucine-rich repeat extensin family [Arabidopsis
  misc_feature (22)..(374): Homolog of NCBI NO: 15228861 NR Description: leucine-rich repeat extensin family [Arabidopsis
  misc_feature (33)..(374): Homolog of NCBI NO: 34906174 NR Description: putative extensin-like protein
  misc_feature (27)..(374): Homolog of NCBI NO: 34912294 NR Description: putative extensin-like protein
  misc_feature (20)..(366): Homolog of NCBI NO: 37718858 NR Description: putative leucine-rich receptor-like protein
  misc_feature (1)..(312): Homolog of NCBI NO: 34393830 NR Description: extensin-like protein [Oryza sativa (japonica
MSLAVSATFFVLAVASAAQPAPSMPPPAVAVNSSRLEKAYVALQALRRAITDDPKKLTENWCGPDVCNYFGVYCAPAPDDPCQRTVASVDLNHGDLAGTLPEELGLLSDLAVFHLNSNRFCGSLPESLRSLHLLHEIDVSNNRLSGPFPSQLLCLPSVQYVDIRFNNFCGEVPAAIFDKKIDALFINNNHFEFTLPASFTNSTASVIVLANLPRVSGCLPSSIGDMAGTLNELILLNSGISSCIPPEIGKLDKLTVLDLSFNSIAGALPDTIGGMRALEQLDVAHNRLTGEIPESICELPHLKNFTYSYNFFCGEPRRCLEVPRVDDRQNCIAGRPDQRPGEECVSFLHQPQVHCDAHGCIAPPPPAVHAPPPPVY

SEQ ID NO: 3058 - DNA, 967 bp, Zea mays subsp. mays
  misc_feature (1)..(967): Ceres Seq. ID no. 12403890
  misc_feature: MA Experiment ID: 108535 Result: Up-regulated in Transcription
  misc_feature: MA Experiment 108535 PARAMETER Experiment Name: Zm_Meristem_P Parameter: Age (day) Value: 8
  misc_feature: MA Experiment 108535 PARAMETER Experiment Name: Zm_Meristem_P Parameter: Organism Value: Zea mays
  misc_feature: MA Experiment 108535 PARAMETER Experiment Name: Zm_Meristem_P Parameter: Plant Line Value: 35A19
  misc_feature: MA Experiment 108535 PARAMETER Experiment Name: Zm_Meristem_P Parameter: Tissue Value: Root Meristem vs. Above Root Meristem
aacgcctttttactattttttttctattcccatttccaccctcgcaccgcatccacctccaccgcgccgccgcgagagaggggaaggagggtttccgatggagaacggcgaggagacgttcgcctcccccactgccgccgccgccgcggacttcgagatctccatcaacggcggggacagcacgcccaagctccacaatttggcggacgagatggaggccctccgcgcggcgaagcgcgacctggaggagaagctcgatgccgtgggacacgagaaccggttcctgtcctctgagtcccggcgcctcgaggtcctcgtgtcccaggcccgcgaggaggtcgccgctgccgagcaagtcgccgccgccaacgagagcgaggccgccacgctccgcgccgaagtcgagcgtctccagggcctcctagccgcagagaaggccagccatgaggaggagatgcgcaggggcgcaaggctcggggaccagctgcagaccgcgtaccaggagaaggccgcccttgaggaggagatcgagaccctgaagggttccgccactgccgagggcaagggcgggaaggaggaagaggagggacgtgattccgtttctgccagggccgggacgcctaaggatgagggcgtggtgtctcccgctcttgtggctgccgcggctgctggagcagctgccacggctgccatcgcggtggtcttgctcaacctcaagagatgatgtggtggtccgatgctcgggaagttttgatctgctgctatggcctatatgagaatgggttatccgttttgtcgtggtactagtgttgctggactcagtgtggtatctttactatcagctggataatatattagaggttagaacaacctatattgcaagtacttttagtttctgcagttttccatgctaataagagttgtgaacacaaacgtgagaggtaattgaggtcaggtgtgttgtttt

SEQ ID NO: 3059 - protein, 240 aa, Zea mays subsp. mays
  peptide (1)..(240): Ceres Seq. ID no. 12403891
  misc_feature (121)..(170): Homolog of NCBI NO: 14719294 NR Description: unknown [Zea mays]
  misc_feature (70)..(240): Homolog of NCBI NO: 22535574 NR Description: OJ1116_H09.21 [Oryza sativa (japonica
  misc_feature (33)..(240): Homolog of NCBI NO: 6996142 NR Description: VIP1 protein [Avena fatua]
TPFYYFFSIPISTLAPHPPPPRRRERGEGGFPMENGEETFASPTAAAAADFEISINGGDSTPKLHNLADEMEALRAAKRDLEEKLDAVGHENRFLSSESRRLEVLVSQAREEVAAAEQVAAANESEAATLRAEVERLQGLLAAEKASHEEEMRRGARLGDQLQTAYQEKAALEEEIETLKGSATAEGKGGKEEEEGRDSVSARAGTPKDEGVVSPALVAAAAAGAAATAAIAVVLLNLKR

SEQ ID NO: 3060 - protein, 208 aa, Zea mays subsp. mays
  peptide (1)..(208): Ceres Seq. ID no. 12403892
  misc_feature (89)..(138): Homolog of NCBI NO: 14719294 NR Description: unknown [Zea mays]
  misc_feature (38)..(208): Homolog of NCBI NO: 22535574 NR Description: OJ1116_H09.21 [Oryza sativa (japonica
  misc_feature (1)..(208): Homolog of NCBI NO: 6996142 NR Description: VIP1 protein [Avena fatua]
MENGEETFASPTAAAAADFEISINGGDSTPKLHNLADEMEALRAAKRDLEEKLDAVGHENRFLSSESRRLEVLVSQAREEVAAAEQVAAANESEAATLRAEVERLQGLLAAEKASHEEEMRRGARLGDQLQTAYQEKAALEEEIETLKGSATAEGKGGKEEEEGRDSVSARAGTPKDEGVVSPALVAAAAAGAAATAAIAVVLLNLKR

SEQ ID NO: 3061 - protein, 170 aa, Zea mays subsp. mays
  peptide (1)..(170): Ceres Seq. ID no. 12403893
  misc_feature (51)..(100): Homolog of NCBI NO: 14719294 NR Description: unknown [Zea mays]
  misc_feature (1)..(170): Homolog of NCBI NO: 22535574 NR Description: OJ1116_H09.21 [Oryza sativa (japonica
  misc_feature (1)..(170): Homolog of NCBI NO: 6996142 NR Description: VIP1 protein [Avena fatua]
MEALRAAKRDLEEKLDAVGHENRFLSSESRRLEVLVSQAREEVAAAEQVAAANESEAATLRAEVERLQGLLAAEKASHEEEMRRGARLGDQLQTAYQEKAALEEEIETLKGSATAEGKGGKEEEEGRDSVSARAGTPKDEGVVSPALVAAAAAGAAATAAIAVVLLNLKR

SEQ ID NO: 3062 - DNA, 803 bp, Zea mays subsp. mays
  misc_feature (1)..(803): Ceres Seq. ID no. 12423776
  misc_feature: MA Experiment ID: 20000535 Result: Down-regulated in Transcription
  misc_feature: MA Experiment 20000535 PARAMETER Experiment Name: Zm_Hybrid_Seed_Dev_P Parameter: DAP Value: 30 vs. 12
  misc_feature: MA Experiment 20000535 PARAMETER Experiment Name: Zm_Hybrid_Seed_Dev_P Parameter: Organism Value: Zea mays
  misc_feature: MA Experiment 20000535 PARAMETER Experiment Name: Zm_Hybrid_Seed_Dev_P Parameter: Plant Line Value: 35A19
  misc_feature: MA Experiment 20000535 PARAMETER Experiment Name: Zm_Hybrid_Seed_Dev_P Parameter: Tissue Value: Embryo vs. Unfert Floret
aaatcatcacaggtccaaagcgcttccgattctctcttctcccctccgcccgcctccggttgtcttctccaattccccaacgcagccagcagcgcaaggtccagaagcccaggaccagacgacggacctccgcgccccatcgatccgcgcggccctcccccaacgcgcgtgcgtccgcaactagcgtctgcngccggtnnctttcttccgcaccccccgacgcggcaaggagcccccccgccatgagggtccacccggccccgcggaagcgcaccatcnnngtgcaacgctgcgcctccgcggcggcgggcgcgctcggcgggaagaagctgcgccgcctgccgcacatattcgacaaggtgctggagctcccgttcgcggccgacgcggacgtgtccgtcgaggaggacgcggcggcgctgcggttcgtcgccgccgccgacgagttctccctcgcgggcgcccgcgcgcacgccgtcgagatccacccaggggtcaccaaggtcgtcgtccgcggcctctcctcctcctccctcggcggcgatggcgacgacgacgacgacggggccgccgccgccgccttcgagctcgaccgctggcgcttccgcctcccgccctgcacgcgccccgccatggccaccgccacctacgccgcgggcgagctcgttgtcaccgtccccaagggcgccggccccggcgacggcggcgcggccgctgtcctcggtggcacggagcgcgtccttgtgcttgtatagtatagtaaatctagcttttccctaaattatatatcatctgctttgtgc

SEQ ID NO: 3063 - protein, 250 aa, Zea mays subsp. mays
  peptide (1)..(250): Ceres Seq. ID no. 12423777
  misc_feature (81)..(250): Homolog of NCBI NO: 11994285 NR Description: emb|CAB10262.1~gene_id:F16J14.9~similar to
  misc_feature (81)..(227): Homolog of NCBI NO: 15233585 NR Description: hypothetical protein; protein id: At4g14830.1
  misc_feature (77)..(250): Homolog of NCBI NO: 21553463 NR Description: unknown [Arabidopsis thaliana]
  misc_feature (77)..(250): Homolog of NCBI NO: 18403425 NR Description: expressed protein
  misc_feature (81)..(239): Homolog of NCBI NO: 22773244 NR Description: Hypothetical protein [Oryza sativa (japonica
  misc_feature (81)..(250): Homolog of NCBI NO: 34394452 NR Description: hypothetical protein [Oryza sativa (japonica
  misc_feature (64)..(64): Xaa is any aa, unknown or other
  misc_feature (66)..(66): Xaa is any aa, unknown or other
  misc_feature (93)..(93): Xaa is any aa, unknown or other
IITGPKRFRFSLLPSARLRLSSPIPQRSQQRKVQKPRTRRRTSAPHRSARPSPNARASATSVCXRXLSSAPPDAARSPPAMRVHPAPRKRTIXVQRCASAAAGALGGKKLRRLPHIFDKVLELPFAADADVSVEEDAAALRFVAAADEFSLAGARAHAVEIHPGVTKVVVRGLSSSSLGGDGDDDDDGAAAAAFELDRWRFRLPPCTRPAMATATYAAGELVVTVPKGAGPGDGGAAAVLGGTERVLVLV

SEQ ID NO: 3064 - protein, 170 aa, Zea mays subsp. mays
  peptide (1)..(170): Ceres Seq. ID no. 12423778
  misc_feature (1)..(170): Homolog of NCBI NO: 11994285 NR Description: emb|CAB10262.1~gene_id:F16J14.9~similar to
  misc_feature (1)..(147): Homolog of NCBI NO: 15233585 NR Description: hypothetical protein; protein id: At4g14830.1
  misc_feature (1)..(170): Homolog of NCBI NO: 21553463 NR Description: unknown [Arabidopsis thaliana]
  misc_feature (1)..(170): Homolog of NCBI NO: 18403425 NR Description: expressed protein
  misc_feature (1)..(159): Homolog of NCBI NO: 22773244 NR Description: Hypothetical protein [Oryza sativa (japonica
  misc_feature (1)..(170): Homolog of NCBI NO: 34394452 NR Description: hypothetical protein [Oryza sativa (japonica
  misc_feature (13)..(13): Xaa is any aa, unknown or other
MRVHPAPRKRTIXVQRCASAAAGALGGKKLRRLPHIFDKVLELPFAADADVSVEEDAAALRFVAAADEFSLAGARAHAVEIHPGVTKVVVRGLSSSSLGGDGDDDDDGAAAAAFELDRWRFRLPPCTRPAMATATYAAGELVVTVPKGAGPGDGGAAAVLGGTERVLVLV

SEQ ID NO: 3065 - DNA, 906 bp, Zea mays subsp. mays
  misc_feature (1)..(906): Ceres Seq. ID no. 13495259
  misc_feature: MA Experiment ID: 108527 Result: Down-regulated in Transcription
  misc_feature: MA Experiment 108527 PARAMETER Experiment Name: Zm_5mM_NO_P Parameter: Age (day) Value: 8
  misc_feature: MA Experiment 108527 PARAMETER Experiment Name: Zm_5mM_NO_P Parameter: Organism Value: Zea mays
  misc_feature: MA Experiment 108527 PARAMETER Experiment Name: Zm_5mM_NO_P Parameter: Plant Line Value: 35A19
  misc_feature: MA Experiment 108527 PARAMETER Experiment Name: Zm_5mM_NO_P Parameter: Timepoint (hr) Value: 6
  misc_feature: MA Experiment 108527 PARAMETER Experiment Name: Zm_5mM_NO_P Parameter: Tissue Value: Aerial
  misc_feature: MA Experiment 108527 PARAMETER Experiment Name: Zm_5mM_NO_P Parameter: Treatment Value: 5mM NO vs. No Treatment
  misc_feature: MA Experiment ID: 108528 Result: Up-regulated in Transcription
  misc_feature: MA Experiment 108528 PARAMETER Experiment Name: Zm_Imbibed_Seeds_P Parameter: Age (day) Value: 5 vs. 2
  misc_feature: MA Experiment 108528 PARAMETER Experiment Name: Zm_Imbibed_Seeds_P Parameter: Organism Value: Zea mays
  misc_feature: MA Experiment 108528 PARAMETER Experiment Name: Zm_Imbibed_Seeds_P Parameter: Plant Line Value: 35A19
  misc_feature: MA Experiment 108528 PARAMETER Experiment Name: Zm_Imbibed_Seeds_P Parameter: Tissue Value: Aerial vs. Embryo
  misc_feature: MA Experiment ID: 108530 Result: Up-regulated in Transcription
  misc_feature: MA Experiment 108530 PARAMETER Experiment Name: Zm_Imbibed_Seeds_P Parameter: Age (day) Value: 6 vs. 2
  misc_feature: MA Experiment 108530 PARAMETER Experiment Name: Zm_Imbibed_Seeds_P Parameter: Organism Value: Zea mays
  misc_feature: MA Experiment 108530 PARAMETER Experiment Name: Zm_Imbibed_Seeds_P Parameter: Plant Line Value: 35A19
  misc_feature: MA Experiment 108530 PARAMETER Experiment Name: Zm_Imbibed_Seeds_P Parameter: Tissue Value: Aerial vs. Embryo
  misc_feature: MA Experiment ID: 108534 Result: Down-regulated in Transcription
  misc_feature: MA Experiment 108534 PARAMETER Experiment Name: Zm_4deg_Cold_P Parameter: Age (hr) Value: 8
  misc_feature: MA Experiment 108534 PARAMETER Experiment Name: Zm_4deg_Cold_P Parameter: Organism Value: Zea mays
  misc_feature: MA Experiment 108534 PARAMETER Experiment Name: Zm_4deg_Cold_P Parameter: Plant Line Value: 35A19
  misc_feature: MA Experiment 108534 PARAMETER Experiment Name: Zm_4deg_Cold_P Parameter: Temperature (deg C) Value: 4 vs. 22
  misc_feature: MA Experiment 108534 PARAMETER Experiment Name: Zm_4deg_Cold_P Parameter: Timepoint (hr) Value: 6
  misc_feature: MA Experiment 108534 PARAMETER Experiment Name: Zm_4deg_Cold_P Parameter: Tissue Value: Aerial
aaaaaagaagcagaggagaggcccaagcagagtaatggccaaggtctacccaaacagcgcagccgtcgcggcagagcccgccacccgagccgctgccggcgaccaacaacctgaaccgccgacggtgctgacggtatggcgcaagtcgctgctcttcaactgcgacggcttcaccgtgtacgacgcccggggagacctcgccttccgcgtcgactgctacgccacctcccgccggcgcgccgaggtcgcgctcatggacgccgcgggggcgccgctgctcacgctccaccgcaagaggctcagcctggcggagcgctggctcatctacgaagacggcgccggcaccacgcagccgcagccgcgtcgccctctcctctccgtccaccgccacgtcggtctccgcgcctccggcgggaagacgctggcgcatgtcttcgcgccctcctcggccgcccaggaggcgttcgtggtcgaggggtcgtacggccgtcgtgactgcgccgtgcgcgacgcgcgcggcgacgtcatggccgaggtccggcgcaaggaggccgtcggcgacgacgtgttcaggctggtggtcagtccccgcttcggcgcgccgctcgccatggggcttgtcatcgtcctcgacgagatgttcggcggccgcagctcgtggtcgtggctgcacagagcgtgctaggattggataggcagtagaggccctcccccagttgtcagcgtcagcagagtttataatgcaggctgcggctgggccaaccccctaaaaactagaacgccctatcaccaattacgaaatagtgagaacaatgcaaaagcaaaaaggcacatccaattattttggatatggatgtcagttgattattttgtaatgtcatcagtcatctactgattgttttccgc

SEQ ID NO: 3066 - protein, 227 aa, Zea mays subsp. mays
  peptide (1)..(227): Ceres Seq. ID no. 13495260
  misc_feature (35)..(208): Pfam Name: Protein of unknown function (DUF567) Pfam Description: Protein of unknown function (DUF567)
  misc_feature (12)..(223): Homolog of NCBI NO: 27542769 NR Description: hypothetical protein-like protein [Sorghum
  misc_feature (12)..(227): Homolog of NCBI NO: 27542765 NR Description: hypothetical protein-like protein [Sorghum
  misc_feature (14)..(209): Homolog of NCBI NO: 34907132 NR Description: P0506E04.17 [Oryza sativa (japonica
  misc_feature (36)..(215): Homolog of NCBI NO: 21554362 NR Description: unknown [Arabidopsis thaliana]
  misc_feature (36)..(215): Homolog of NCBI NO: 18400907 NR Description: expressed protein [Arabidopsis thaliana]
  misc_feature (43)..(215): Homolog of NCBI NO: 15220064 NR Description: expressed protein [Arabidopsis thaliana]
  misc_feature (15)..(214): Homolog of NCBI NO: 15238123 NR Description: hypothetical protein [Arabidopsis thaliana]
  misc_feature (12)..(219): Homolog of NCBI NO: 15224921 NR Description: expressed protein [Arabidopsis thaliana]
  misc_feature (12)..(221): Homolog of NCBI NO: 34909256 NR Description: B1148D12.16 [Oryza sativa (japonica
  misc_feature (14)..(226): Homolog of NCBI NO: 27542767 NR Description: hypothetical protein-like protein [Sorghum
KKKQRRGPSRVMAKVYPNSAAVAAEPATRAAAGDQQPEPPTVLTVWRKSLLFNCDGFTVYDARGDLAFRVDCYATSRRRAEVALMDAAGAPLLTLHRKRLSLAERWLIYEDGAGTTQPQPRRPLLSVHRHVGLRASGGKTLAHVFAPSSAAQEAFVVEGSYGRRDCAVRDARGDVMAEVRRKEAVGDDVFRLVVSPRFGAPLAMGLVIVLDEMFGGRSSWSWLHRAC

SEQ ID NO: 3067 - protein, 216 aa, Zea mays subsp. mays
  peptide (1)..(216): Ceres Seq. ID no. 13495261
  misc_feature (24)..(197): Pfam Name: Protein of unknown function (DUF567) Pfam Description: Protein of unknown function (DUF567)
  misc_feature (3)..(198): Homolog of NCBI NO: 34907132 NR Description: P0506E04.17 [Oryza sativa (japonica
  misc_feature (25)..(204): Homolog of NCBI NO: 21554362 NR Description: unknown [Arabidopsis thaliana]
  misc_feature (25)..(204): Homolog of NCBI NO: 18400907 NR Description: expressed protein [Arabidopsis thaliana]
  misc_feature (32)..(204): Homolog of NCBI NO: 15220064 NR Description: expressed protein [Arabidopsis thaliana]
  misc_feature (4)..(203): Homolog of NCBI NO: 15238123 NR Description: hypothetical protein [Arabidopsis thaliana]
  misc_feature (1)..(208): Homolog of NCBI NO: 15224921 NR Description: expressed protein [Arabidopsis thaliana]
  misc_feature (1)..(210): Homolog of NCBI NO: 34909256 NR Description: B1148D12.16 [Oryza sativa (japonica
  misc_feature (3)..(215): Homolog of NCBI NO: 27542767 NR Description: hypothetical protein-like protein [Sorghum
  misc_feature (1)..(212): Homolog of NCBI NO: 27542769 NR Description: hypothetical protein-like protein [Sorghum
  misc_feature (1)..(216): Homolog of NCBI NO: 27542765 NR Description: hypothetical protein-like protein [Sorghum
MAKVYPNSAAVAAEPATRAAAGDQQPEPPTVLTVWRKSLLFNCDGFTVYDARGDLAFRVDCYATSRRRAEVALMDAAGAPLLTLHRKRLSLAERWLIYEDGAGTTQPQPRRPLLSVHRHVGLRASGGKTLAHVFAPSSAAQEAFVVEGSYGRRDCAVRDARGDVMAEVRRKEAVGDDVFRLVVSPRFGAPLAMGLVIVLDEMFGGRSSWSWLHRAC

SEQ ID NO: 3068 - protein, 143 aa, Zea mays subsp. mays
  peptide (1)..(143): Ceres Seq. ID no. 13495262
  misc_feature (1)..(124): Pfam Name: Protein of unknown function (DUF567) Pfam Description: Protein of unknown function (DUF567)
  misc_feature (1)..(125): Homolog of NCBI NO: 34907132 NR Description: P0506E04.17 [Oryza sativa (japonica
  misc_feature (1)..(131): Homolog of NCBI NO: 21554362 NR Description: unknown [Arabidopsis thaliana]
  misc_feature (1)..(131): Homolog of NCBI NO: 18400907 NR Description: expressed protein [Arabidopsis thaliana]
  misc_feature (1)..(131): Homolog of NCBI NO: 15220064 NR Description: expressed protein [Arabidopsis thaliana]
  misc_feature (1)..(130): Homolog of NCBI NO: 15238123 NR Description: hypothetical protein [Arabidopsis thaliana]
  misc_feature (1)..(135): Homolog of NCBI NO: 15224921 NR Description: expressed protein [Arabidopsis thaliana]
  misc_feature (1)..(137): Homolog of NCBI NO: 34909256 NR Description: B1148D12.16 [Oryza sativa (japonica
  misc_feature (1)..(142): Homolog of NCBI NO: 27542767 NR Description: hypothetical protein-like protein [Sorghum
  misc_feature (1)..(139): Homolog of NCBI NO: 27542769 NR Description: hypothetical protein-like protein [Sorghum
  misc_feature (1)..(143): Homolog of NCBI NO: 27542765 NR Description: hypothetical protein-like protein [Sorghum
MDAAGAPLLTLHRKRLSLAERWLIYEDGAGTTQPQPRRPLLSVHRHVGLRASGGKTLAHVFAPSSAAQEAFVVEGSYGRRDCAVRDARGDVMAEVRRKEAVGDDVFRLVVSPRFGAPLAMGLVIVLDEMFGGRSSWSWLHRAC

SEQ ID NO: 3069 - DNA, 677 bp, Zea mays subsp. mays
  misc_feature (1)..(677): Ceres Seq. ID no. 12402947
  misc_feature: MA Experiment ID: 108522 Result: Up-regulated in Transcription
  misc_feature: MA Experiment 108522 PARAMETER Experiment Name: Zm_42deg_Heat_P Parameter: Age (day) Value: 8
  misc_feature: MA Experiment 108522 PARAMETER Experiment Name: Zm_42deg_Heat_P Parameter: Organism Value: Zea mays
  misc_feature: MA Experiment 108522 PARAMETER Experiment Name: Zm_42deg_Heat_P Parameter: Plant Line Value: 35A19
  misc_feature: MA Experiment 108522 PARAMETER Experiment Name: Zm_42deg_Heat_P Parameter: Temperature (deg C) Value: 42 vs. 22
  misc_feature: MA Experiment 108522 PARAMETER Experiment Name: Zm_42deg_Heat_P Parameter: Timepoint (hr) Value: 1
  misc_feature: MA Experiment 108522 PARAMETER Experiment Name: Zm_42deg_Heat_P Parameter: Tissue Value: Aerial
  misc_feature: MA Experiment ID: 108527 Result: Up-regulated in Transcription
  misc_feature: MA Experiment 108527 PARAMETER Experiment Name: Zm_5mM_NO_P Parameter: Age (day) Value: 8
  misc_feature: MA Experiment 108527 PARAMETER Experiment Name: Zm_5mM_NO_P Parameter: Organism Value: Zea mays
  misc_feature: MA Experiment 108527 PARAMETER Experiment Name: Zm_5mM_NO_P Parameter: Plant Line Value: 35A19
  misc_feature: MA Experiment 108527 PARAMETER Experiment Name: Zm_5mM_NO_P Parameter: Timepoint (hr) Value: 6
  misc_feature: MA Experiment 108527 PARAMETER Experiment Name: Zm_5mM_NO_P Parameter: Tissue Value: Aerial
  misc_feature: MA Experiment 108527 PARAMETER Experiment Name: Zm_5mM_NO_P Parameter: Treatment Value: 5mM NO vs. No Treatment
  misc_feature: MA Experiment ID: 108528 Result: Down-regulated in Transcription
  misc_feature: MA Experiment 108528 PARAMETER Experiment Name: Zm_Imbibed_Seeds_P Parameter: Age (day) Value: 5 vs. 2
  misc_feature: MA Experiment 108528 PARAMETER Experiment Name: Zm_Imbibed_Seeds_P Parameter: Organism Value: Zea mays
  misc_feature: MA Experiment 108528 PARAMETER Experiment Name: Zm_Imbibed_Seeds_P Parameter: Plant Line Value: 35A19
  misc_feature: MA Experiment 108528 PARAMETER Experiment Name: Zm_Imbibed_Seeds_P Parameter: Tissue Value: Aerial vs. Embryo
  misc_feature: MA Experiment ID: 108530 Result: Down-regulated in Transcription
  misc_feature: MA Experiment 108530 PARAMETER Experiment Name: Zm_Imbibed_Seeds_P Parameter: Age (day) Value: 6 vs. 2
  misc_feature: MA Experiment 108530 PARAMETER Experiment Name: Zm_Imbibed_Seeds_P Parameter: Organism Value: Zea mays
  misc_feature: MA Experiment 108530 PARAMETER Experiment Name: Zm_Imbibed_Seeds_P Parameter: Plant Line Value: 35A19
  misc_feature: MA Experiment 108530 PARAMETER Experiment Name: Zm_Imbibed_Seeds_P Parameter: Tissue Value: Aerial vs. Embryo
  misc_feature: MA Experiment ID: 20000477 Result: Up-regulated in Transcription
  misc_feature: MA Experiment 20000477 PARAMETER Experiment Name: Zm_5mM_SA_P Parameter: Age (day) Value: 10
  misc_feature: MA Experiment 20000477 PARAMETER Experiment Name: Zm_5mM_SA_P Parameter: Organism Value: Zea mays
  misc_feature: MA Experiment 20000477 PARAMETER Experiment Name: Zm_5mM_SA_P Parameter: Plant Line Value: 35A19
  misc_feature: MA Experiment 20000477 PARAMETER Experiment Name: Zm_5mM_SA_P Parameter: Timepoint (hr) Value: 48
  misc_feature: MA Experiment 20000477 PARAMETER Experiment Name: Zm_5mM_SA_P Parameter: Tissue Value: Aerial
  misc_feature: MA Experiment 20000477 PARAMETER Experiment Name: Zm_5mM_SA_P Parameter: Treatment Value: 5mM SA vs. No Treatment
  misc_feature: MA Experiment ID: 20000478 Result: Up-regulated in Transcription
  misc_feature: MA Experiment 20000478 PARAMETER Experiment Name: Zm_5mM_SA_P Parameter: Age (day) Value: 11
  misc_feature: MA Experiment 20000478 PARAMETER Experiment Name: Zm_5mM_SA_P Parameter: Organism Value: Zea mays
  misc_feature: MA Experiment 20000478 PARAMETER Experiment Name: Zm_5mM_SA_P Parameter: Plant Line Value: 35A19
  misc_feature: MA Experiment 20000478 PARAMETER Experiment Name: Zm_5mM_SA_P Parameter: Timepoint (hr) Value: 72
  misc_feature: MA Experiment 20000478 PARAMETER Experiment Name: Zm_5mM_SA_P Parameter: Tissue Value: Aerial
  misc_feature: MA Experiment 20000478 PARAMETER Experiment Name: Zm_5mM_SA_P Parameter: Treatment Value: 5mM SA vs. No Treatment
gaaatttggcagtcgatcggatttgtggctcgcggagctggaccagccgccgcgggttttaaaaggagggaccgcaaccaaccacctcgccatcgacctcctcgatccagacagcaggcagcagccatgtccaaggtcttcaccctcgacgcggtcgccaagcacaactccaaggaggattgctggctcatcatcggcggcaaggtgtatgatgtgacgaagtttttggtagaccacccaggaggtgatgatgttctgttgtcctcaactggcaaggatgcgactgatgatttcgaggatgtcggtcacagcaacactgcccgcgcgatgatggatgagtacttggtgggtgaaatcgacgcgtcgacgatcccttccaggacgaagtatgtccccccgaaacaaccgcactacaaccaggacaagactcccgagtttgtcatcaagatcctccagtttttggttcccctggcaatcctgggcttggctgttgccgttaggatgtacaccaagtcggagtctgcttagctttgttgcccacttgcccttgcccccctcgcgattgtacgagtcgaacttgtcgaataagctagcaagagttttgtgaggttttattacatgtgtaacttgtcacgaaattcatcgaatgttctgagctgctgtgggttctgtggtct

SEQ ID NO: 3070 - protein, 175 aa, Zea mays subsp. mays
  peptide (1)..(175): Ceres Seq. ID no. 12402948
  misc_feature (46)..(120): Pfam Name: Cytochrome b5-like Heme/Steroid binding domain Pfam Description: Cytochrome b5-like Heme/Steroid binding domain
  misc_feature (44)..(174): Homolog of NCBI NO: 1345879 NR Description: Cytochrome b5
  misc_feature (44)..(174): Homolog of NCBI NO: 1345925 NR Description: Cytochrome b5, seed isoform
  misc_feature (43)..(174): Homolog of NCBI NO: 12229735 NR Description: Cytochrome b5
  misc_feature (44)..(172): Homolog of NCBI NO: 15225731 NR Description: putative cytochrome b5; protein id: At2g32720.1
  misc_feature (43)..(174): Homolog of NCBI NO: 2647949 NR Description: cytochrome b5 [Olea europaea]
  misc_feature (44)..(175): Homolog of NCBI NO: 1345882 NR Description: CYTOCHROME B5
  misc_feature (44)..(175): Homolog of NCBI NO: 1076621 NR Description: cytochrome b5 - common tobacco
  misc_feature (44)..(175): Homolog of NCBI NO: 34905998 NR Description: putative cytochrome B5 [Oryza sativa (japonica
  misc_feature (45)..(175): Homolog of NCBI NO: 1345881 NR Description: Cytochrome b5
  misc_feature (45)..(175): Homolog of NCBI NO: 14719320 NR Description: cytochrome B5 [Oryza sativa]
EIWQSIGFVARGAGPAAAGFKRRDRNQPPRHRPPRSRQQAAAMSKVFTLDAVAKHNSKEDCWLIIGGKVYDVTKFLVDHPGGDDVLLSSTGKDATDDFEDVGHSNTARAMMDEYLVGEIDASTIPSRTKYVPPKQPHYNQDKTPEFVIKILQFLVPLAILGLAVAVRMYTKSESA

SEQ ID NO: 3071 - protein, 133 aa, Zea mays subsp. mays
  peptide (1)..(133): Ceres Seq. ID no. 12402949
  misc_feature (4)..(78): Pfam Name: Cytochrome b5-like Heme/Steroid binding domain Pfam Description: Cytochrome b5-like Heme/Steroid binding domain
  misc_feature (2)..(132): Homolog of NCBI NO: 1345879 NR Description: Cytochrome b5
  misc_feature (2)..(132): Homolog of NCBI NO: 1345925 NR Description: Cytochrome b5, seed isoform
  misc_feature (1)..(132): Homolog of NCBI NO: 12229735 NR Description: Cytochrome b5
  misc_feature (2)..(130): Homolog of NCBI NO: 15225731 NR Description: putative cytochrome b5; protein id: At2g32720.1
  misc_feature (1)..(132): Homolog of NCBI NO: 2647949 NR Description: cytochrome b5 [Olea europaea]
  misc_feature (2)..(133): Homolog of NCBI NO: 1345882 NR Description: CYTOCHROME B5
  misc_feature (2)..(133): Homolog of NCBI NO: 1076621 NR Description: cytochrome b5 - common tobacco
  misc_feature (2)..(133): Homolog of NCBI NO: 34905998 NR Description: putative cytochrome B5 [Oryza sativa (japonica
  misc_feature (3)..(133): Homolog of NCBI NO: 1345881 NR Description: Cytochrome b5
  misc_feature (3)..(133): Homolog of NCBI NO: 14719320 NR Description: cytochrome B5 [Oryza sativa]
MSKVFTLDAVAKHNSKEDCWLIIGGKVYDVTKFLVDHPGGDDVLLSSTGKDATDDFEDVGHSNTARAMMDEYLVGEIDASTIPSRTKYVPPKQPHYNQDKTPEFVIKILQFLVPLAILGLAVAVRMYTKSESA

SEQ ID NO: 3072 - protein, 90 aa, Zea mays subsp. mays
  peptide (1)..(90): Ceres Seq. ID no. 12402950
MSTWWVKSTRRRSLPGRSMSPRNNRTTTRTRLPSLSSRSSSFWFPWQSWAWLLPLGCTPSRSLLSFVAHLPLPPSRLYESNLSNKLARVL

SEQ ID NO: 3073 - DNA, 1690 bp, Zea mays subsp. mays
  misc_feature (1)..(1690): Ceres Seq. ID no. 12365309
  misc_feature: MA Experiment ID: 108535 Result: Down-regulated in Transcription
  misc_feature: MA Experiment 108535 PARAMETER Experiment Name: Zm_Meristem_P Parameter: Age (day) Value: 8
  misc_feature: MA Experiment 108535 PARAMETER Experiment Name: Zm_Meristem_P Parameter: Organism Value: Zea mays
  misc_feature: MA Experiment 108535 PARAMETER Experiment Name: Zm_Meristem_P Parameter: Plant Line Value: 35A19
  misc_feature: MA Experiment 108535 PARAMETER Experiment Name: Zm_Meristem_P Parameter: Tissue Value: Root Meristem vs. Above Root Meristem
  misc_feature: MA Experiment ID: 108556 Result: Up-regulated in Transcription
  misc_feature: MA Experiment 108556 PARAMETER Experiment Name: Zm_Drought_P Parameter: Age (day) Value: 9
  misc_feature: MA Experiment 108556 PARAMETER Experiment Name: Zm_Drought_P Parameter: Organism Value: Zea mays
  misc_feature: MA Experiment 108556 PARAMETER Experiment Name: Zm_Drought_P Parameter: Plant Line Value: 35A19
  misc_feature: MA Experiment 108556 PARAMETER Experiment Name: Zm_Drought_P Parameter: Timepoint (hr) Value: 24
  misc_feature: MA Experiment 108556 PARAMETER Experiment Name: Zm_Drought_P Parameter: Tissue Value: Aerial
  misc_feature: MA Experiment 108556 PARAMETER Experiment Name: Zm_Drought_P Parameter: Treatment Value: Drought vs. No Drought
  misc_feature: MA Experiment ID: 20000534 Result: Down-regulated in Transcription
  misc_feature: MA Experiment 20000534 PARAMETER Experiment Name: Zm_Hybrid_Pollen_P Parameter: Age (day) Value: 8
  misc_feature: MA Experiment 20000534 PARAMETER Experiment Name: Zm_Hybrid_Pollen_P Parameter: Organism Value: Zea mays
  misc_feature: MA Experiment 20000534 PARAMETER Experiment Name: Zm_Hybrid_Pollen_P Parameter: Plant Line Value: 35A19
  misc_feature: MA Experiment 20000534 PARAMETER Experiment Name: Zm_Hybrid_Pollen_P Parameter: Tissue Value: Pollen vs. Aerial
  misc_feature: MA Experiment ID: 20000535 Result: Down-regulated in Transcription
  misc_feature: MA Experiment 20000535 PARAMETER Experiment Name: Zm_Hybrid_Seed_Dev_P Parameter: DAP Value: 30 vs. 12
  misc_feature: MA Experiment 20000535 PARAMETER Experiment Name: Zm_Hybrid_Seed_Dev_P Parameter: Organism Value: Zea mays
  misc_feature: MA Experiment 20000535 PARAMETER Experiment Name: Zm_Hybrid_Seed_Dev_P Parameter: Plant Line Value: 35A19
  misc_feature: MA Experiment 20000535 PARAMETER Experiment Name: Zm_Hybrid_Seed_Dev_P Parameter: Tissue Value: Embryo vs. Unfert Floret
  misc_feature: MA Experiment ID: 20000626 Result: Up-regulated in Transcription
  misc_feature: MA Experiment 20000626 PARAMETER Experiment Name: Zm_Herbicide-Treatments_P Parameter: Timepoint (hr) Value: 12
  misc_feature: MA Experiment 20000626 PARAMETER Experiment Name: Zm_Herbicide-Treatments_P Parameter: Tissue Value: Aerial
  misc_feature: MA Experiment 20000626 PARAMETER Experiment Name: Zm_Herbicide-Treatments_P Parameter: Treatment Value: Roundup vs. No Treatment
  misc_feature: MA Experiment ID: 20000629 Result: Up-regulated in Transcription
  misc_feature: MA Experiment 20000629 PARAMETER Experiment Name: Zm_Herbicide-Treatments_P Parameter: Timepoint (hr) Value: 12
  misc_feature: MA Experiment 20000629 PARAMETER Experiment Name: Zm_Herbicide-Treatments_P Parameter: Tissue Value: Aerial
  misc_feature: MA Experiment 20000629 PARAMETER Experiment Name: Zm_Herbicide-Treatments_P Parameter: Treatment Value: Trimec vs. No Treatment
  misc_feature: MA Experiment ID: 20001608 Result: Down-regulated in Transcription
  misc_feature: MA Experiment 20001608 PARAMETER Experiment Name: Zm_50ppm_KNO3_L-to-H_P Parameter: Age (day) Value: 21
  misc_feature: MA Experiment 20001608 PARAMETER Experiment Name: Zm_50ppm_KNO3_L-to-H_P Parameter: Organism Value: Zea mays
  misc_feature: MA Experiment 20001608 PARAMETER Experiment Name: Zm_50ppm_KNO3_L-to-H_P Parameter: Plant Line Value: 35A19
  misc_feature: MA Experiment 20001608 PARAMETER Experiment Name: Zm_50ppm_KNO3_L-to-H_P Parameter: Timepoint (hr) Value: 48
  misc_feature: MA Experiment 20001608 PARAMETER Experiment Name: Zm_50ppm_KNO3_L-to-H_P Parameter: Tissue Value: Shoots
  misc_feature: MA Experiment 20001608 PARAMETER Experiment Name: Zm_50ppm_KNO3_L-to-H_P Parameter: Treatment Value: 50ppm KNO3 vs. 50ppm KCl
aaaaaacctcgcctccccccactccttccctccctccctcgctcacccagtggggcagccaaagccgagccgcaaccgcaaagatcttgcgcggcctcctttccccagctcgtcactgtgccgctcgtgccatccaccctcggttcacccaaccaacaatccatccgccaccacaccccgctgcggcgatgtgcggcggcgccatcctctcgggtttcatcccgccgtccggggtgccggcggcggcagcggcggccaagaagaaacagcagcggcgtgcgacggcggacctgctgtggccggggcccggcaagaagggagcgccccgggaggaggacttcgaggccgacttccgcgagttcgagcgcggcctcggagaggatgacgacgtggacggggccggcgacgaggtccaggagcttcctctgccggagccggcgaggctcgccttcgccgccgcggttggggcgccgcgcactgcagttgacggcgtgatgactccaaaggatggtgaaggagacatgcctactaccgctaccaactcagcagcaaataagcgcaggcggaagaaccagtacaggggaatccggcggcggccctggggcaagtgggcggccgagatcagagaccccagcaagggcgtgcgcgtctggctcggcacatacagcaccgccgaggaggcggccagggcgtacgacgccgaggctcgcaggatacgcgggaagaaagccaaggtcaatttccgggacgaagcggcggcagcagcaggtgctcagaaggcaccagccgcaactactccaactgcttgtggcaacgcagcgaggctaggtcctccacctccaccgccgaagttccgtgctgacgaggttttcgggaacatgaacggtggcactggcagcaacgatctgttcgcgattatgttcgcgttcagtgacagtagtagtaaggtcgttcgtgtggagccaggtgagggcgccgccggtttcctccccgcagatctgttgcccggcagtaagaggtctgcggctaacatgctgctgctctccgaccagagcagcgactcgtatggctcttgtgacttggggtgggagtgggactgggacgatgacaccatgacctcagactacgcctcagtctttgctccagctgctcccagtaacgttgtgccagcatggtacacgcaaggtggaccggtgtcgaagagaacgaggagcagctacggctacggtgcggccatgccgggcggctttgaccctgagacgaactaccagtaccagccgttgccttatgtcgtcgagagcagcccgtcagacggcgcgtcgacggacgacatggactgccttcaaatgatgcgggctggtgatgttccacaggatggggcgagcagtggtggtggtggcggcgacggcggcgatatctggagccttgacgagctgctcatggccgctggcgcttactgagaaaagctatgtgcatcgcattcgcatgtgctagacggctacttgctgtgccgtgaatggagtgtttctcagcttcgttttgcttttaattttttgttatgccaggtctcctgcttgtgcttgtggtgatgatgcaggagagccatggtgggtactatgcttttgctgccagtggaactgtaagacaatgtttatatagtatctatactatgttggtgcgtcgatggttc

SEQ ID NO: 3074 - protein, 485 aa, Zea mays subsp. mays
  peptide (1)..(485): Ceres Seq. ID no. 12365310
  misc_feature (189)..(252): Pfam Name: AP2 domain Pfam Description: AP2 domain
  misc_feature (271)..(485): Homolog of NCBI NO: 19880313 NR Description: putative EREBP-type transcription factor [Oryza
  misc_feature (63)..(306): Homolog of NCBI NO: 19880313 NR Description: putative EREBP-type transcription factor [Oryza
KTSPPPTPSLPPSLTQWGSQSRAATAKILRGLLSPARHCAARAIHPRFTQPTIHPPPHPAAAMCGGAILSGFIPPSGVPAAAAAAKKKQQRRATADLLWPGPGKKGAPREEDFEADFREFERGLGEDDDVDGAGDEVQELPLPEPARLAFAAAVGAPRTAVDGVMTPKDGEGDMPTTATNSAANKRRRKNQYRGIRRRPWGKWAAEIRDPSKGVRVWLGTYSTAEEAARAYDAEARRIRGKKAKVNFRDEAAAAAGAQKAPAATTPTACGNAARLGPPPPPPKFRADEVFGNMNGGTGSNDLFAIMFAFSDSSSKVVRVEPGEGAAGFLPADLLPGSKRSAANMLLLSDQSSDSYGSCDLGWEWDWDDDTMTSDYASVFAPAAPSNVVPAWYTQGGPVSKRTRSSYGYGAAMPGGFDPETNYQYQPLPYVVESSPSDGASTDDMDCLQMMRAGDVPQDGASSGGGGGDGGDIWSLDELLMAAGAY

SEQ ID NO: 3075 - protein, 423 aa, Zea mays subsp. mays
  peptide (1)..(423): Ceres Seq. ID no. 12365311
  misc_feature (127)..(190): Pfam Name: AP2 domain Pfam Description: AP2 domain
  misc_feature (209)..(423): Homolog of NCBI NO: 19880313 NR Description: putative EREBP-type transcription factor [Oryza
  misc_feature (1)..(244): Homolog of NCBI NO: 19880313 NR Description: putative EREBP-type transcription factor [Oryza
MCGGAILSGFIPPSGVPAAAAAAKKKQQRRATADLLWPGPGKKGAPREEDFEADFREFERGLGEDDDVDGAGDEVQELPLPEPARLAFAAAVGAPRTAVDGVMTPKDGEGDMPTTATNSAANKRRRKNQYRGIRRRPWGKWAAEIRDPSKGVRVWLGTYSTAEEAARAYDAEARRIRGKKAKVNFRDEAAAAAGAQKAPAATTPTACGNAARLGPPPPPPKFRADEVFGNMNGGTGSNDLFAIMFAFSDSSSKVVRVEPGEGAAGFLPADLLPGSKRSAANMLLLSDQSSDSYGSCDLGWEWDWDDDTMTSDYASVFAPAAPSNVVPAWYTQGGPVSKRTRSSYGYGAAMPGGFDPETNYQYQPLPYVVESSPSDGASTDDMDCLQMMRAGDVPQDGASSGGGGGDGGDIWSLDELLMAAGAY

SEQ ID NO: 3076 - protein, 321 aa, Zea mays subsp. mays
  peptide (1)..(321): Ceres Seq. ID no. 12365312
  misc_feature (25)..(88): Pfam Name: AP2 domain Pfam Description: AP2 domain
  misc_feature (107)..(321): Homolog of NCBI NO: 19880313 NR Description: putative EREBP-type transcription factor [Oryza
  misc_feature (1)..(142): Homolog of NCBI NO: 19880313 NR Description: putative EREBP-type transcription factor [Oryza
MTPKDGEGDMPTTATNSAANKRRRKNQYRGIRRRPWGKWAAEIRDPSKGVRVWLGTYSTAEEAARAYDAEARRIRGKKAKVNFRDEAAAAAGAQKAPAATTPTACGNAARLGPPPPPPKFRADEVFGNMNGGTGSNDLFAIMFAFSDSSSKVVRVEPGEGAAGFLPADLLPGSKRSAANMLLLSDQSSDSYGSCDLGWEWDWDDDTMTSDYASVFAPAAPSNVVPAWYTQGGPVSKRTRSSYGYGAAMPGGFDPETNYQYQPLPYVVESSPSDGASTDDMDCLQMMRAGDVPQDGASSGGGGGDGGDIWSLDELLMAAGAY

SEQ ID NO: 3077 - DNA, 1414 bp, Zea mays subsp. mays
  misc_feature (1)..(1414): Ceres Seq. ID no. 13493147
  misc_feature: MA Experiment ID: 108535 Result: Down-regulated in Transcription
  misc_feature: MA Experiment 108535 PARAMETER Experiment Name: Zm_Meristem_P Parameter: Age (day) Value: 8
  misc_feature: MA Experiment 108535 PARAMETER Experiment Name: Zm_Meristem_P Parameter: Organism Value: Zea mays
  misc_feature: MA Experiment 108535 PARAMETER Experiment Name: Zm_Meristem_P Parameter: Plant Line Value: 35A19
  misc_feature: MA Experiment 108535 PARAMETER Experiment Name: Zm_Meristem_P Parameter: Tissue Value: Root Meristem vs. Above Root Meristem
  misc_feature: MA Experiment ID: 108543 Result: Up-regulated in Transcription
  misc_feature: MA Experiment ID: 108559 Result: Down-regulated in Transcription
  misc_feature: MA Experiment 108559 PARAMETER Experiment Name: Zm_5mM_NO_P Parameter: Age (day) Value: 8
  misc_feature: MA Experiment 108559 PARAMETER Experiment Name: Zm_5mM_NO_P Parameter: Organism Value: Zea mays
  misc_feature: MA Experiment 108559 PARAMETER Experiment Name: Zm_5mM_NO_P Parameter: Plant Line Value: 35A19
  misc_feature: MA Experiment 108559 PARAMETER Experiment Name: Zm_5mM_NO_P Parameter: Timepoint (hr) Value: 12
  misc_feature: MA Experiment 108559 PARAMETER Experiment Name: Zm_5mM_NO_P Parameter: Tissue Value: Aerial
  misc_feature: MA Experiment 108559 PARAMETER Experiment Name: Zm_5mM_NO_P Parameter: Treatment Value: 5mM NO vs. No Treatment
  misc_feature: MA Experiment ID: 20000492 Result: Down-regulated in Transcription
  misc_feature: MA Experiment 20000492 PARAMETER Experiment Name: Zm_Hybrid_Seed_Dev_P Parameter: DAP Value: 12
  misc_feature: MA Experiment 20000492 PARAMETER Experiment Name: Zm_Hybrid_Seed_Dev_P Parameter: Organism Value: Zea mays
  misc_feature: MA Experiment 20000492 PARAMETER Experiment Name: Zm_Hybrid_Seed_Dev_P Parameter: Plant Line Value: 35A19
  misc_feature: MA Experiment 20000492 PARAMETER Experiment Name: Zm_Hybrid_Seed_Dev_P Parameter: Tissue Value: Fert Kernel vs. Unfert Floret
  misc_feature: MA Experiment ID: 20000535 Result: Down-regulated in Transcription
  misc_feature: MA Experiment 20000535 PARAMETER Experiment Name: Zm_Hybrid_Seed_Dev_P Parameter: DAP Value: 30 vs. 12
  misc_feature: MA Experiment 20000535 PARAMETER Experiment Name: Zm_Hybrid_Seed_Dev_P Parameter: Organism Value: Zea mays
  misc_feature: MA Experiment 20000535 PARAMETER Experiment Name: Zm_Hybrid_Seed_Dev_P Parameter: Plant Line Value: 35A19
  misc_feature: MA Experiment 20000535 PARAMETER Experiment Name: Zm_Hybrid_Seed_Dev_P Parameter: Tissue Value: Embryo vs. Unfert Floret
aagccaggcacggaggaggcgcgtgctctgctctgctctgcgtctgctccactccacctcccccccccccccctgcgccactcacgccgctcgttcgcgcagttttggtcttctggccagcagggcagggggggaacccgcgggagcgaggcgcgcgagcgagcgagcggagggaggaggaggatgatgcacaccaagtcggagtcggacgtgacgagcctggcagcgtcgtcgccgccgcggtcgccgaagnngggcgttgcnncnnccggcaccggcggcggcggcgggtactacgtgcagagcccgtcgcgggagtcgcacgacggcggcggcggcggcgggtacaagtcgtcgtcgatgcaggccacgccggtgtacaacaacagccccagcgagtcgccgtcgcacccctcctacggccgccactcccgctcctcctccgtcagccgcttctccggcggcctccgcggggccgncgncggcgggcgcaaggtgctcaacnacaagggctggcccgagtgcagcgtcatcgagnaggaagggccctacgagggcctcggcgccggggacagcggcctctcccgccgctgccagatcgtgctcggcttcctcaccttcgtcctcctcttcaccgtcttctgcctcgtcatctggggcgccgcccgcccgtacgagcccgaggtcgtcgtcaagagcttggtgatggacgacttctacgctggtgaaggcacagaccacagcggcgttccgaccaaattggtcacgacgaactgttcgctgcacgtatcggtgtacaaccctgccacaatgtttgggatccatgtcacctccggccccatccgtctgatctattcagagatctcaatagcagtcggtcaggtccgcaggtactaccagccgaggaagagccaacggacggtgacggcggtgatccacggcgagaaggtgccgctgtacggcgccgggggcggcctgacgctgtccacgagcgcgggcgggggcgcggtgcccctgacgctggacttcgacctcacctcccggggctacgtgatcggcaggctcgtgcgggtgacgcacagggcgcacgtgacgtgccccgtcgtcgtggacgccaggaggaccaagcctgtcaggttctccaagaaggcgtgcgccgtgtacaaggcctgagcttgagagctcgtgaaacctgtgatcgacggagcgttagcgatgcgtgttcttgaaaagatgtagctattgtgttgatggtgaagaacaataagcgcacacgtatggtcttgtcgatatatcgcgctgtaaggcctgttgttcttgtgtgtgtgtgtccctttttcagagcatgatcgtagagacggaagatgacttaccatgacaattttcctatacctttataacttcaatttttttt

SEQ ID NO: 3078 - protein, 390 aa, Zea mays subsp. mays
  peptide (1)..(390): Ceres Seq. ID no. 13493148
  misc_feature (98)..(347): Homolog of NCBI NO: 15230135 NR Description: hypothetical protein [Arabidopsis thaliana]
  misc_feature (135)..(385): Homolog of NCBI NO: 15230135 NR Description: hypothetical protein [Arabidopsis thaliana]
  misc_feature (98)..(385): Homolog of NCBI NO: 9294055 NR Description: gene_id:MOB24.18~unknown protein [Arabidopsis
  misc_feature (98)..(385): Homolog of NCBI NO: 9294056 NR Description: emb|CAB53482.1~gene_id:MOB24.19~similar to
  misc_feature (63)..(326): Homolog of NCBI NO: 18401556 NR Description: expressed protein [Arabidopsis thaliana]
  misc_feature (63)..(388): Homolog of NCBI NO: 38345517 NR Description: OSJNBa0039K24.20 [Oryza sativa (japonica
  misc_feature (59)..(388): Homolog of NCBI NO: 5777621 NR Description: CAA30379.1 protein [Oryza sativa]
  misc_feature (71)..(386): Homolog of NCBI NO: 34904260 NR Description: P0452F10.18 [Oryza sativa (japonica
  misc_feature (292)..(389): Homolog of NCBI NO: 34898370 NR Description: ESTD24835(R2634) corresponds to a region of the gene.~Similar to Arabidopsis thaliana chromosome II BAC T06D20
  misc_feature (53)..(232): Homolog of NCBI NO: 34898370 NR Description: ESTD24835(R2634) corresponds to a region of the gene.~Similar to Arabidopsis thaliana chromosome II BAC T06D20
  misc_feature (85)..(85): Xaa is any aa, unknown or other
  misc_feature (88)..(88): Xaa is any aa, unknown or other
  misc_feature (89)..(89): Xaa is any aa, unknown or other
  misc_feature (90)..(90): Xaa is any aa, unknown or other
  misc_feature (160)..(160): Xaa is any aa, unknown or other
  misc_feature (161)..(161): Xaa is any aa, unknown or other
  misc_feature (169)..(169): Xaa is any aa, unknown or other
  misc_feature (180)..(180): Xaa is any aa, unknown or other
KPGTEEARALLCSASAPLHLPPPPLRHSRRSFAQFWSSGQQGRGGTRGSEARERASGGRRRMMHTKSESDVTSLAASSPPRSPKXGVXXXGTGGGGGYYVQSPSRESHDGGGGGGYKSSSMQATPVYNNSPSESPSHPSYGRHSRSSSVSRFSGGLRGAXXGGRKVLNXKGWPECSVIEXEGPYEGLGAGDSGLSRRCQIVLGFLTFVLLFTVFCLVIWGAARPYEPEVVVKSLVMDDFYAGEGTDHSGVPTKLVTTNCSLHVSVYNPATMFGIHVTSGPIRLIYSEISIAVGQVRRYYQPRKSQRTVTAVIHGEKVPLYGAGGGLTLSTSAGGGAVPLTLDFDLTSRGYVIGRLVRVTHRAHVTCPVVVDARRTKPVRFSKKACAVYKA

SEQ ID NO: 3079 - protein, 329 aa, Zea mays subsp. mays
  peptide (1)..(329): Ceres Seq. ID no. 13493149
  misc_feature (37)..(286): Homolog of NCBI NO: 15230135 NR Description: hypothetical protein [Arabidopsis thaliana]
  misc_feature (74)..(324): Homolog of NCBI NO: 15230135 NR Description: hypothetical protein [Arabidopsis thaliana]
  misc_feature (37)..(324): Homolog of NCBI NO: 9294055 NR Description: gene_id:MOB24.18~unknown protein [Arabidopsis
  misc_feature (37)..(324): Homolog of NCBI NO: 9294056 NR Description: emb|CAB53482.1~gene_id:MOB24.19~similar to
  misc_feature (2)..(265): Homolog of NCBI NO: 18401556 NR Description: expressed protein [Arabidopsis thaliana]
  misc_feature (2)..(327): Homolog of NCBI NO: 38345517 NR Description: OSJNBa0039K24.20 [Oryza sativa (japonica
  misc_feature (1)..(327): Homolog of NCBI NO: 5777621 NR Description: CAA30379.1 protein [Oryza sativa]
  misc_feature (10)..(325): Homolog of NCBI NO: 34904260 NR Description: P0452F10.18 [Oryza sativa (japonica
  misc_feature (231)..(328): Homolog of NCBI NO: 34898370 NR Description: ESTD24835(R2634) corresponds to a region of the gene.~Similar to Arabidopsis thaliana chromosome II BAC T06D20
  misc_feature (1)..(171): Homolog of NCBI NO: 34898370 NR Description: ESTD24835(R2634) corresponds to a region of the gene.~Similar to Arabidopsis thaliana chromosome II BAC T06D20
  misc_feature (24)..(24): Xaa is any aa, unknown or other
  misc_feature (27)..(27): Xaa is any aa, unknown or other
  misc_feature (28)..(28): Xaa is any aa, unknown or other
  misc_feature (29)..(29): Xaa is any aa, unknown or other
  misc_feature (99)..(99): Xaa is any aa, unknown or other
  misc_feature (100)..(100): Xaa is any aa, unknown or other
  misc_feature (108)..(108): Xaa is any aa, unknown or other
  misc_feature (119)..(119): Xaa is any aa, unknown or other
MMHTKSESDVTSLAASSPPRSPKXGVXXXGTGGGGGYYVQSPSRESHDGGGGGGYKSSSMQATPVYNNSPSESPSHPSYGRHSRSSSVSRFSGGLRGAXXGGRKVLNXKGWPECSVIEXEGPYEGLGAGDSGLSRRCQIVLGFLTFVLLFTVFCLVIWGAARPYEPEVVVKSLVMDDFYAGEGTDHSGVPTKLVTTNCSLHVSVYNPATMFGIHVTSGPIRLIYSEISIAVGQVRRYYQPRKSQRTVTAVIHGEKVPLYGAGGGLTLSTSAGGGAVPLTLDFDLTSRGYVIGRLVRVTHRAHVTCPVVVDARRTKPVRFSKKACAVYKA

SEQ ID NO: 3080 - protein, 328 aa, Zea mays subsp. mays
  peptide (1)..(328): Ceres Seq. ID no. 13493150
  misc_feature (36)..(285): Homolog of NCBI NO: 15230135 NR Description: hypothetical protein [Arabidopsis thaliana]
  misc_feature (73)..(323): Homolog of NCBI NO: 15230135 NR Description: hypothetical protein [Arabidopsis thaliana]
  misc_feature (36)..(323): Homolog of NCBI NO: 9294055 NR Description: gene_id:MOB24.18~unknown protein [Arabidopsis
  misc_feature (36)..(323): Homolog of NCBI NO: 9294056 NR Description: emb|CAB53482.1~gene_id:MOB24.19~similar to
  misc_feature (1)..(264): Homolog of NCBI NO: 18401556 NR Description: expressed protein [Arabidopsis thaliana]
  misc_feature (1)..(326): Homolog of NCBI NO: 38345517 NR Description: OSJNBa0039K24.20 [Oryza sativa (japonica
  misc_feature (1)..(326): Homolog of NCBI NO: 5777621 NR Description: CAA30379.1 protein [Oryza sativa]
  misc_feature (9)..(324): Homolog of NCBI NO: 34904260 NR Description: P0452F10.18 [Oryza sativa (japonica
  misc_feature (230)..(327): Homolog of NCBI NO: 34898370 NR Description: ESTD24835(R2634) corresponds to a region of the gene.~Similar to Arabidopsis thaliana chromosome II BAC T06D20
  misc_feature (1)..(170): Homolog of NCBI NO: 34898370 NR Description: ESTD24835(R2634) corresponds to a region of the gene.~Similar to Arabidopsis thaliana chromosome II BAC T06D20
  misc_feature (23)..(23): Xaa is any aa, unknown or other
  misc_feature (26)..(26): Xaa is any aa, unknown or other
  misc_feature (27)..(27): Xaa is any aa, unknown or other
  misc_feature (28)..(28): Xaa is any aa, unknown or other
  misc_feature (98)..(98): Xaa is any aa, unknown or other
  misc_feature (99)..(99): Xaa is any aa, unknown or other
  misc_feature (107)..(107): Xaa is any aa, unknown or other
  misc_feature (118)..(118): Xaa is any aa, unknown or other
MHTKSESDVTSLAASSPPRSPKXGVXXXGTGGGGGYYVQSPSRESHDGGGGGGYKSSSMQATPVYNNSPSESPSHPSYGRHSRSSSVSRFSGGLRGAXXGGRKVLNXKGWPECSVIEXEGPYEGLGAGDSGLSRRCQIVLGFLTFVLLFTVFCLVIWGAARPYEPEVVVKSLVMDDFYAGEGTDHSGVPTKLVTTNCSLHVSVYNPATMFGIHVTSGPIRLIYSEISIAVGQVRRYYQPRKSQRTVTAVIHGEKVPLYGAGGGLTLSTSAGGGAVPLTLDFDLTSRGYVIGRLVRVTHRAHVTCPVVVDARRTKPVRFSKKACAVYKA

SEQ ID NO: 3081 - DNA, 938 bp, Zea mays subsp. mays
  misc_feature (1)..(938): Ceres Seq. ID no. 12366741
  misc_feature: MA Experiment ID: 108504 Result: Down-regulated in Transcription
  misc_feature: MA Experiment 108504 PARAMETER Experiment Name: Zm_Drought_P Parameter: Age (day) Value: 8
  misc_feature: MA Experiment 108504 PARAMETER Experiment Name: Zm_Drought_P Parameter: Organism Value: Zea mays
  misc_feature: MA Experiment 108504 PARAMETER Experiment Name: Zm_Drought_P Parameter: Plant Line Value: 35A19
  misc_feature: MA Experiment 108504 PARAMETER Experiment Name: Zm_Drought_P Parameter: Timepoint (hr) Value: 12
  misc_feature: MA Experiment 108504 PARAMETER Experiment Name: Zm_Drought_P Parameter: Tissue Value: Aerial
  misc_feature: MA Experiment 108504 PARAMETER Experiment Name: Zm_Drought_P Parameter: Treatment Value: Drought vs. No Drought
  misc_feature: MA Experiment ID: 108529 Result: Down-regulated in Transcription
  misc_feature: MA Experiment 108529 PARAMETER Experiment Name: Zm_Imbibed_Seeds_P Parameter: Age (day) Value: 5 vs. 2
  misc_feature: MA Experiment 108529 PARAMETER Experiment Name: Zm_Imbibed_Seeds_P Parameter: Organism Value: Zea mays
  misc_feature: MA Experiment 108529 PARAMETER Experiment Name: Zm_Imbibed_Seeds_P Parameter: Plant Line Value: 35A19
  misc_feature: MA Experiment 108529 PARAMETER Experiment Name: Zm_Imbibed_Seeds_P Parameter: Tissue Value: Roots vs. Embryo
  misc_feature: MA Experiment ID: 108535 Result: Up-regulated in Transcription
  misc_feature: MA Experiment 108535 PARAMETER Experiment Name: Zm_Meristem_P Parameter: Age (day) Value: 8
  misc_feature: MA Experiment 108535 PARAMETER Experiment Name: Zm_Meristem_P Parameter: Organism Value: Zea mays
  misc_feature: MA Experiment 108535 PARAMETER Experiment Name: Zm_Meristem_P Parameter: Plant Line Value: 35A19
  misc_feature: MA Experiment 108535 PARAMETER Experiment Name: Zm_Meristem_P Parameter: Tissue Value: Root Meristem vs. Above Root Meristem
  misc_feature: MA Experiment ID: 108536 Result: Down-regulated in Transcription
  misc_feature: MA Experiment 108536 PARAMETER Experiment Name: Zm_Meristem_P Parameter: Age (day) Value: 8
  misc_feature: MA Experiment 108536 PARAMETER Experiment Name: Zm_Meristem_P Parameter: Organism Value: Zea mays
  misc_feature: MA Experiment 108536 PARAMETER Experiment Name: Zm_Meristem_P Parameter: Plant Line Value: 35A19
  misc_feature: MA Experiment 108536 PARAMETER Experiment Name: Zm_Meristem_P Parameter: Tissue Value: Shoot Meristem vs. Above Shoot Meristem
  misc_feature: MA Experiment ID: 108556 Result: Down-regulated in Transcription
  misc_feature: MA Experiment 108556 PARAMETER Experiment Name: Zm_Drought_P Parameter: Age (day) Value: 9
  misc_feature: MA Experiment 108556 PARAMETER Experiment Name: Zm_Drought_P Parameter: Organism Value: Zea mays
  misc_feature: MA Experiment 108556 PARAMETER Experiment Name: Zm_Drought_P Parameter: Plant Line Value: 35A19
  misc_feature: MA Experiment 108556 PARAMETER Experiment Name: Zm_Drought_P Parameter: Timepoint (hr) Value: 24
  misc_feature: MA Experiment 108556 PARAMETER Experiment Name: Zm_Drought_P Parameter: Tissue Value: Aerial
  misc_feature: MA Experiment 108556 PARAMETER Experiment Name: Zm_Drought_P Parameter: Treatment Value: Drought vs. No Drought
  misc_feature: MA Experiment ID: 108687 Result: Down-regulated in Transcription
  misc_feature: MA Experiment 108687 PARAMETER Experiment Name: Zm_Embryos-Flowers__P Parameter: Tissue Value: Embryo vs. Aerial+
  misc_feature: MA Experiment ID: 108689 Result: Down-regulated in Transcription
  misc_feature: MA Experiment 108689 PARAMETER Experiment Name: Zm_Drought_Roots_P Parameter: Age (day) Value: 9
  misc_feature: MA Experiment 108689 PARAMETER Experiment Name: Zm_Drought_Roots_P Parameter: Organism Value: Zea mays
  misc_feature: MA Experiment 108689 PARAMETER Experiment Name: Zm_Drought_Roots_P Parameter: Plant Line Value: 35A19
  misc_feature: MA Experiment 108689 PARAMETER Experiment Name: Zm_Drought_Roots_P Parameter: Timepoint (hr) Value: 24
  misc_feature: MA Experiment 108689 PARAMETER Experiment Name: Zm_Drought_Roots_P Parameter: Tissue Value: Roots
  misc_feature: MA Experiment 108689 PARAMETER Experiment Name: Zm_Drought_Roots_P Parameter: Treatment Value: Drought vs. No Drought
  misc_feature: MA Experiment ID: 20000477 Result: Down-regulated in Transcription
  misc_feature: MA Experiment 20000477 PARAMETER Experiment Name: Zm_5mM_SA_P Parameter: Age (day) Value: 10
  misc_feature: MA Experiment 20000477 PARAMETER Experiment Name: Zm_5mM_SA_P Parameter: Organism Value: Zea mays
  misc_feature: MA Experiment 20000477 PARAMETER Experiment Name: Zm_5mM_SA_P Parameter: Plant Line Value: 35A19
  misc_feature: MA Experiment 20000477 PARAMETER Experiment Name: Zm_5mM_SA_P Parameter: Timepoint (hr) Value: 48
  misc_feature: MA Experiment 20000477 PARAMETER Experiment Name: Zm_5mM_SA_P Parameter: Tissue Value: Aerial
  misc_feature: MA Experiment 20000477 PARAMETER Experiment Name: Zm_5mM_SA_P Parameter: Treatment Value: 5mM SA vs. No Treatment
  misc_feature: MA Experiment ID: 20000478 Result: Down-regulated in Transcription
  misc_feature: MA Experiment 20000478 PARAMETER Experiment Name: Zm_5mM_SA_P Parameter: Age (day) Value: 11
  misc_feature: MA Experiment 20000478 PARAMETER Experiment Name: Zm_5mM_SA_P Parameter: Organism Value: Zea mays
  misc_feature: MA Experiment 20000478 PARAMETER Experiment Name: Zm_5mM_SA_P Parameter: Plant Line Value: 35A19
  misc_feature: MA Experiment 20000478 PARAMETER Experiment Name: Zm_5mM_SA_P Parameter: Timepoint (hr) Value: 72
  misc_feature: MA Experiment 20000478 PARAMETER Experiment Name: Zm_5mM_SA_P Parameter: Tissue Value: Aerial
  misc_feature: MA Experiment 20000478 PARAMETER Experiment Name: Zm_5mM_SA_P Parameter: Treatment Value: 5mM SA vs. No Treatment
  misc_feature: MA Experiment ID: 20000479 Result: Down-regulated in Transcription
  misc_feature: MA Experiment 20000479 PARAMETER Experiment Name: Zm_Drought_P Parameter: Age (day) Value: 10
  misc_feature: MA Experiment 20000479 PARAMETER Experiment Name: Zm_Drought_P Parameter: Organism Value: Zea mays
  misc_feature: MA Experiment 20000479 PARAMETER Experiment Name: Zm_Drought_P Parameter: Plant Line Value: 35A19
  misc_feature: MA Experiment 20000479 PARAMETER Experiment Name: Zm_Drought_P Parameter: Timepoint (hr) Value: 48
  misc_feature: MA Experiment 20000479 PARAMETER Experiment Name: Zm_Drought_P Parameter: Tissue Value: Aerial
  misc_feature: MA Experiment 20000479 PARAMETER Experiment Name: Zm_Drought_P Parameter: Treatment Value: Drought vs. No Drought
  misc_feature: MA Experiment ID: 20000480 Result: Down-regulated in Transcription
  misc_feature: MA Experiment 20000480 PARAMETER Experiment Name: Zm_Drought_P Parameter: Age (day) Value: 11
  misc_feature: MA Experiment 20000480 PARAMETER Experiment Name: Zm_Drought_P Parameter: Organism Value: Zea mays
  misc_feature: MA Experiment 20000480 PARAMETER Experiment Name: Zm_Drought_P Parameter: Plant Line Value: 35A19
  misc_feature: MA Experiment 20000480 PARAMETER Experiment Name: Zm_Drought_P Parameter: Timepoint (hr) Value: 72
  misc_feature: MA Experiment 20000480 PARAMETER Experiment Name: Zm_Drought_P Parameter: Tissue Value: Aerial
  misc_feature: MA Experiment 20000480 PARAMETER Experiment Name: Zm_Drought_P Parameter: Treatment Value: Drought vs. No Drought
  misc_feature: MA Experiment ID: 20000534 Result: Down-regulated in Transcription
  misc_feature: MA Experiment 20000534 PARAMETER Experiment Name: Zm_Hybrid_Pollen_P Parameter: Age (day) Value: 8
  misc_feature: MA Experiment 20000534 PARAMETER Experiment Name: Zm_Hybrid_Pollen_P Parameter: Organism Value: Zea mays
  misc_feature: MA Experiment 20000534 PARAMETER Experiment Name: Zm_Hybrid_Pollen_P Parameter: Plant Line Value: 35A19
  misc_feature: MA Experiment 20000534 PARAMETER Experiment Name: Zm_Hybrid_Pollen_P Parameter: Tissue Value: Pollen vs. Aerial
  misc_feature: MA Experiment ID: 20000626 Result: Down-regulated in Transcription
  misc_feature: MA Experiment 20000626 PARAMETER Experiment Name: Zm_Herbicide-Treatments_P Parameter: Timepoint (hr) Value: 12
  misc_feature: MA Experiment 20000626 PARAMETER Experiment Name: Zm_Herbicide-Treatments_P Parameter: Tissue Value: Aerial
  misc_feature: MA Experiment 20000626 PARAMETER Experiment Name: Zm_Herbicide-Treatments_P Parameter: Treatment Value: Roundup vs. No Treatment
attcacgcatcacaagctggaaggcactgtgggcaataatggctctgctcacgctccagcagccagcgatacccttcctcctgctcctcctcctgctccccgccgcgtccgctaggctgcccggtggccggacactggtcttcatcctggctgggcagtccaacatgagcggccgcggcggcgccaccaacggcacctgggacggcatcgtcccgccggagtgcgcgccctcggaccgcatcgtccgtctctcccccgccttcgctgggagcaggcgcgcgagccgctgcacgccggcgtcgacgtgggcaacgttctcggcgtcgggcccggcatgcccttcgcgcacgccgtgctcaccagcgagggcgcagccgcagagccccccgtcgtcgtcgggctcgtgccgtgcgcacagggcggcacgccgatcgccaactggtcccgggggacggagctgtacgagcggatggtgacgcgcgccagggcggccgtggccgagtgcagcggacgcggtcacctggccgccttgctttggtaccagggggaggcggacaccatgaggcgccaggatgctgagctctaccagcggcggatggagactctcgtgcgtgacgttcgctgcgacctcggccggcccgacctcctcgtcatccaggtgggcattgcaactgcgcagtacaatggcaagttcctcggcgtggtgagggaagctcagaaggcagtgaagctcccaaatgtcaagtacgttgatgccatggggctgcccatcgcgagcgaccacacgcatctcaccacggaggctcaagtccagctcggcaacaaactagccgagtcgtatttagaaacgctgtaattttcaaataccggtatgcctaccaaaaacaaggcattcccccacgatttggaaacggacagagcaagcaatatgtacactc

SEQ ID NO: 3082 - protein, 173 aa, Zea mays subsp. mays
  peptide (1)..(173): Ceres Seq. ID no. 12366742
  misc_feature (1)..(109): Homolog of NCBI NO: 30693749 NR Description: expressed protein [Arabidopsis thaliana]
  misc_feature (1)..(171): Homolog of NCBI NO: 38345580 NR Description: OSJNBa0027H06.16 [Oryza sativa (japonica
  misc_feature (1)..(170): Homolog of NCBI NO: 38347110 NR Description: OSJNBa0009K15.7 [Oryza sativa (japonica
  misc_feature (1)..(170): Homolog of NCBI NO: 18418402 NR Description: Expressed protein
  misc_feature (1)..(170): Homolog of NCBI NO: 21594009 NR Description: unknown [Arabidopsis thaliana]
  misc_feature (1)..(170): Homolog of NCBI NO: 30102980 NR Description: unknown protein [Oryza sativa (japonica
  misc_feature (1)..(173): Homolog of NCBI NO: 30102977 NR Description: hypothetical protein [Oryza sativa (japonica
  misc_feature (1)..(167): Homolog of NCBI NO: 29349588 NR Description: acetyl xylan esterase A [Bacteroides
  misc_feature (1)..(109): Homolog of NCBI NO: 11357879 NR Description: hypothetical protein F8J2.180 - Arabidopsis
  misc_feature (1)..(116): Homolog of NCBI NO: 7488258 NR Description: protein kinase homolog F28A23.20 - Arabidopsis
MPFAHAVLTSEGAAAEPPVVVGLVPCAQGGTPIANWSRGTELYERMVTRARAAVAECSGRGHLAALLWYQGEADTMRRQDAELYQRRMETLVRDVRCDLGRPDLLVIQVGIATAQYNGKFLGVVREAQKAVKLPNVKYVDAMGLPIASDHTHLTTEAQVQLGNKLAESYLETL

SEQ ID NO: 3083 - protein, 157 aa, Zea mays subsp. mays
  peptide (1)..(157): Ceres Seq. ID no. 12366743
  misc_feature (55)..(84): Homolog of NCBI NO: 11357879 NR Description: hypothetical protein F8J2.180 - Arabidopsis
  misc_feature (33)..(84): Homolog of NCBI NO: 7488258 NR Description: protein kinase homolog F28A23.20 - Arabidopsis
  misc_feature (25)..(84): Homolog of NCBI NO: 30693749 NR Description: expressed protein [Arabidopsis thaliana]
  misc_feature (46)..(86): Homolog of NCBI NO: 38347110 NR Description: OSJNBa0009K15.7 [Oryza sativa (japonica
  misc_feature (33)..(84): Homolog of NCBI NO: 18418402 NR Description: Expressed protein
  misc_feature (33)..(84): Homolog of NCBI NO: 21594009 NR Description: unknown [Arabidopsis thaliana]
  misc_feature (26)..(85): Homolog of NCBI NO: 30102980 NR Description: unknown protein [Oryza sativa (japonica
  misc_feature (27)..(85): Homolog of NCBI NO: 30102977 NR Description: hypothetical protein [Oryza sativa (japonica
SRITSWKALWAIMALLTLQQPAIPFLLLLLLLPAASARLPGGRTLVFILAGQSNMSGRGGATNGTWDGIVPPECAPSDRIVRLSPAFAGSRRASRCTPASTWATFSASGPACPSRTPCSPARAQPQSPPSSSGSCRAHRAARRSPTGPGGRSCTSGW

SEQ ID NO: 3084 - protein, 145 aa, Zea mays subsp. mays
  peptide (1)..(145): Ceres Seq. ID no. 12366744
  misc_feature (43)..(72): Homolog of NCBI NO: 11357879 NR Description: hypothetical protein F8J2.180 - Arabidopsis
  misc_feature (21)..(72): Homolog of NCBI NO: 7488258 NR Description: protein kinase homolog F28A23.20 - Arabidopsis
  misc_feature (13)..(72): Homolog of NCBI NO: 30693749 NR Description: expressed protein [Arabidopsis thaliana]
  misc_feature (34)..(74): Homolog of NCBI NO: 38347110 NR Description: OSJNBa0009K15.7 [Oryza sativa (japonica
  misc_feature (21)..(72): Homolog of NCBI NO: 18418402 NR Description: Expressed protein
  misc_feature (21)..(72): Homolog of NCBI NO: 21594009 NR Description: unknown [Arabidopsis thaliana]
  misc_feature (14)..(73): Homolog of NCBI NO: 30102980 NR Description: unknown protein [Oryza sativa (japonica
  misc_feature (15)..(73): Homolog of NCBI NO: 30102977 NR Description: hypothetical protein [Oryza sativa (japonica
MALLTLQQPAIPFLLLLLLLPAASARLPGGRTLVFILAGQSNMSGRGGATNGTWDGIVPPECAPSDRIVRLSPAFAGSRRASRCTPASTWATFSASGPACPSRTPCSPARAQPQSPPSSSGSCRAHRAARRSPTGPGGRSCTSGW

SEQ ID NO: 3085 - DNA, 1174 bp, Zea mays subsp. mays
  misc_feature (1)..(1174): Ceres Seq. ID no. 12365255
  misc_feature: MA Experiment ID: 108504 Result: Down-regulated in Transcription
  misc_feature: MA Experiment 108504 PARAMETER Experiment Name: Zm_Drought_P Parameter: Age (day) Value: 8
  misc_feature: MA Experiment 108504 PARAMETER Experiment Name: Zm_Drought_P Parameter: Organism Value: Zea mays
  misc_feature: MA Experiment 108504 PARAMETER Experiment Name: Zm_Drought_P Parameter: Plant Line Value: 35A19
  misc_feature: MA Experiment 108504 PARAMETER Experiment Name: Zm_Drought_P Parameter: Timepoint (hr) Value: 12
  misc_feature: MA Experiment 108504 PARAMETER Experiment Name: Zm_Drought_P Parameter: Tissue Value: Aerial
  misc_feature: MA Experiment 108504 PARAMETER Experiment Name: Zm_Drought_P Parameter: Treatment Value: Drought vs. No Drought
  misc_feature: MA Experiment ID: 108522 Result: Up-regulated in Transcription
  misc_feature: MA Experiment 108522 PARAMETER Experiment Name: Zm_42deg_Heat_P Parameter: Age (day) Value: 8
  misc_feature: MA Experiment 108522 PARAMETER Experiment Name: Zm_42deg_Heat_P Parameter: Organism Value: Zea mays
  misc_feature: MA Experiment 108522 PARAMETER Experiment Name: Zm_42deg_Heat_P Parameter: Plant Line Value: 35A19
  misc_feature: MA Experiment 108522 PARAMETER Experiment Name: Zm_42deg_Heat_P Parameter: Temperature (deg C) Value: 42 vs. 22
  misc_feature: MA Experiment 108522 PARAMETER Experiment Name: Zm_42deg_Heat_P Parameter: Timepoint (hr) Value: 1
  misc_feature: MA Experiment 108522 PARAMETER Experiment Name: Zm_42deg_Heat_P Parameter: Tissue Value: Aerial
  misc_feature: MA Experiment ID: 108535 Result: Up-regulated in Transcription
  misc_feature: MA Experiment 108535 PARAMETER Experiment Name: Zm_Meristem_P Parameter: Age (day) Value: 8
  misc_feature: MA Experiment 108535 PARAMETER Experiment Name: Zm_Meristem_P Parameter: Organism Value: Zea mays
  misc_feature: MA Experiment 108535 PARAMETER Experiment Name: Zm_Meristem_P Parameter: Plant Line Value: 35A19
  misc_feature: MA Experiment 108535 PARAMETER Experiment Name: Zm_Meristem_P Parameter: Tissue Value: Root Meristem vs. Above Root Meristem
  misc_feature: MA Experiment ID: 108544 Result: Down-regulated in Transcription
  misc_feature: MA Experiment ID: 108546 Result: Down-regulated in Transcription
  misc_feature: MA Experiment 108546 PARAMETER Experiment Name: Zm_Imbibed_Seeds_P Parameter: Age (day) Value: 3 vs. 2
  misc_feature: MA Experiment 108546 PARAMETER Experiment Name: Zm_Imbibed_Seeds_P Parameter: Organism Value: Zea mays
  misc_feature: MA Experiment 108546 PARAMETER Experiment Name: Zm_Imbibed_Seeds_P Parameter: Plant Line Value: 35A19
  misc_feature: MA Experiment 108546 PARAMETER Experiment Name: Zm_Imbibed_Seeds_P Parameter: Tissue Value: Roots vs. Embryo
  misc_feature: MA Experiment ID: 108556 Result: Down-regulated in Transcription
  misc_feature: MA Experiment 108556 PARAMETER Experiment Name: Zm_Drought_P Parameter: Age (day) Value: 9
  misc_feature: MA Experiment 108556 PARAMETER Experiment Name: Zm_Drought_P Parameter: Organism Value: Zea mays
  misc_feature: MA Experiment 108556 PARAMETER Experiment Name: Zm_Drought_P Parameter: Plant Line Value: 35A19
  misc_feature: MA Experiment 108556 PARAMETER Experiment Name: Zm_Drought_P Parameter: Timepoint (hr) Value: 24
  misc_feature: MA Experiment 108556 PARAMETER Experiment Name: Zm_Drought_P Parameter: Tissue Value: Aerial
  misc_feature: MA Experiment 108556 PARAMETER Experiment Name: Zm_Drought_P Parameter: Treatment Value: Drought vs. No Drought
  misc_feature: MA Experiment ID: 108597 Result: Down-regulated in Transcription
  misc_feature: MA Experiment 108597 PARAMETER Experiment Name: Zm_100uM_ABA_P Parameter: Age (day) Value: 9
  misc_feature: MA Experiment 108597 PARAMETER Experiment Name: Zm_100uM_ABA_P Parameter: Organism Value: Zea mays
  misc_feature: MA Experiment 108597 PARAMETER Experiment Name: Zm_100uM_ABA_P Parameter: Plant Line Value: 35A19
  misc_feature: MA Experiment 108597 PARAMETER Experiment Name: Zm_100uM_ABA_P Parameter: Timepoint (hr) Value: 24
  misc_feature: MA Experiment 108597 PARAMETER Experiment Name: Zm_100uM_ABA_P Parameter: Tissue Value: Aerial
  misc_feature: MA Experiment 108597 PARAMETER Experiment Name: Zm_100uM_ABA_P Parameter: Treatment Value: 100uM ABA vs. No Treatment
  misc_feature: MA Experiment ID: 20000477 Result: Down-regulated in Transcription
  misc_feature: MA Experiment 20000477 PARAMETER Experiment Name: Zm_5mM_SA_P Parameter: Age (day) Value: 10
  misc_feature: MA Experiment 20000477 PARAMETER Experiment Name: Zm_5mM_SA_P Parameter: Organism Value: Zea mays
  misc_feature: MA Experiment 20000477 PARAMETER Experiment Name: Zm_5mM_SA_P Parameter: Plant Line Value: 35A19
  misc_feature: MA Experiment 20000477 PARAMETER Experiment Name: Zm_5mM_SA_P Parameter: Timepoint (hr) Value: 48
  misc_feature: MA Experiment 20000477 PARAMETER Experiment Name: Zm_5mM_SA_P Parameter: Tissue Value: Aerial
  misc_feature: MA Experiment 20000477 PARAMETER Experiment Name: Zm_5mM_SA_P Parameter: Treatment Value: 5mM SA vs. No Treatment
  misc_feature: MA Experiment ID: 20000478 Result: Down-regulated in Transcription
  misc_feature: MA Experiment 20000478 PARAMETER Experiment Name: Zm_5mM_SA_P Parameter: Age (day) Value: 11
  misc_feature: MA Experiment 20000478 PARAMETER Experiment Name: Zm_5mM_SA_P Parameter: Organism Value: Zea mays
  misc_feature: MA Experiment 20000478 PARAMETER Experiment Name: Zm_5mM_SA_P Parameter: Plant Line Value: 35A19
  misc_feature: MA Experiment 20000478 PARAMETER Experiment Name: Zm_5mM_SA_P Parameter: Timepoint (hr) Value: 72
  misc_feature: MA Experiment 20000478 PARAMETER Experiment Name: Zm_5mM_SA_P Parameter: Tissue Value: Aerial
  misc_feature: MA Experiment 20000478 PARAMETER Experiment Name: Zm_5mM_SA_P Parameter: Treatment Value: 5mM SA vs. No Treatment
  misc_feature: MA Experiment ID: 20000479 Result: Down-regulated in Transcription
  misc_feature: MA Experiment 20000479 PARAMETER Experiment Name: Zm_Drought_P Parameter: Age (day) Value: 10
  misc_feature: MA Experiment 20000479 PARAMETER Experiment Name: Zm_Drought_P Parameter: Organism Value: Zea mays
  misc_feature: MA Experiment 20000479 PARAMETER Experiment Name: Zm_Drought_P Parameter: Plant Line Value: 35A19
  misc_feature: MA Experiment 20000479 PARAMETER Experiment Name: Zm_Drought_P Parameter: Timepoint (hr) Value: 48
  misc_feature: MA Experiment 20000479 PARAMETER Experiment Name: Zm_Drought_P Parameter: Tissue Value: Aerial
  misc_feature: MA Experiment 20000479 PARAMETER Experiment Name: Zm_Drought_P Parameter: Treatment Value: Drought vs. No Drought
  misc_feature: MA Experiment ID: 20000480 Result: Down-regulated in Transcription
  misc_feature: MA Experiment 20000480 PARAMETER Experiment Name: Zm_Drought_P Parameter: Age (day) Value: 11
  misc_feature: MA Experiment 20000480 PARAMETER Experiment Name: Zm_Drought_P Parameter: Organism Value: Zea mays
  misc_feature: MA Experiment 20000480 PARAMETER Experiment Name: Zm_Drought_P Parameter: Plant Line Value: 35A19
  misc_feature: MA Experiment 20000480 PARAMETER Experiment Name: Zm_Drought_P Parameter: Timepoint (hr) Value: 72
  misc_feature: MA Experiment 20000480 PARAMETER Experiment Name: Zm_Drought_P Parameter: Tissue Value: Aerial
  misc_feature: MA Experiment 20000480 PARAMETER Experiment Name: Zm_Drought_P Parameter: Treatment Value: Drought vs. No Drought
  misc_feature: MA Experiment ID: 20000632 Result: Down-regulated in Transcription
  misc_feature: MA Experiment 20000632 PARAMETER Experiment Name: Zm_Herbicide-Treatments_P Parameter: Timepoint (hr) Value: 4
  misc_feature: MA Experiment 20000632 PARAMETER Experiment Name: Zm_Herbicide-Treatments_P Parameter: Tissue Value: Aerial
  misc_feature: MA Experiment 20000632 PARAMETER Experiment Name: Zm_Herbicide-Treatments_P Parameter: Treatment Value: Glean vs. No Treatment
  misc_feature: MA Experiment ID: 20000633 Result: Down-regulated in Transcription
  misc_feature: MA Experiment 20000633 PARAMETER Experiment Name: Zm_Herbicide-Treatments_P Parameter: Timepoint (hr) Value: 4
  misc_feature: MA Experiment 20000633 PARAMETER Experiment Name: Zm_Herbicide-Treatments_P Parameter: Tissue Value: Aerial
  misc_feature: MA Experiment 20000633 PARAMETER Experiment Name: Zm_Herbicide-Treatments_P Parameter: Treatment Value: Trimec vs. No Treatment
atagcaaatccgcgaccccgagcaagaagccaggaaccagctcaaagttattcgtccaagaaccccaccccacccccacaacacatagaaatttcgtcttggagagccaccaatggcttgttccactgcatctttagcggcgatgctgctggcgttcgcgctgatgttccaggcctgcgtcgcggggaggaggaggctcaccgcgctcgtgcaggagccggccatcaccatgaagtaccacaagggcgcgctcctgtcgggccccatcgccgtcaacttcatctggtacggcgacttcacggcgccacagcgggcggtgatcaccgacttcgtctcgtcgctgtccgcggccccgcgggcggcggcgcagtcgcagccggagccgtccgtgtccacgtggttcaagacggcgcgcaagtactacgacacctccaaggcgcgtttcccggcgctgcgcctcggctcccacgccgtcgaccggaactgctccctcggcaggcggctcacggagcgggacctcctcaggctcgccgccaggggggcaccgagccgcgccatcaacctggtgctcacggccgccgacgtggccgtggacgggttctgcgcgtcccgttgcggcacgcacggcgcgtccccgcggtcccgcgccggccggttcgcgtacgtgtgggtgggcaacccggcgtcgcagtgccccggacagtgcgcgtggccgttccaccagcccgtctacggcccgcaggcgccgccgctcacgccccccaacgccgacgtcggggtcgacggcatggtgatctcgctggcgtccatgatcgtcggcaccgtcaccaacccgttcggcaacggggttctaccaggagggctcggccgacgcgccgctcgaggccgccacggcgtgcgccggcgtgtacggcaagggcgcgtaccccggctacgcgggggcgctgctggtggacccggccagcggcgccagcttcaatgccaacggggcccacgggagaaagtacctggtcccggcgctcgtggatccggacacgtcgtcgtgtgccaccttggggtagatttcgcggatcgtaaattagtgtttgcgatgtggcggtggtggtgctgtggagtgtgttccacgcggctaaaagtttgtgctaaagtagtactgaccaggttgcattattcc

SEQ ID NO: 3086 - protein, 358 aa, Zea mays subsp. mays
  peptide (1)..(358): Ceres Seq. ID no. 12365256
  misc_feature (115)..(172): Pfam Name: Phosphate-induced protein 1 conserved region Pfam Description: Phosphate-induced protein 1 conserved region
  misc_feature (4)..(313): Homolog of NCBI NO: 23335597 NR Description: hypothetical protein [Bifidobacterium longum
  misc_feature (46)..(172): Homolog of NCBI NO: 13194680 NR Description: phosphate-induced protein 1-like protein
IANPRPRARSQEPAQSYSSKNPTPPPQHIEISSWRATNGLFHCIFSGDAAGVRADVPGLRRGEEEAHRARAGAGHHHEVPQGRAPVGPHRRQLHLVRRLHGATAGGDHRLRLVAVRGPAGGGAVAAGAVRVHVVQDGAQVLRHLQGAFPGAAPRLPRRRPELLPRQAAHGAGPPQARRQGGTEPRHQPGAHGRRRGRGRVLRVPLRHARRVPAVPRRPVRVRVGGQPGVAVPRTVRVAVPPARLRPAGAAAHAPQRRRRGRRHGDLAGVHDRRHRHQPVRQRGSTRRARPTRRSRPPRRAPACTARARTPATRGRCWWTRPAAPASMPTGPTGESTWSRRSWIRTRRRVPPWGRFRGS

SEQ ID NO: 3087 - protein, 354 aa, Zea mays subsp. mays
  peptide (1)..(354): Ceres Seq. ID no. 12365257
  misc_feature (108)..(250): Pfam Name: Phosphate-induced protein 1 conserved region Pfam Description: Phosphate-induced protein 1 conserved region
  misc_feature (8)..(208): Homolog of NCBI NO: 37533672 NR Description: putative phosphate-induced protein
  misc_feature (13)..(248): Homolog of NCBI NO: 11762144 NR Description: At1g35140 [Arabidopsis thaliana]
  misc_feature (48)..(253): Homolog of NCBI NO: 15242420 NR Description: putative protein
  misc_feature (31)..(249): Homolog of NCBI NO: 15237656 NR Description: phi-1-like protein
  misc_feature (5)..(249): Homolog of NCBI NO: 31074969 NR Description: erg-1 [Solanum tuberosum]
  misc_feature (13)..(249): Homolog of NCBI NO: 15219504 NR Description: phosphate-induced (phi-1) protein, putative
  misc_feature (8)..(249): Homolog of NCBI NO: 15236667 NR Description: putative phi-1-like phosphate-induced protein
  misc_feature (7)..(249): Homolog of NCBI NO: 21593043 NR Description: putative phi-1-like phosphate-induced protein
  misc_feature (108)..(250): Homolog of NCBI NO: 13194680 NR Description: phosphate-induced protein 1-like protein
  misc_feature (22)..(249): Homolog of NCBI NO: 3759184 NR Description: phi-1 [Nicotiana tabacum]
MACSTASLAAMLLAFALMFQACVAGRRRLTALVQEPAITMKYHKGALLSGPIAVNFIWYGDFTAPQRAVITDFVSSLSAAPRAAAQSQPEPSVSTWFKTARKYYDTSKARFPALRLGSHAVDRNCSLGRRLTERDLLRLAARGAPSRAINLVLTAADVAVDGFCASRCGTHGASPRSRAGRFAYVWVGNPASQCPGQCAWPFHQPVYGPQAPPLTPPNADVGVDGMVISLASMIVGTVTNPFGNGVLPGGLGRRAARGRHGVRRRVRQGRVPRLRGGAAGGPGQRRQLQCQRGPREKVPGPGARGSGHVVVCHLGVDFADRKLVFAMWRWWCCGVCSTRLKVCAKVVLTRLHYS

SEQ ID NO: 3088 - protein, 344 aa, Zea mays subsp. mays
  peptide (1)..(344): Ceres Seq. ID no. 12365258
  misc_feature (98)..(240): Pfam Name: Phosphate-induced protein 1 conserved region Pfam Description: Phosphate-induced protein 1 conserved region
  misc_feature (1)..(198): Homolog of NCBI NO: 37533672 NR Description: putative phosphate-induced protein
  misc_feature (3)..(238): Homolog of NCBI NO: 11762144 NR Description: At1g35140 [Arabidopsis thaliana]
  misc_feature (38)..(243): Homolog of NCBI NO: 15242420 NR Description: putative protein
  misc_feature (21)..(239): Homolog of NCBI NO: 15237656 NR Description: phi-1-like protein
  misc_feature (1)..(239): Homolog of NCBI NO: 31074969 NR Description: erg-1 [Solanum tuberosum]
  misc_feature (3)..(239): Homolog of NCBI NO: 15219504 NR Description: phosphate-induced (phi-1) protein, putative
  misc_feature (1)..(239): Homolog of NCBI NO: 15236667 NR Description: putative phi-1-like phosphate-induced protein
  misc_feature (1)..(239): Homolog of NCBI NO: 21593043 NR Description: putative phi-1-like phosphate-induced protein
  misc_feature (98)..(240): Homolog of NCBI NO: 13194680 NR Description: phosphate-induced protein 1-like protein
  misc_feature (12)..(239): Homolog of NCBI NO: 3759184 NR Description: phi-1 [Nicotiana tabacum]
MLLAFALMFQACVAGRRRLTALVQEPAITMKYHKGALLSGPIAVNFIWYGDFTAPQRAVITDFVSSLSAAPRAAAQSQPEPSVSTWFKTARKYYDTSKARFPALRLGSHAVDRNCSLGRRLTERDLLRLAARGAPSRAINLVLTAADVAVDGFCASRCGTHGASPRSRAGRFAYVWVGNPASQCPGQCAWPFHQPVYGPQAPPLTPPNADVGVDGMVISLASMIVGTVTNPFGNGVLPGGLGRRAARGRHGVRRRVRQGRVPRLRGGAAGGPGQRRQLQCQRGPREKVPGPGARGSGHVVVCHLGVDFADRKLVFAMWRWWCCGVCSTRLKVCAKVVLTRLHYS

SEQ ID NO: 3089 - DNA, 1660 bp, Zea mays subsp. mays
  misc_feature (1)..(1660): Ceres Seq. ID no. 12362157
  misc_feature: MA Experiment ID: 108535 Result: Up-regulated in Transcription
  misc_feature: MA Experiment 108535 PARAMETER Experiment Name: Zm_Meristem_P Parameter: Age (day) Value: 8
  misc_feature: MA Experiment 108535 PARAMETER Experiment Name: Zm_Meristem_P Parameter: Organism Value: Zea mays
  misc_feature: MA Experiment 108535 PARAMETER Experiment Name: Zm_Meristem_P Parameter: Plant Line Value: 35A19
  misc_feature: MA Experiment 108535 PARAMETER Experiment Name: Zm_Meristem_P Parameter: Tissue Value: Root Meristem vs. Above Root Meristem
  misc_feature: MA Experiment ID: 108556 Result: Down-regulated in Transcription
  misc_feature: MA Experiment 108556 PARAMETER Experiment Name: Zm_Drought_P Parameter: Age (day) Value: 9
  misc_feature: MA Experiment 108556 PARAMETER Experiment Name: Zm_Drought_P Parameter: Organism Value: Zea mays
  misc_feature: MA Experiment 108556 PARAMETER Experiment Name: Zm_Drought_P Parameter: Plant Line Value: 35A19
  misc_feature: MA Experiment 108556 PARAMETER Experiment Name: Zm_Drought_P Parameter: Timepoint (hr) Value: 24
  misc_feature: MA Experiment 108556 PARAMETER Experiment Name: Zm_Drought_P Parameter: Tissue Value: Aerial
  misc_feature: MA Experiment 108556 PARAMETER Experiment Name: Zm_Drought_P Parameter: Treatment Value: Drought vs. No Drought
  misc_feature: MA Experiment ID: 20000477 Result: Down-regulated in Transcription
  misc_feature: MA Experiment 20000477 PARAMETER Experiment Name: Zm_5mM_SA_P Parameter: Age (day) Value: 10
  misc_feature: MA Experiment 20000477 PARAMETER Experiment Name: Zm_5mM_SA_P Parameter: Organism Value: Zea mays
  misc_feature: MA Experiment 20000477 PARAMETER Experiment Name: Zm_5mM_SA_P Parameter: Plant Line Value: 35A19
  misc_feature: MA Experiment 20000477 PARAMETER Experiment Name: Zm_5mM_SA_P Parameter: Timepoint (hr) Value: 48
  misc_feature: MA Experiment 20000477 PARAMETER Experiment Name: Zm_5mM_SA_P Parameter: Tissue Value: Aerial
  misc_feature: MA Experiment 20000477 PARAMETER Experiment Name: Zm_5mM_SA_P Parameter: Treatment Value: 5mM SA vs. No Treatment
  misc_feature: MA Experiment ID: 20000478 Result: Down-regulated in Transcription
  misc_feature: MA Experiment 20000478 PARAMETER Experiment Name: Zm_5mM_SA_P Parameter: Age (day) Value: 11
  misc_feature: MA Experiment 20000478 PARAMETER Experiment Name: Zm_5mM_SA_P Parameter: Organism Value: Zea mays
  misc_feature: MA Experiment 20000478 PARAMETER Experiment Name: Zm_5mM_SA_P Parameter: Plant Line Value: 35A19
  misc_feature: MA Experiment 20000478 PARAMETER Experiment Name: Zm_5mM_SA_P Parameter: Timepoint (hr) Value: 72
  misc_feature: MA Experiment 20000478 PARAMETER Experiment Name: Zm_5mM_SA_P Parameter: Tissue Value: Aerial
  misc_feature: MA Experiment 20000478 PARAMETER Experiment Name: Zm_5mM_SA_P Parameter: Treatment Value: 5mM SA vs. No Treatment
  misc_feature: MA Experiment ID: 20000479 Result: Down-regulated in Transcription
  misc_feature: MA Experiment 20000479 PARAMETER Experiment Name: Zm_Drought_P Parameter: Age (day) Value: 10
  misc_feature: MA Experiment 20000479 PARAMETER Experiment Name: Zm_Drought_P Parameter: Organism Value: Zea mays
  misc_feature: MA Experiment 20000479 PARAMETER Experiment Name: Zm_Drought_P Parameter: Plant Line Value: 35A19
  misc_feature: MA Experiment 20000479 PARAMETER Experiment Name: Zm_Drought_P Parameter: Timepoint (hr) Value: 48
  misc_feature: MA Experiment 20000479 PARAMETER Experiment Name: Zm_Drought_P Parameter: Tissue Value: Aerial
  misc_feature: MA Experiment 20000479 PARAMETER Experiment Name: Zm_Drought_P Parameter: Treatment Value: Drought vs. No Drought
  misc_feature: MA Experiment ID: 20000480 Result: Down-regulated in Transcription
  misc_feature: MA Experiment 20000480 PARAMETER Experiment Name: Zm_Drought_P Parameter: Age (day) Value: 11
  misc_feature: MA Experiment 20000480 PARAMETER Experiment Name: Zm_Drought_P Parameter: Organism Value: Zea mays
  misc_feature: MA Experiment 20000480 PARAMETER Experiment Name: Zm_Drought_P Parameter: Plant Line Value: 35A19
  misc_feature: MA Experiment 20000480 PARAMETER Experiment Name: Zm_Drought_P Parameter: Timepoint (hr) Value: 72
  misc_feature: MA Experiment 20000480 PARAMETER Experiment Name: Zm_Drought_P Parameter: Tissue Value: Aerial
  misc_feature: MA Experiment 20000480 PARAMETER Experiment Name: Zm_Drought_P Parameter: Treatment Value: Drought vs. No Drought
  misc_feature: MA Experiment ID: 20000492 Result: Up-regulated in Transcription
  misc_feature: MA Experiment 20000492 PARAMETER Experiment Name: Zm_Hybrid_Seed_Dev_P Parameter: DAP Value: 12
  misc_feature: MA Experiment 20000492 PARAMETER Experiment Name: Zm_Hybrid_Seed_Dev_P Parameter: Organism Value: Zea mays
  misc_feature: MA Experiment 20000492 PARAMETER Experiment Name: Zm_Hybrid_Seed_Dev_P Parameter: Plant Line Value: 35A19
  misc_feature: MA Experiment 20000492 PARAMETER Experiment Name: Zm_Hybrid_Seed_Dev_P Parameter: Tissue Value: Fert Kernel vs. Unfert Floret
  misc_feature: MA Experiment ID: 20000535 Result: Up-regulated in Transcription
  misc_feature: MA Experiment 20000535 PARAMETER Experiment Name: Zm_Hybrid_Seed_Dev_P Parameter: DAP Value: 30 vs. 12
  misc_feature: MA Experiment 20000535 PARAMETER Experiment Name: Zm_Hybrid_Seed_Dev_P Parameter: Organism Value: Zea mays
  misc_feature: MA Experiment 20000535 PARAMETER Experiment Name: Zm_Hybrid_Seed_Dev_P Parameter: Plant Line Value: 35A19
  misc_feature: MA Experiment 20000535 PARAMETER Experiment Name: Zm_Hybrid_Seed_Dev_P Parameter: Tissue Value: Embryo vs. Unfert Floret
  misc_feature: MA Experiment ID: 20000626 Result: Down-regulated in Transcription
  misc_feature: MA Experiment 20000626 PARAMETER Experiment Name: Zm_Herbicide-Treatments_P Parameter: Timepoint (hr) Value: 12
  misc_feature: MA Experiment 20000626 PARAMETER Experiment Name: Zm_Herbicide-Treatments_P Parameter: Tissue Value: Aerial
  misc_feature: MA Experiment 20000626 PARAMETER Experiment Name: Zm_Herbicide-Treatments_P Parameter: Treatment Value: Roundup vs. No Treatment
atcctcgctgctttccaccaccctataccaaaccagccaaagccctcctctcctccccgcctccgcctccgacctcgaacattcttctccaatggcgacggcccccgcatccctctcgctctccgcctctaccctgcccacccggctccgtgccgcagcggtgctggcgggcatgcgctggaggcagccgcagcgcgggcggatggtggtgcgcgccaagatccgggagatcttcatgccggcgctgagctccaccatgacggagggcaagatcgtctcctggtccgctggagagggtgatcgcgtctccaagggtgacgccgtcgtggtcgtcgagtctgacaaggccgacatggacgttgagaccttccacgacggcatcgtggcggcggtcctcgtccaggctggcgagtcggcgccggtgggcgcgcccatcgcgctgctcgcggagtcagaggaggaggtgccgctcgctctcgccaaggctcaggagctctccaacgggcagccgcagcaggtgcctcctgctccgacggaggatgccgcagcgacgccgccccctcctcctgctccggccactgctcccacgccggtggccgtgggtacgaagggcattgccagcccgcacgctaagaagctggctaagcagcacagggtggaccttgccaaggtgactggcaccgggccgtatggtcgaattacgtcggcagatgtcgaggcggctgccggaatccagccgaagtcaaagcccgctgctgctgctgctgcgccaccacctgtggctgcaccttcagtgggtgcggtgcctcagtcggcagttctaccaccggttcctggcgcgactgttgttccattcactaccatgcaggctgcagtgagcaagaacatggtggagagtctggcagtgccaacattccgcgttgggtaccccattattactgataaactcgacgagctgtatgaaaaggttaagccaaagggagtgacaatgacagtgctgctggcgaaggctgcagccatggctcttgcacagcaccctgttgtcaatgctagctgcagggatggaaagagcttcacatacaacagtaacatcaacattgcagtggctgtggcaattgatggtggccttattacacctgtccttcaggatgctgacaagctggatatatatttgctctcgcaaaattggaaggatctagtgaagaaagcacgagcaaaacagctccaaccaaatgagtacagctctgggacttttacactgtccaacctgggtatgtttggtgtagatcggtttgatgcaatccttccacctgaccagggagctattatggctgttggagcctcgaaacctacagttgtggctgataaagatggtttctttagcgtcaagaacaaaatgctggtcaatgtcactgctgatcacaggattgtatatggggctgatttggcagcattcctacaaacttttgcaaaggttattgaggatcctgagagcttaactttgtgagatctcttgaagagttatgatcttatctatatgcccataaatagtctggttgcagttggagttctgttgttgatctccagtttttgtatctttgaacattcggcatgatttatctgatctttttgtactggtttctatctctcattgttgtgg

SEQ ID NO: 3090 - protein, 501 aa, Zea mays subsp. mays
  peptide (1)..(501): Ceres Seq. ID no. 12362158
  misc_feature (277)..(501): Pfam Name: 2-oxoacid dehydrogenases acyltransferase Pfam Description: 2-oxoacid dehydrogenases acyltransferase
  misc_feature (74)..(501): Homolog of NCBI NO: 22298842 NR Description: dihydrolipoamide S-acetyltransferase
  misc_feature (74)..(501): Homolog of NCBI NO: 17231098 NR Description: dihydrolipoamide S-acetyltransferase [Nostoc sp.
  misc_feature (74)..(501): Homolog of NCBI NO: 23123757 NR Description: hypothetical protein [Nostoc punctiforme]
  misc_feature (74)..(501): Homolog of NCBI NO: 16331208 NR Description: dihydrolipoamide acetyltransferase component (E2)
  misc_feature (131)..(501): Homolog of NCBI NO: 21954074 NR Description: putative dihydrolipoamide S-acetyltransferase
  misc_feature (40)..(500): Homolog of NCBI NO: 25286434 NR Description: protein F12K21.24 [imported] - Arabidopsis
  misc_feature (40)..(500): Homolog of NCBI NO: 21536525 NR Description: dihydrolipoamide S-acetyltransferase, putative
  misc_feature (40)..(500): Homolog of NCBI NO: 15218630 NR Description: dihydrolipoamide S-acetyltransferase, putative
  misc_feature (68)..(501): Homolog of NCBI NO: 9279589 NR Description: dihydrolipoamide S-acetyltransferase [Arabidopsis
  misc_feature (18)..(501): Homolog of NCBI NO: 15230922 NR Description: dihydrolipoamide S-acetyltransferase
SSLLSTTLYQTSQSPPLLPASASDLEHSSPMATAPASLSLSASTLPTRLRAAAVLAGMRWRQPQRGRMVVRAKIREIFMPALSSTMTEGKIVSWSAGEGDRVSKGDAVVVVESDKADMDVETFHDGIVAAVLVQAGESAPVGAPIALLAESEEEVPLALAKAQELSNGQPQQVPPAPTEDAAATPPPPPAPATAPTPVAVGTKGIASPHAKKLAKQHRVDLAKVTGTGPYGRITSADVEAAAGIQPKSKPAAAAAAPPPVAAPSVGAVPQSAVLPPVPGATVVPFTTMQAAVSKNMVESLAVPTFRVGYPIITDKLDELYEKVKPKGVTMTVLLAKAAAMALAQHPVVNASCRDGKSFTYNSNINIAVAVAIDGGLITPVLQDADKLDIYLLSQNWKDLVKKARAKQLQPNEYSSGTFTLSNLGMFGVDRFDAILPPDQGAIMAVGASKPTVVADKDGFFSVKNKMLVNVTADHRIVYGADLAAFLQTFAKVIEDPESLTL

SEQ ID NO: 3091 - protein, 471 aa, Zea mays subsp. mays
  peptide (1)..(471): Ceres Seq. ID no. 12362159
  misc_feature (247)..(471): Pfam Name: 2-oxoacid dehydrogenases acyltransferase Pfam Description: 2-oxoacid dehydrogenases acyltransferase
  misc_feature (44)..(471): Homolog of NCBI NO: 22298842 NR Description: dihydrolipoamide S-acetyltransferase
  misc_feature (44)..(471): Homolog of NCBI NO: 17231098 NR Description: dihydrolipoamide S-acetyltransferase [Nostoc sp.
  misc_feature (44)..(471): Homolog of NCBI NO: 23123757 NR Description: hypothetical protein [Nostoc punctiforme]
  misc_feature (44)..(471): Homolog of NCBI NO: 16331208 NR Description: dihydrolipoamide acetyltransferase component (E2)
  misc_feature (101)..(471): Homolog of NCBI NO: 21954074 NR Description: putative dihydrolipoamide S-acetyltransferase
  misc_feature (10)..(470): Homolog of NCBI NO: 25286434 NR Description: protein F12K21.24 [imported] - Arabidopsis
  misc_feature (10)..(470): Homolog of NCBI NO: 21536525 NR Description: dihydrolipoamide S-acetyltransferase, putative
  misc_feature (10)..(470): Homolog of NCBI NO: 15218630 NR Description: dihydrolipoamide S-acetyltransferase, putative
  misc_feature (38)..(471): Homolog of NCBI NO: 9279589 NR Description: dihydrolipoamide S-acetyltransferase [Arabidopsis
  misc_feature (1)..(471): Homolog of NCBI NO: 15230922 NR Description: dihydrolipoamide S-acetyltransferase
MATAPASLSLSASTLPTRLRAAAVLAGMRWRQPQRGRMVVRAKIREIFMPALSSTMTEGKIVSWSAGEGDRVSKGDAVVVVESDKADMDVETFHDGIVAAVLVQAGESAPVGAPIALLAESEEEVPLALAKAQELSNGQPQQVPPAPTEDAAATPPPPPAPATAPTPVAVGTKGIASPHAKKLAKQHRVDLAKVTGTGPYGRITSADVEAAAGIQPKSKPAAAAAAPPPVAAPSVGAVPQSAVLPPVPGATVVPFTTMQAAVSKNMVESLAVPTFRVGYPIITDKLDELYEKVKPKGVTMTVLLAKAAAMALAQHPVVNASCRDGKSFTYNSNINIAVAVAIDGGLITPVLQDADKLDIYLLSQNWKDLVKKARAKQLQPNEYSSGTFTLSNLGMFGVDRFDAILPPDQGAIMAVGASKPTVVADKDGFFSVKNKMLVNVTADHRIVYGADLAAFLQTFAKVIEDPESLTL

SEQ ID NO: 3092 - protein, 444 aa, Zea mays subsp. mays
  peptide (1)..(444): Ceres Seq. ID no. 12362160
  misc_feature (220)..(444): Pfam Name: 2-oxoacid dehydrogenases acyltransferase Pfam Description: 2-oxoacid dehydrogenases acyltransferase
  misc_feature (17)..(444): Homolog of NCBI NO: 22298842 NR Description: dihydrolipoamide S-acetyltransferase
  misc_feature (17)..(444): Homolog of NCBI NO: 17231098 NR Description: dihydrolipoamide S-acetyltransferase [Nostoc sp.
  misc_feature (17)..(444): Homolog of NCBI NO: 23123757 NR Description: hypothetical protein [Nostoc punctiforme]
  misc_feature (17)..(444): Homolog of NCBI NO: 16331208 NR Description: dihydrolipoamide acetyltransferase component (E2)
  misc_feature (74)..(444): Homolog of NCBI NO: 21954074 NR Description: putative dihydrolipoamide S-acetyltransferase
  misc_feature (1)..(443): Homolog of NCBI NO: 25286434 NR Description: protein F12K21.24 [imported] - Arabidopsis
  misc_feature (1)..(443): Homolog of NCBI NO: 21536525 NR Description: dihydrolipoamide S-acetyltransferase, putative
  misc_feature (1)..(443): Homolog of NCBI NO: 15218630 NR Description: dihydrolipoamide S-acetyltransferase, putative
  misc_feature (11)..(444): Homolog of NCBI NO: 9279589 NR Description: dihydrolipoamide S-acetyltransferase [Arabidopsis
  misc_feature (1)..(444): Homolog of NCBI NO: 15230922 NR Description: dihydrolipoamide S-acetyltransferase
MRWRQPQRGRMVVRAKIREIFMPALSSTMTEGKIVSWSAGEGDRVSKGDAVVVVESDKADMDVETFHDGIVAAVLVQAGESAPVGAPIALLAESEEEVPLALAKAQELSNGQPQQVPPAPTEDAAATPPPPPAPATAPTPVAVGTKGIASPHAKKLAKQHRVDLAKVTGTGPYGRITSADVEAAAGIQPKSKPAAAAAAPPPVAAPSVGAVPQSAVLPPVPGATVVPFTTMQAAVSKNMVESLAVPTFRVGYPIITDKLDELYEKVKPKGVTMTVLLAKAAAMALAQHPVVNASCRDGKSFTYNSNINIAVAVAIDGGLITPVLQDADKLDIYLLSQNWKDLVKKARAKQLQPNEYSSGTFTLSNLGMFGVDRFDAILPPDQGAIMAVGASKPTVVADKDGFFSVKNKMLVNVTADHRIVYGADLAAFLQTFAKVIEDPESLTL

SEQ ID NO: 3093 - DNA, 1741 bp, Zea mays subsp. mays
  misc_feature (1)..(1741): Ceres Seq. ID no. 12362368
  misc_feature: MA Experiment ID: 108527 Result: Down-regulated in Transcription
  misc_feature: MA Experiment 108527 PARAMETER Experiment Name: Zm_5mM_NO_P Parameter: Age (day) Value: 8
  misc_feature: MA Experiment 108527 PARAMETER Experiment Name: Zm_5mM_NO_P Parameter: Organism Value: Zea mays
  misc_feature: MA Experiment 108527 PARAMETER Experiment Name: Zm_5mM_NO_P Parameter: Plant Line Value: 35A19
  misc_feature: MA Experiment 108527 PARAMETER Experiment Name: Zm_5mM_NO_P Parameter: Timepoint (hr) Value: 6
  misc_feature: MA Experiment 108527 PARAMETER Experiment Name: Zm_5mM_NO_P Parameter: Tissue Value: Aerial
  misc_feature: MA Experiment 108527 PARAMETER Experiment Name: Zm_5mM_NO_P Parameter: Treatment Value: 5mM NO vs. No Treatment
  misc_feature: MA Experiment ID: 108535 Result: Down-regulated in Transcription
  misc_feature: MA Experiment 108535 PARAMETER Experiment Name: Zm_Meristem_P Parameter: Age (day) Value: 8
  misc_feature: MA Experiment 108535 PARAMETER Experiment Name: Zm_Meristem_P Parameter: Organism Value: Zea mays
  misc_feature: MA Experiment 108535 PARAMETER Experiment Name: Zm_Meristem_P Parameter: Plant Line Value: 35A19
  misc_feature: MA Experiment 108535 PARAMETER Experiment Name: Zm_Meristem_P Parameter: Tissue Value: Root Meristem vs. Above Root Meristem
  misc_feature: MA Experiment ID: 108543 Result: Up-regulated in Transcription
  misc_feature: MA Experiment ID: 108556 Result: Down-regulated in Transcription
  misc_feature: MA Experiment 108556 PARAMETER Experiment Name: Zm_Drought_P Parameter: Age (day) Value: 9
  misc_feature: MA Experiment 108556 PARAMETER Experiment Name: Zm_Drought_P Parameter: Organism Value: Zea mays
  misc_feature: MA Experiment 108556 PARAMETER Experiment Name: Zm_Drought_P Parameter: Plant Line Value: 35A19
  misc_feature: MA Experiment 108556 PARAMETER Experiment Name: Zm_Drought_P Parameter: Timepoint (hr) Value: 24
  misc_feature: MA Experiment 108556 PARAMETER Experiment Name: Zm_Drought_P Parameter: Tissue Value: Aerial
  misc_feature: MA Experiment 108556 PARAMETER Experiment Name: Zm_Drought_P Parameter: Treatment Value: Drought vs. No Drought
  misc_feature: MA Experiment ID: 20000477 Result: Down-regulated in Transcription
  misc_feature: MA Experiment 20000477 PARAMETER Experiment Name: Zm_5mM_SA_P Parameter: Age (day) Value: 10
  misc_feature: MA Experiment 20000477 PARAMETER Experiment Name: Zm_5mM_SA_P Parameter: Organism Value: Zea mays
  misc_feature: MA Experiment 20000477 PARAMETER Experiment Name: Zm_5mM_SA_P Parameter: Plant Line Value: 35A19
  misc_feature: MA Experiment 20000477 PARAMETER Experiment Name: Zm_5mM_SA_P Parameter: Timepoint (hr) Value: 48
  misc_feature: MA Experiment 20000477 PARAMETER Experiment Name: Zm_5mM_SA_P Parameter: Tissue Value: Aerial
  misc_feature: MA Experiment 20000477 PARAMETER Experiment Name: Zm_5mM_SA_P Parameter: Treatment Value: 5mM SA vs. No Treatment
  misc_feature: MA Experiment ID: 20000478 Result: Down-regulated in Transcription
  misc_feature: MA Experiment 20000478 PARAMETER Experiment Name: Zm_5mM_SA_P Parameter: Age (day) Value: 11
  misc_feature: MA Experiment 20000478 PARAMETER Experiment Name: Zm_5mM_SA_P Parameter: Organism Value: Zea mays
  misc_feature: MA Experiment 20000478 PARAMETER Experiment Name: Zm_5mM_SA_P Parameter: Plant Line Value: 35A19
  misc_feature: MA Experiment 20000478 PARAMETER Experiment Name: Zm_5mM_SA_P Parameter: Timepoint (hr) Value: 72
  misc_feature: MA Experiment 20000478 PARAMETER Experiment Name: Zm_5mM_SA_P Parameter: Tissue Value: Aerial
  misc_feature: MA Experiment 20000478 PARAMETER Experiment Name: Zm_5mM_SA_P Parameter: Treatment Value: 5mM SA vs. No Treatment
  misc_feature: MA Experiment ID: 20000479 Result: Down-regulated in Transcription
  misc_feature: MA Experiment 20000479 PARAMETER Experiment Name: Zm_Drought_P Parameter: Age (day) Value: 10
  misc_feature: MA Experiment 20000479 PARAMETER Experiment Name: Zm_Drought_P Parameter: Organism Value: Zea mays
  misc_feature: MA Experiment 20000479 PARAMETER Experiment Name: Zm_Drought_P Parameter: Plant Line Value: 35A19
  misc_feature: MA Experiment 20000479 PARAMETER Experiment Name: Zm_Drought_P Parameter: Timepoint (hr) Value: 48
  misc_feature: MA Experiment 20000479 PARAMETER Experiment Name: Zm_Drought_P Parameter: Tissue Value: Aerial
  misc_feature: MA Experiment 20000479 PARAMETER Experiment Name: Zm_Drought_P Parameter: Treatment Value: Drought vs. No Drought
  misc_feature: MA Experiment ID: 20000480 Result: Down-regulated in Transcription
  misc_feature: MA Experiment 20000480 PARAMETER Experiment Name: Zm_Drought_P Parameter: Age (day) Value: 11
  misc_feature: MA Experiment 20000480 PARAMETER Experiment Name: Zm_Drought_P Parameter: Organism Value: Zea mays
  misc_feature: MA Experiment 20000480 PARAMETER Experiment Name: Zm_Drought_P Parameter: Plant Line Value: 35A19
  misc_feature: MA Experiment 20000480 PARAMETER Experiment Name: Zm_Drought_P Parameter: Timepoint (hr) Value: 72
  misc_feature: MA Experiment 20000480 PARAMETER Experiment Name: Zm_Drought_P Parameter: Tissue Value: Aerial
  misc_feature: MA Experiment 20000480 PARAMETER Experiment Name: Zm_Drought_P Parameter: Treatment Value: Drought vs. No Drought
  misc_feature: MA Experiment ID: 20000535 Result: Down-regulated in Transcription
  misc_feature: MA Experiment 20000535 PARAMETER Experiment Name: Zm_Hybrid_Seed_Dev_P Parameter: DAP Value: 30 vs. 12
  misc_feature: MA Experiment 20000535 PARAMETER Experiment Name: Zm_Hybrid_Seed_Dev_P Parameter: Organism Value: Zea mays
  misc_feature: MA Experiment 20000535 PARAMETER Experiment Name: Zm_Hybrid_Seed_Dev_P Parameter: Plant Line Value: 35A19
  misc_feature: MA Experiment 20000535 PARAMETER Experiment Name: Zm_Hybrid_Seed_Dev_P Parameter: Tissue Value: Embryo vs. Unfert Floret
gcacgagaccattacctagaacatcctaatcgaaaaaccccccgttctgtagctctcctctaatcctgatttttgtatgcgtggtggtcgctcttccgtctctcccagcccagcagccagcagtcgtctccttctctacctccctcgcatatcctgctcctctgtaaccactgtactaaaactagcctgtacctgtactgtgctgacattatatacagccccttctctttgcttcttgctcgtgccaattggcagttgccattgccaatcaccacgtagagctgcattattgcttgcttcgaggccatgggaactgcaagagttcgcttcgtggtccttgttctgatctctacgtttctcagagtcagagaaggcagagccgcgacattcacgttcgtgaaccggtgcacggggacggtgtggccgggcatccagtccaacgccggaagctcgaggctggacacgacgggcttcgtgctgccgccgggcacgtcgcgcgcggtcccggcgccgtcggggtggtccggccgcgtctgggcccgcaccggctgcgggcaggacggcagcggcaaggtggtgtgcgcgacgggcgactgcgggtccgggtccctggagtgcaacgggcagaacgcggcgacgcctgcgacgctggccgagttcacgctggcctccgcgggcggcaacgacttctacgacgtgagcctggtggacggctacaacctgccgatcctggtggagcccgcgggcggcgccgccaccggcgccagtgccacgacgtgcgccgcggccgggtgcacggcggacctcaacgagcggtgccccgcggagctgcgcgccgagggcggcgccgggtgccgcaccgcctgccacgccttcggcaggcccgagtactgctgcagcggcgcctacgccaaccccaacacctgccgccccaccgcctactcgcagctcttcaagtccgcctgccccaactcgtacagctacgcatacgacgaccccaccagcaccttcacctgcgccggcggccgcgactacaccatcaccttctgccccgtcgccaccccaagcgtgaaatcgtcgagtggccctggagcggcaacaacgacggcggcaccgacaggcccgacgccgacgctgccgggggcgacgccgcggtcggcaggcggcggcccggaggggcagggcgtgatgctgggcgacaactcctggctcgccagcctcgccacgggcgacgcgtcgtccgcgccggcgctccgggccttgcccctcgcgccgctcctgctcgtcggcctgctcctgcttgtgctgctatagcaccaccagcgggaaacccaggcaaccgaccgcgtcacgggcgtgtgaggcgaaagcttttgatctcggacagcctaccgaacgcgcgcgctcctgctacgtttgatgaatcatctcctagtcacggtgcaggcctgcagtgcggcggatgattttgacggctagccgaatgcgcgcacccccatccccagtcagcagctgaaggaaaaaaagtttaagtggcctactcatggatgaggtggctgcagcatggactagacacaaatactattagtgctgatggtgtatagtaccgctgccgctttaaagtagtgtacagtgcagtgcagctctgatggcgctgtccctcggcacatgggaggagatgtgcccatgccatgccatctgatctgtgcttgcggatcaatcaaatactacgtacgtgtcc

SEQ ID NO: 3094 - protein, 335 aa, Zea mays subsp. mays
  peptide (1)..(335): Ceres Seq. ID no. 12362369
  misc_feature (32)..(249): Pfam Name: Thaumatin family Pfam Description: Thaumatin family
  misc_feature (27)..(306): Homolog of NCBI NO: 25296204 NR Description: hypothetical protein T20H2.19 [imported] -
  misc_feature (1)..(277): Homolog of NCBI NO: 15233437 NR Description: thaumatin-like protein
  misc_feature (9)..(319): Homolog of NCBI NO: 37531042 NR Description: putative thaumatin-like protein
  misc_feature (26)..(315): Homolog of NCBI NO: 7442168 NR Description: pathogenesis-related protein F20M13.220 -
  misc_feature (4)..(249): Homolog of NCBI NO: 15233738 NR Description: thaumatin-like protein; protein id: At4g24180.1
  misc_feature (27)..(306): Homolog of NCBI NO: 30686652 NR Description: thaumatin family [Arabidopsis thaliana]
  misc_feature (10)..(278): Homolog of NCBI NO: 15222875 NR Description: thaumatin, putative
  misc_feature (1)..(315): Homolog of NCBI NO: 18420282 NR Description: putative thaumatin-like protein
  misc_feature (1)..(315): Homolog of NCBI NO: 21592749 NR Description: putative thaumatin-like protein [Arabidopsis
  misc_feature (1)..(285): Homolog of NCBI NO: 37531036 NR Description: putative thaumatin-like protein
MGTARVRFVVLVLISTFLRVREGRAATFTFVNRCTGTVWPGIQSNAGSSRLDTTGFVLPPGTSRAVPAPSGWSGRVWARTGCGQDGSGKVVCATGDCGSGSLECNGQNAATPATLAEFTLASAGGNDFYDVSLVDGYNLPILVEPAGGAATGASATTCAAAGCTADLNERCPAELRAEGGAGCRTACHAFGRPEYCCSGAYANPNTCRPTAYSQLFKSACPNSYSYAYDDPTSTFTCAGGRDYTITFCPVATPSVKSSSGPGAATTTAAPTGPTPTLPGATPRSAGGGPEGQGVMLGDNSWLASLATGDASSAPALRALPLAPLLLVGLLLLVLL

SEQ ID NO: 3095 - DNA, 1191 bp, Zea mays subsp. mays
  misc_feature (1)..(1191): Ceres Seq. ID no. 12352162
  misc_feature: MA Experiment ID: 108543 Result: Down-regulated in Transcription
  misc_feature: MA Experiment ID: 20000492 Result: Up-regulated in Transcription
  misc_feature: MA Experiment 20000492 PARAMETER Experiment Name: Zm_Hybrid_Seed_Dev_P Parameter: DAP Value: 12
  misc_feature: MA Experiment 20000492 PARAMETER Experiment Name: Zm_Hybrid_Seed_Dev_P Parameter: Organism Value: Zea mays
  misc_feature: MA Experiment 20000492 PARAMETER Experiment Name: Zm_Hybrid_Seed_Dev_P Parameter: Plant Line Value: 35A19
  misc_feature: MA Experiment 20000492 PARAMETER Experiment Name: Zm_Hybrid_Seed_Dev_P Parameter: Tissue Value: Fert Kernel vs. Unfert Floret
aagatataggttggaaccagactctgacaccgactacggagccaatccctcctgctggttcgatccaaaccctaccaaatcgatggccgacggcggcaacggcgggccgggcggcggcaatgcatcggcgccggtgtgcagtttcgtgaggaaaccacccaagaacatccggaagcgccccgccgcgcccgcggggtctgatgacgacgacgacggcggcggcggcgccctagccgccgcgcgctccaagaaggggccaccgtcctcaaccgctggcaagctcgttttctccaccgcaggtgcttcctccgaggcgccgcggttccagtacgaatcgtcccggacgatccagtccacggacacccgcgcaactgccacgctcgagacggagacggagtttgaccgcgacgcgcgctccatccgcgagagacagctcaagcaggccgaggagtccctcaagaagaacccctccgctgttgctgcttccgcctccgcctccaccgctggagaggtgtacaaggggatccacggctacacggactacaaagctgggttccgacgggagcacacggtatctagcgagaaggccggcggttcgcatggtccgctccgggcgtccgcgcacattcgcctctcccagcggtttgactaccagcccgacatctgcaaggactacaaggagacggggtactgtggttacggcgattcctgcaaattcatgcacgaccgaggggattacaaatccgggtggcagctcgagaaggaatatgaggaggctgagaaggcccgcaagcgacgaattgccatgggtggtggtggtgagagtgatgatgaggcagcagatgacgaggatgaggaggaggcgctgccctttgcctgcttcatttgtcgggagccattcgttgatccagtggtcaccaaatgcaagcactacttttgtgaacattgcgctttgaagcaccactcgaagaacaagaagtgctacgtctgcaacaaaccgacgctgggcatcttcaacgctgcacaggagatccgcaagaagatggcacaggacaagaagcagcagcagcaggagtaggagagctcaaaacacaccgttgctaatttagctgtgttgtacaacgatgattggtgcgataactagagtccggtatttttcgctatcagataaaagagaccaagttttgaacg

SEQ ID NO: 3096 - protein, 358 aa, Zea mays subsp. mays
  peptide (1)..(358): Ceres Seq. ID no. 12352163
  misc_feature (293)..(330): Pfam Name: Zinc finger, C3HC4 type (RING finger) Pfam Description: Zinc finger, C3HC4 type (RING finger)
  misc_feature (39)..(355): Homolog of NCBI NO: 34935361 NR Description: similar to RIKEN cDNA 2310020H19 [Rattus
  misc_feature (66)..(348): Homolog of NCBI NO: 27374308 NR Description: CG4973-PA [Drosophila pseudoobscura]
  misc_feature (82)..(358): Homolog of NCBI NO: 27374394 NR Description: CG4973-PA [Drosophila willistoni]
  misc_feature (39)..(356): Homolog of NCBI NO: 23943840 NR Description: RIKEN cDNA 2810428C21 [Mus musculus]
  misc_feature (39)..(356): Homolog of NCBI NO: 27715515 NR Description: similar to RIKEN cDNA 2810428C21
  misc_feature (42)..(319): Homolog of NCBI NO: 25406720 NR Description: probable zinc finger protein [imported] -
  misc_feature (27)..(357): Homolog of NCBI NO: 22531136 NR Description: putative protein [Arabidopsis thaliana]
  misc_feature (42)..(357): Homolog of NCBI NO: 26451788 NR Description: unknown protein [Arabidopsis thaliana]
  misc_feature (42)..(357): Homolog of NCBI NO: 15223384 NR Description: hypothetical protein; protein id: At1g01350.1
  misc_feature (27)..(357): Homolog of NCBI NO: 15240037 NR Description: putative protein
RYRLEPDSDTDYGANPSCWFDPNPTKSMADGGNGGPGGGNASAPVCSFVRKPPKNIRKRPAAPAGSDDDDDGGGGALAAARSKKGPPSSTAGKLVFSTAGASSEAPRFQYESSRTIQSTDTRATATLETETEFDRDARSIRERQLKQAEESLKKNPSAVAASASASTAGEVYKGIHGYTDYKAGFRREHTVSSEKAGGSHGPLRASAHIRLSQRFDYQPDICKDYKETGYCGYGDSCKFMHDRGDYKSGWQLEKEYEEAEKARKRRIAMGGGGESDDEAADDEDEEEALPFACFICREPFVDPVVTKCKHYFCEHCALKHHSKNKKCYVCNKPTLGIFNAAQEIRKKMAQDKKQQQQE

SEQ ID NO: 3097 - protein, 331 aa, Zea mays subsp. mays
  peptide (1)..(331): Ceres Seq. ID no. 12352164
  misc_feature (266)..(303): Pfam Name: Zinc finger, C3HC4 type (RING finger) Pfam Description: Zinc finger, C3HC4 type (RING finger)
  misc_feature (12)..(328): Homolog of NCBI NO: 34935361 NR Description: similar to RIKEN cDNA 2310020H19 [Rattus
  misc_feature (39)..(321): Homolog of NCBI NO: 27374308 NR Description: CG4973-PA [Drosophila pseudoobscura]
  misc_feature (55)..(331): Homolog of NCBI NO: 27374394 NR Description: CG4973-PA [Drosophila willistoni]
  misc_feature (12)..(329): Homolog of NCBI NO: 23943840 NR Description: RIKEN cDNA 2810428C21 [Mus musculus]
  misc_feature (12)..(329): Homolog of NCBI NO: 27715515 NR Description: similar to RIKEN cDNA 2810428C21
  misc_feature (15)..(292): Homolog of NCBI NO: 25406720 NR Description: probable zinc finger protein [imported] -
  misc_feature (1)..(330): Homolog of NCBI NO: 22531136 NR Description: putative protein [Arabidopsis thaliana]
  misc_feature (15)..(330): Homolog of NCBI NO: 26451788 NR Description: unknown protein [Arabidopsis thaliana]
  misc_feature (15)..(330): Homolog of NCBI NO: 15223384 NR Description: hypothetical protein; protein id: At1g01350.1
  misc_feature (1)..(330): Homolog of NCBI NO: 15240037 NR Description: putative protein
MADGGNGGPGGGNASAPVCSFVRKPPKNIRKRPAAPAGSDDDDDGGGGALAAARSKKGPPSSTAGKLVFSTAGASSEAPRFQYESSRTIQSTDTRATATLETETEFDRDARSIRERQLKQAEESLKKNPSAVAASASASTAGEVYKGIHGYTDYKAGFRREHTVSSEKAGGSHGPLRASAHIRLSQRFDYQPDICKDYKETGYCGYGDSCKFMHDRGDYKSGWQLEKEYEEAEKARKRRIAMGGGGESDDEAADDEDEEEALPFACFICREPFVDPVVTKCKHYFCEHCALKHHSKNKKCYVCNKPTLGIFNAAQEIRKKMAQDKKQQQQE

SEQ ID NO: 3098 - DNA, 1249 bp, Zea mays subsp. mays
  misc_feature (1)..(1249): Ceres Seq. ID no. 12381193
  misc_feature: MA Experiment ID: 108535 Result: Up-regulated in Transcription
  misc_feature: MA Experiment 108535 PARAMETER Experiment Name: Zm_Meristem_P Parameter: Age (day) Value: 8
  misc_feature: MA Experiment 108535 PARAMETER Experiment Name: Zm_Meristem_P Parameter: Organism Value: Zea mays
  misc_feature: MA Experiment 108535 PARAMETER Experiment Name: Zm_Meristem_P Parameter: Plant Line Value: 35A19
  misc_feature: MA Experiment 108535 PARAMETER Experiment Name: Zm_Meristem_P Parameter: Tissue Value: Root Meristem vs. Above Root Meristem
  misc_feature: MA Experiment ID: 108556 Result: Down-regulated in Transcription
  misc_feature: MA Experiment 108556 PARAMETER Experiment Name: Zm_Drought_P Parameter: Age (day) Value: 9
  misc_feature: MA Experiment 108556 PARAMETER Experiment Name: Zm_Drought_P Parameter: Organism Value: Zea mays
  misc_feature: MA Experiment 108556 PARAMETER Experiment Name: Zm_Drought_P Parameter: Plant Line Value: 35A19
  misc_feature: MA Experiment 108556 PARAMETER Experiment Name: Zm_Drought_P Parameter: Timepoint (hr) Value: 24
  misc_feature: MA Experiment 108556 PARAMETER Experiment Name: Zm_Drought_P Parameter: Tissue Value: Aerial
  misc_feature: MA Experiment 108556 PARAMETER Experiment Name: Zm_Drought_P Parameter: Treatment Value: Drought vs. No Drought
  misc_feature: MA Experiment ID: 20000480 Result: Down-regulated in Transcription
  misc_feature: MA Experiment 20000480 PARAMETER Experiment Name: Zm_Drought_P Parameter: Age (day) Value: 11
  misc_feature: MA Experiment 20000480 PARAMETER Experiment Name: Zm_Drought_P Parameter: Organism Value: Zea mays
  misc_feature: MA Experiment 20000480 PARAMETER Experiment Name: Zm_Drought_P Parameter: Plant Line Value: 35A19
  misc_feature: MA Experiment 20000480 PARAMETER Experiment Name: Zm_Drought_P Parameter: Timepoint (hr) Value: 72
  misc_feature: MA Experiment 20000480 PARAMETER Experiment Name: Zm_Drought_P Parameter: Tissue Value: Aerial
  misc_feature: MA Experiment 20000480 PARAMETER Experiment Name: Zm_Drought_P Parameter: Treatment Value: Drought vs. No Drought
  misc_feature: MA Experiment ID: 20000492 Result: Up-regulated in Transcription
  misc_feature: MA Experiment 20000492 PARAMETER Experiment Name: Zm_Hybrid_Seed_Dev_P Parameter: DAP Value: 12
  misc_feature: MA Experiment 20000492 PARAMETER Experiment Name: Zm_Hybrid_Seed_Dev_P Parameter: Organism Value: Zea mays
  misc_feature: MA Experiment 20000492 PARAMETER Experiment Name: Zm_Hybrid_Seed_Dev_P Parameter: Plant Line Value: 35A19
  misc_feature: MA Experiment 20000492 PARAMETER Experiment Name: Zm_Hybrid_Seed_Dev_P Parameter: Tissue Value: Fert Kernel vs. Unfert Floret
  misc_feature: MA Experiment ID: 20000626 Result: Down-regulated in Transcription
  misc_feature: MA Experiment 20000626 PARAMETER Experiment Name: Zm_Herbicide-Treatments_P Parameter: Timepoint (hr) Value: 12
  misc_feature: MA Experiment 20000626 PARAMETER Experiment Name: Zm_Herbicide-Treatments_P Parameter: Tissue Value: Aerial
  misc_feature: MA Experiment 20000626 PARAMETER Experiment Name: Zm_Herbicide-Treatments_P Parameter: Treatment Value: Roundup vs. No Treatment
gcacgagaccattacctagaacatcctaatcgaaaaaaaccccaactccacaatgaggccgtcgctgatgagatccacctcccagctcctccgccgccggagctactcctccgcatccgggcagcccgagcggaaggtggccatcctcggggcggcggggggcatcgggcagccgctgtcgctgctcatgaagctcaacccactggtctcctccctctcgctctacgatatcgctggcaccccaggtgtcgcggccgacgtctcccacatcaactcccccgcactggtgaagggtttcatgggtgatgagcaacttggggaagcgctagagggctcggacgtggtgatcataccggccggcgtcccgaggaagcccggcatgaccagggacgacctattcaatatcaacgctggcatcgttaagaacctcagcaccgccatcgccaagtactgccccaatgcccttgtcaacatgatcagcaaccctgtgaattcaactgtaccaattgctgctgaggttttcaagaaggctgggacatatgatgagaagaagttgtttggcgtgaccacccttgatgttgttcgtgctaagactttctatgctgggaaggctaatttaccagttaccgatgtgaatgtccctgttgttggtggtcatgcgggtatcactatcctgccgttgttctcacaggccacccctgcaaccaacgcattgtccgatgaagacatcaaggctctcaccaagaggacacaggatggtggaactgaagttgtcgaggcaaaggctgggaagggctctgcaaccttgtccatggcgtatgctggtgctgtttttgcagatgcatgcttgaagggtctcaatggagttccggatattgttgagtgctcttttgttcaatcaactgtaacagagcttccattctttgcatctaaggtaaggcttgggaagaatggagttgaggaagtgcttggattaggtgagctgtgcggactttgagaaagaagggttggagaagctcaagagcgagctcaagtcttcgattgagaagggtatcaagtttgcaaatgataactagataaggccattttgcagattatagcaacaattgaaacctttagtagcaattgaaacctttagttgcgggatcttctgatttcattctacccttttctgtccctttttgtgagggagtggaaggtattacaataaaaaacctgatgggcaaagcttacatgagggatttattcc

SEQ ID NO: 3099 - protein, 314 aa, Zea mays subsp. mays
  peptide (1)..(314): Ceres Seq. ID no. 12381194
  misc_feature (172)..(311): Pfam Name: lactate/malate dehydrogenase, alpha/beta Pfam Description: lactate/malate dehydrogenase, alpha/beta
  misc_feature (1)..(311): Homolog of NCBI NO: 7798706 NR Description: malate dehydrogenase [Vitis vinifera]
  misc_feature (1)..(311): Homolog of NCBI NO: 24638017 NR Description: Malate dehydrogenase, mitochondrial precursor
  misc_feature (1)..(311): Homolog of NCBI NO: 126896 NR Description: MALATE DEHYDROGENASE, MITOCHONDRIAL PRECURSOR
MRPSLMRSTSQLLRRRSYSSASGQPERKVAILGAAGGIGQPLSLLMKLNPLVSSLSLYDIAGTPGVAADVSHINSPALVKGFMGDEQLGEALEGSDVVIIPAGVPRKPGMTRDDLFNINAGIVKNLSTAIAKYCPNALVNMISNPVNSTVPIAAEVFKKAGTYDEKKLFGVTTLDVVRAKTFYAGKANLPVTDVNVPVVGGHAGITILPLFSQATPATNALSDEDIKALTKRTQDGGTEVVEAKAGKGSATLSMAYAGAVFADACLKGLNGVPDIVECSFVQSTVTELPFFASKVRLGKNGVEEVLGLGELCGL

SEQ ID NO: 3100 - protein, 309 aa, Zea mays subsp. mays
  peptide (1)..(309): Ceres Seq. ID no. 12381195
  misc_feature (167)..(306): Pfam Name: lactate/malate dehydrogenase, alpha/beta Pfam Description: lactate/malate dehydrogenase, alpha/beta
  misc_feature (1)..(306): Homolog of NCBI NO: 7798706 NR Description: malate dehydrogenase [Vitis vinifera]
  misc_feature (1)..(306): Homolog of NCBI NO: 24638017 NR Description: Malate dehydrogenase, mitochondrial precursor
  misc_feature (1)..(306): Homolog of NCBI NO: 126896 NR Description: MALATE DEHYDROGENASE, MITOCHONDRIAL PRECURSOR
MRSTSQLLRRRSYSSASGQPERKVAILGAAGGIGQPLSLLMKLNPLVSSLSLYDIAGTPGVAADVSHINSPALVKGFMGDEQLGEALEGSDVVIIPAGVPRKPGMTRDDLFNINAGIVKNLSTAIAKYCPNALVNMISNPVNSTVPIAAEVFKKAGTYDEKKLFGVTTLDVVRAKTFYAGKANLPVTDVNVPVVGGHAGITILPLFSQATPATNALSDEDIKALTKRTQDGGTEVVEAKAGKGSATLSMAYAGAVFADACLKGLNGVPDIVECSFVQSTVTELPFFASKVRLGKNGVEEVLGLGELCGL

SEQ ID NO: 3101 - protein, 269 aa, Zea mays subsp. mays
  peptide (1)..(269): Ceres Seq. ID no. 12381196
  misc_feature (127)..(266): Pfam Name: lactate/malate dehydrogenase, alpha/beta Pfam Description: lactate/malate dehydrogenase, alpha/beta
  misc_feature (1)..(266): Homolog of NCBI NO: 7798706 NR Description: malate dehydrogenase [Vitis vinifera]
  misc_feature (1)..(266): Homolog of NCBI NO: 24638017 NR Description: Malate dehydrogenase, mitochondrial precursor
  misc_feature (1)..(266): Homolog of NCBI NO: 126896 NR Description: MALATE DEHYDROGENASE, MITOCHONDRIAL PRECURSOR
MKLNPLVSSLSLYDIAGTPGVAADVSHINSPALVKGFMGDEQLGEALEGSDVVIIPAGVPRKPGMTRDDLFNINAGIVKNLSTAIAKYCPNALVNMISNPVNSTVPIAAEVFKKAGTYDEKKLFGVTTLDVVRAKTFYAGKANLPVTDVNVPVVGGHAGITILPLFSQATPATNALSDEDIKALTKRTQDGGTEVVEAKAGKGSATLSMAYAGAVFADACLKGLNGVPDIVECSFVQSTVTELPFFASKVRLGKNGVEEVLGLGELCGL

SEQ ID NO: 3102 - DNA, 1673 bp, Zea mays subsp. mays
  misc_feature (1)..(1673): Ceres Seq. ID no. 12384182
  misc_feature: MA Experiment ID: 108527 Result: Down-regulated in Transcription
  misc_feature: MA Experiment 108527 PARAMETER Experiment Name: Zm_5mM_NO_P Parameter: Age (day) Value: 8
  misc_feature: MA Experiment 108527 PARAMETER Experiment Name: Zm_5mM_NO_P Parameter: Organism Value: Zea mays
  misc_feature: MA Experiment 108527 PARAMETER Experiment Name: Zm_5mM_NO_P Parameter: Plant Line Value: 35A19
  misc_feature: MA Experiment 108527 PARAMETER Experiment Name: Zm_5mM_NO_P Parameter: Timepoint (hr) Value: 6
  misc_feature: MA Experiment 108527 PARAMETER Experiment Name: Zm_5mM_NO_P Parameter: Tissue Value: Aerial
  misc_feature: MA Experiment 108527 PARAMETER Experiment Name: Zm_5mM_NO_P Parameter: Treatment Value: 5mM NO vs. No Treatment
ctcgacgcctcataggctcatagggttctccaaattctaaatcgttgcaagcgaaaccaccaaaactgtactcacaaccctcgtctgcgctgcgccaccactcccccgtggcggcttgtagttgtagaagttcccggaaccagacaacccctaggcgctgagttttctgatagcggcttcggatatctcgtcgtgggcggccatggcgggcccgtgctgagtgcggggcgggacaggtgaaggtctccgagctcgagatctcgatgcagattcgggagggcccggcgcggcggcaggcgccgtccgccgctggggcgctgcggtcgcccatgtccgccatgatgctcgctatgttcgctactatggcctccttctacgtcgccggtcgattgtggcaggatgctcagaaccgacttcatctcattaaggagctcgacagacgaacaggccaggggcaatcagcaatatctgtggatgataccttgaaggttgttgcatgcaggcagcaagggaagcggttggcatcacttgagatggagctggctgcagcaaagcataaaggttttgttggcaaatatactcctgagacaaatggaactcattctgggaaaaagccactgattgttattggaataatgagtagctttgggaggaaaaactaccgtgatgctgtcaggaaatcatggcttccaacaggttcaatgctgaagaaactagaagaagaaaaaggcattgtagtacgttttgttgttggaagaagtgcaaatcgaggtgatactttcgatagggagattgatgacgaaaataggagcaccaaggatttcttgatattggatgatcatatagaatctgatgaagagcttcctaagaagacaaaaagtttctttgctaatgcagcagaaacattcaatgctgcattttatgctaaggtcaatgatgatatatacataaatgtcgatactttgagtgcaatgctcgaaactcactgggacaggcctcgtgtctatataggttgcatgaaatcgggcgaggttttctctgacttaacccacaagtggtacgaatcagactggtggaaatttggtgatgggaaatcgtactttcgacacgcttctggtgaaatgtttgtcatatccagggccatagctcagttcatttctataaacaagtccgctctccggacatatgcccatgatgatgttagtattggatcgtggatgattggccttgccgtgaatcatgtaaatgaagcaaaactgtgctgttcatcgtggccctcaggtgcgttatgttcagcgctataacgagcaacaatgcttaatgaggaagagttttgcaaacactgtgcctgttggatcgaatcggtattgggaaaattttgttttcttctgccatcttgtgtagtcctttggaggaggcttgtacgagccagttcatactgattactggatcggatatcttgtttttcttttccaaaggaaaggtcttgcatattttctttgcaaggccactacactagaatcatgagttctgacgaaaagccctctgcagattgtatcctgttccgcgtgccatttgtagatgccccaccctttaccattcttttttctgacagacactgccattgttggagtgacagaaatcaatagcaattcgggagattactttgctcc

SEQ ID NO: 3103 - protein, 346 aa, Zea mays subsp. mays
  peptide (1)..(346): Ceres Seq. ID no. 12384183
  misc_feature (132)..(330): Pfam Name: Galactosyltransferase Pfam Description: Galactosyltransferase
  misc_feature (78)..(338): Homolog of NCBI NO: 15217544 NR Description: elicitor response protein, putative; protein id:
  misc_feature (63)..(344): Homolog of NCBI NO: 26451702 NR Description: unknown protein [Arabidopsis thaliana]
  misc_feature (8)..(340): Homolog of NCBI NO: 15224704 NR Description: unknown protein; protein id: At2g25300.1
  misc_feature (25)..(344): Homolog of NCBI NO: 15236681 NR Description: putative protein
  misc_feature (7)..(344): Homolog of NCBI NO: 34898462 NR Description: ESTs D47620(S13223),AU029621(E31157) correspond a region of the predicted gene.~Similar to Arabidopsis thaliana
  misc_feature (21)..(336): Homolog of NCBI NO: 9759181 NR Description: Avr9 elicitor response protein-like [Arabidopsis
  misc_feature (21)..(346): Homolog of NCBI NO: 18423501 NR Description: Avr9 elicitor response protein-like
  misc_feature (6)..(345): Homolog of NCBI NO: 20372915 NR Description: beta 1,3-glycosyltransferase-like protein I
  misc_feature (23)..(344): Homolog of NCBI NO: 22553068 NR Description: beta 1,3-glycosyltransferase-like protein I
  misc_feature (1)..(346): Homolog of NCBI NO: 40253477 NR Description: putative Avr9 elicitor response protein
MQIREGPARRQAPSAAGALRSPMSAMMLAMFATMASFYVAGRLWQDAQNRLHLIKELDRRTGQGQSAISVDDTLKVVACRQQGKRLASLEMELAAAKHKGFVGKYTPETNGTHSGKKPLIVIGIMSSFGRKNYRDAVRKSWLPTGSMLKKLEEEKGIVVRFVVGRSANRGDTFDREIDDENRSTKDFLILDDHIESDEELPKKTKSFFANAAETFNAAFYAKVNDDIYINVDTLSAMLETHWDRPRVYIGCMKSGEVFSDLTHKWYESDWWKFGDGKSYFRHASGEMFVISRAIAQFISINKSALRTYAHDDVSIGSWMIGLAVNHVNEAKLCCSSWPSGALCSAL

SEQ ID NO: 3104 - protein, 324 aa, Zea mays subsp. mays
  peptide (1)..(324): Ceres Seq. ID no. 12384184
  misc_feature (110)..(308): Pfam Name: Galactosyltransferase Pfam Description: Galactosyltransferase
  misc_feature (56)..(316): Homolog of NCBI NO: 15217544 NR Description: elicitor response protein, putative; protein id:
  misc_feature (41)..(322): Homolog of NCBI NO: 26451702 NR Description: unknown protein [Arabidopsis thaliana]
  misc_feature (1)..(318): Homolog of NCBI NO: 15224704 NR Description: unknown protein; protein id: At2g25300.1
  misc_feature (3)..(322): Homolog of NCBI NO: 15236681 NR Description: putative protein
  misc_feature (1)..(322): Homolog of NCBI NO: 34898462 NR Description: ESTs D47620(S13223),AU029621(E31157) correspond a region of the predicted gene.~Similar to Arabidopsis thaliana
  misc_feature (1)..(314): Homolog of NCBI NO: 9759181 NR Description: Avr9 elicitor response protein-like [Arabidopsis
  misc_feature (1)..(324): Homolog of NCBI NO: 18423501 NR Description: Avr9 elicitor response protein-like
  misc_feature (1)..(323): Homolog of NCBI NO: 20372915 NR Description: beta 1,3-glycosyltransferase-like protein I
  misc_feature (1)..(322): Homolog of NCBI NO: 22553068 NR Description: beta 1,3-glycosyltransferase-like protein I
  misc_feature (1)..(324): Homolog of NCBI NO: 40253477 NR Description: putative Avr9 elicitor response protein
MSAMMLAMFATMASFYVAGRLWQDAQNRLHLIKELDRRTGQGQSAISVDDTLKVVACRQQGKRLASLEMELAAAKHKGFVGKYTPETNGTHSGKKPLIVIGIMSSFGRKNYRDAVRKSWLPTGSMLKKLEEEKGIVVRFVVGRSANRGDTFDREIDDENRSTKDFLILDDHIESDEELPKKTKSFFANAAETFNAAFYAKVNDDIYINVDTLSAMLETHWDRPRVYIGCMKSGEVFSDLTHKWYESDWWKFGDGKSYFRHASGEMFVISRAIAQFISINKSALRTYAHDDVSIGSWMIGLAVNHVNEAKLCCSSWPSGALCSAL

SEQ ID NO: 3105 - protein, 321 aa, Zea mays subsp. mays
  peptide (1)..(321): Ceres Seq. ID no. 12384185
  misc_feature (107)..(305): Pfam Name: Galactosyltransferase Pfam Description: Galactosyltransferase
  misc_feature (53)..(313): Homolog of NCBI NO: 15217544 NR Description: elicitor response protein, putative; protein id:
  misc_feature (38)..(319): Homolog of NCBI NO: 26451702 NR Description: unknown protein [Arabidopsis thaliana]
  misc_feature (1)..(315): Homolog of NCBI NO: 15224704 NR Description: unknown protein; protein id: At2g25300.1
  misc_feature (1)..(319): Homolog of NCBI NO: 15236681 NR Description: putative protein
  misc_feature (1)..(319): Homolog of NCBI NO: 34898462 NR Description: ESTs D47620(S13223),AU029621(E31157) correspond a region of the predicted gene.~Similar to Arabidopsis thaliana
  misc_feature (1)..(311): Homolog of NCBI NO: 9759181 NR Description: Avr9 elicitor response protein-like [Arabidopsis
  misc_feature (1)..(321): Homolog of NCBI NO: 18423501 NR Description: Avr9 elicitor response protein-like
  misc_feature (1)..(320): Homolog of NCBI NO: 20372915 NR Description: beta 1,3-glycosyltransferase-like protein I
  misc_feature (1)..(319): Homolog of NCBI NO: 22553068 NR Description: beta 1,3-glycosyltransferase-like protein I
  misc_feature (1)..(321): Homolog of NCBI NO: 40253477 NR Description: putative Avr9 elicitor response protein
MMLAMFATMASFYVAGRLWQDAQNRLHLIKELDRRTGQGQSAISVDDTLKVVACRQQGKRLASLEMELAAAKHKGFVGKYTPETNGTHSGKKPLIVIGIMSSFGRKNYRDAVRKSWLPTGSMLKKLEEEKGIVVRFVVGRSANRGDTFDREIDDENRSTKDFLILDDHIESDEELPKKTKSFFANAAETFNAAFYAKVNDDIYINVDTLSAMLETHWDRPRVYIGCMKSGEVFSDLTHKWYESDWWKFGDGKSYFRHASGEMFVISRAIAQFISINKSALRTYAHDDVSIGSWMIGLAVNHVNEAKLCCSSWPSGALCSAL

SEQ ID NO: 3106 - DNA, 1506 bp, Zea mays subsp. mays
  misc_feature (1)..(1506): Ceres Seq. ID no. 12410412
  misc_feature: MA Experiment ID: 108522 Result: Up-regulated in Transcription
  misc_feature: MA Experiment 108522 PARAMETER Experiment Name: Zm_42deg_Heat_P Parameter: Age (day) Value: 8
  misc_feature: MA Experiment 108522 PARAMETER Experiment Name: Zm_42deg_Heat_P Parameter: Organism Value: Zea mays
  misc_feature: MA Experiment 108522 PARAMETER Experiment Name: Zm_42deg_Heat_P Parameter: Plant Line Value: 35A19
  misc_feature: MA Experiment 108522 PARAMETER Experiment Name: Zm_42deg_Heat_P Parameter: Temperature (deg C) Value: 42 vs. 22
  misc_feature: MA Experiment 108522 PARAMETER Experiment Name: Zm_42deg_Heat_P Parameter: Timepoint (hr) Value: 1
  misc_feature: MA Experiment 108522 PARAMETER Experiment Name: Zm_42deg_Heat_P Parameter: Tissue Value: Aerial
cccggctcggctcggctcggcacaggatccggccggccttttcactcaactcgcttcagcagctcagcctccaaccaaccgagagaagccagagaaaaggttactccacagaaagcaaaaccctagcccactccggcgcgccaccggccgatggtttcgatgagcaccacgccgaagccgcttgactccgccgtcgtcagcgcagccgttgacggcggggatgagggtggtggtggaggcggtggcgggaagaagcaggcgcacggggcggtgatggcgccgccaccgatggtggtcccggccgcggcgcccgcggccgaggaggaggttcggaaggtcaggaagccgtacaccatcaccaagtcgcgggagagctggacggagccggagcacgacaagttcctcgaggccctgcagctttttgatcgtgattggaagaaaattgaagcatatgttggctcaaagactgttatacagataaggagccatgcacagaagtacttcctgaaggttcagaagaatggtacgggcgagcatctgcccccacccaggccaaaacgaaaggcagctcatccatatccacagaaggcatctaaaaatgctcctgcagtttctcaagctattttatcacaagaacaacctacccagagggagcaaggttctgtcatgcctatggatactgctactgtgagaaacacaaatgcgaatgtggcggtgccttcctgggacaatactcttgctcaacctttcagcgctggtcatgttcaaggtgcagctgcaacaaataactgttcaagtagcatggagagtccatctggtacttggccaacttctgaagcagtcgagcaagaaaatatggttccaccactccgtgccatgccagattttgcccaagtatacaacttcctgggaagcatatttgatccggatacaagtgggcatttgcagatgttaaaagcgatggatccagttgatattgaaacggcactactacttatgaggaatctttccatgaaccttaggagtcccgactttgagcaacatcggaggttgctatcatcatatagctatggtggcgcggaccatgtcaaatctgaagccatggaaaatcttggatctcctcagagtggccatcttccatccctggtaacaagcgaatgagagcacacttccaatttgcggtcggagctttggttgtttacacgggacattcctgtgcgctcccagcaatggagttgtggagacggctggtctgtttatgaatgctagagacgtatcgtggcagtaacatctgtatagcttccaataaatggtctgaccctaggcaagttttgctttttcgcgtacgtgtagatagccagttttgtgtgctcatgcaattttttcctgggtggggcctagatcgtatgtttttttatatacacactattggacgcgtgatgtaaatatgtgcaatctttgtaatgcttgaggtactataattatataatggatatgttatgatcg

SEQ ID NO: 3107 - protein, 336 aa, Zea mays subsp. mays
  peptide (1)..(336): Ceres Seq. ID no. 12410413
  misc_feature (73)..(118): Pfam Name: Myb-like DNA-binding domain Pfam Description: Myb-like DNA-binding domain
  misc_feature (51)..(193): Homolog of NCBI NO: 11357907 NR Description: hypothetical protein F9G14.150 - Arabidopsis
  misc_feature (51)..(315): Homolog of NCBI NO: 14596213 NR Description: putative protein [Arabidopsis thaliana]
  misc_feature (56)..(306): Homolog of NCBI NO: 15234118 NR Description: myb family transcription factor; protein id:
  misc_feature (57)..(306): Homolog of NCBI NO: 25517982 NR Description: F22L4.6 protein - Arabidopsis thaliana
  misc_feature (51)..(315): Homolog of NCBI NO: 18414039 NR Description: myb family transcription factor
  misc_feature (57)..(306): Homolog of NCBI NO: 15223419 NR Description: myb family transcription factor; protein id:
  misc_feature (43)..(305): Homolog of NCBI NO: 30680926 NR Description: myb family transcription factor [Arabidopsis
  misc_feature (49)..(302): Homolog of NCBI NO: 8953721 NR Description: contains similarity to MYB-related DNA-binding
  misc_feature (49)..(312): Homolog of NCBI NO: 30696225 NR Description: myb family transcription factor [Arabidopsis
  misc_feature (49)..(312): Homolog of NCBI NO: 30696221 NR Description: myb family transcription factor [Arabidopsis
MVSMSTTPKPLDSAVVSAAVDGGDEGGGGGGGGKKQAHGAVMAPPPMVVPAAAPAAEEEVRKVRKPYTITKSRESWTEPEHDKFLEALQLFDRDWKKIEAYVGSKTVIQIRSHAQKYFLKVQKNGTGEHLPPPRPKRKAAHPYPQKASKNAPAVSQAILSQEQPTQREQGSVMPMDTATVRNTNANVAVPSWDNTLAQPFSAGHVQGAAATNNCSSSMESPSGTWPTSEAVEQENMVPPLRAMPDFAQVYNFLGSIFDPDTSGHLQMLKAMDPVDIETALLLMRNLSMNLRSPDFEQHRRLLSSYSYGGADHVKSEAMENLGSPQSGHLPSLVTSE

SEQ ID NO: 3108 - protein, 333 aa, Zea mays subsp. mays
  peptide (1)..(333): Ceres Seq. ID no. 12410414
  misc_feature (70)..(115): Pfam Name: Myb-like DNA-binding domain Pfam Description: Myb-like DNA-binding domain
  misc_feature (48)..(190): Homolog of NCBI NO: 11357907 NR Description: hypothetical protein F9G14.150 - Arabidopsis
  misc_feature (48)..(312): Homolog of NCBI NO: 14596213 NR Description: putative protein [Arabidopsis thaliana]
  misc_feature (53)..(303): Homolog of NCBI NO: 15234118 NR Description: myb family transcription factor; protein id:
  misc_feature (54)..(303): Homolog of NCBI NO: 25517982 NR Description: F22L4.6 protein - Arabidopsis thaliana
  misc_feature (48)..(312): Homolog of NCBI NO: 18414039 NR Description: myb family transcription factor
  misc_feature (54)..(303): Homolog of NCBI NO: 15223419 NR Description: myb family transcription factor; protein id:
  misc_feature (40)..(302): Homolog of NCBI NO: 30680926 NR Description: myb family transcription factor [Arabidopsis
  misc_feature (46)..(299): Homolog of NCBI NO: 8953721 NR Description: contains similarity to MYB-related DNA-binding
  misc_feature (46)..(309): Homolog of NCBI NO: 30696225 NR Description: myb family transcription factor [Arabidopsis
  misc_feature (46)..(309): Homolog of NCBI NO: 30696221 NR Description: myb family transcription factor [Arabidopsis
MSTTPKPLDSAVVSAAVDGGDEGGGGGGGGKKQAHGAVMAPPPMVVPAAAPAAEEEVRKVRKPYTITKSRESWTEPEHDKFLEALQLFDRDWKKIEAYVGSKTVIQIRSHAQKYFLKVQKNGTGEHLPPPRPKRKAAHPYPQKASKNAPAVSQAILSQEQPTQREQGSVMPMDTATVRNTNANVAVPSWDNTLAQPFSAGHVQGAAATNNCSSSMESPSGTWPTSEAVEQENMVPPLRAMPDFAQVYNFLGSIFDPDTSGHLQMLKAMDPVDIETALLLMRNLSMNLRSPDFEQHRRLLSSYSYGGADHVKSEAMENLGSPQSGHLPSLVTSE

SEQ ID NO: 3109 - protein, 295 aa, Zea mays subsp. mays
  peptide (1)..(295): Ceres Seq. ID no. 12410415
  misc_feature (32)..(77): Pfam Name: Myb-like DNA-binding domain Pfam Description: Myb-like DNA-binding domain
  misc_feature (8)..(271): Homolog of NCBI NO: 30696225 NR Description: myb family transcription factor [Arabidopsis
  misc_feature (8)..(271): Homolog of NCBI NO: 30696221 NR Description: myb family transcription factor [Arabidopsis
  misc_feature (10)..(152): Homolog of NCBI NO: 11357907 NR Description: hypothetical protein F9G14.150 - Arabidopsis
  misc_feature (10)..(274): Homolog of NCBI NO: 14596213 NR Description: putative protein [Arabidopsis thaliana]
  misc_feature (15)..(265): Homolog of NCBI NO: 15234118 NR Description: myb family transcription factor; protein id:
  misc_feature (16)..(265): Homolog of NCBI NO: 25517982 NR Description: F22L4.6 protein - Arabidopsis thaliana
  misc_feature (10)..(274): Homolog of NCBI NO: 18414039 NR Description: myb family transcription factor
  misc_feature (16)..(265): Homolog of NCBI NO: 15223419 NR Description: myb family transcription factor; protein id:
  misc_feature (2)..(264): Homolog of NCBI NO: 30680926 NR Description: myb family transcription factor [Arabidopsis
  misc_feature (8)..(261): Homolog of NCBI NO: 8953721 NR Description: contains similarity to MYB-related DNA-binding
MAPPPMVVPAAAPAAEEEVRKVRKPYTITKSRESWTEPEHDKFLEALQLFDRDWKKIEAYVGSKTVIQIRSHAQKYFLKVQKNGTGEHLPPPRPKRKAAHPYPQKASKNAPAVSQAILSQEQPTQREQGSVMPMDTATVRNTNANVAVPSWDNTLAQPFSAGHVQGAAATNNCSSSMESPSGTWPTSEAVEQENMVPPLRAMPDFAQVYNFLGSIFDPDTSGHLQMLKAMDPVDIETALLLMRNLSMNLRSPDFEQHRRLLSSYSYGGADHVKSEAMENLGSPQSGHLPSLVTSE

SEQ ID NO: 3110 - DNA, 1505 bp, Zea mays subsp. mays
  misc_feature (1)..(1505): Ceres Seq. ID no. 12347490
  misc_feature: MA Experiment ID: 108527 Result: Down-regulated in Transcription
  misc_feature: MA Experiment 108527 PARAMETER Experiment Name: Zm_5mM_NO_P Parameter: Age (day) Value: 8
  misc_feature: MA Experiment 108527 PARAMETER Experiment Name: Zm_5mM_NO_P Parameter: Organism Value: Zea mays
  misc_feature: MA Experiment 108527 PARAMETER Experiment Name: Zm_5mM_NO_P Parameter: Plant Line Value: 35A19
  misc_feature: MA Experiment 108527 PARAMETER Experiment Name: Zm_5mM_NO_P Parameter: Timepoint (hr) Value: 6
  misc_feature: MA Experiment 108527 PARAMETER Experiment Name: Zm_5mM_NO_P Parameter: Tissue Value: Aerial
  misc_feature: MA Experiment 108527 PARAMETER Experiment Name: Zm_5mM_NO_P Parameter: Treatment Value: 5mM NO vs. No Treatment
  misc_feature: MA Experiment ID: 108544 Result: Up-regulated in Transcription
gatatcttttttccatatgcttcactggacatctgcttattactcaggatgggtggttagcacatccctagctggtgcaacactaggttcctttaccgggggatctttggcagataaatttgggcggacaagaacattcatcctggatgcagccccactggctgtaggtgcattcttgagcgcaacagctcaagatatccgcaccatgattattggtcggttgcttgctggaattggtattgggatctcatctgcacttgtacccctttacatatctgagatatcaccaactgaaattcgtggaacacttggttctgttaatcaactttttatctgcattggaattcttgcagctttgttagctggattgcctttggcaggaaatcctgcctggtggaggacaatgtttggaattgctgtagttccatccattttgctggctgtaggaatggccttttcgcctgaaagccctcgatggctattccagcaaggaaaggttattcaagcagaatcagctgtaaaaagactatatggaaaagaaatggttaccgaaattatgtatgatctgagagctagtggccaaagttcttctgagaccgaagctggctggttggatcttttcagcaagcgttactggaaagttgtgagtgtgggggcagcactgtttttgttccagcagcttgctggtataaacgctgttgtatattactctacatcggtgttccgtaatgcaggcattacatctgatgttgctgctagtgctcttgttggagcagccaatgtttttggcaccatggttgcatcttctctaatggacaagaaaggaaggaaaagccttctgatgacaagcttttctggaatgggtgcttcaatgctactcctagcattgtccttcacctggaaagctctggcaccttattctggtactcttgctgttgttggcactgttctgtatgtgctgtcttttgctctaggagctggtcctgttcctgccctgcttcttcctgaaatatttgcctccagaataagggccaaggctgttgcattatctctaggcatgcactgggtatccaacttttttattggcctgtacttcttgagtgtcgtcaacaagttcgggatcagcaatgtatatttgggatttgcatcagtgtgcgtccttgcagttctctacatagctgggaatgtggtcgagaccaaggggcgatcacttgaagagattgaacgggaactaagtgtagcagaatgatgtgcttttgctagtcatgctgcggcgccgttttggtgattttgagaatgcaaccaagcacacaaccgagcatccttggacctggagactttctagtttcatgtagcagttaccgatcagattcagaaacaatgaactcgtcgatgtttctggagataagttttcgttttttgttctaaaatttcttgtttctcttgtataggagactttgagatagtttcagctctaaagacgtgaatatggagcagctccgctg

SEQ ID NO: 3111 - protein, 415 aa, Zea mays subsp. mays
  peptide (1)..(415): Ceres Seq. ID no. 12347491
  misc_feature (11)..(411): Pfam Name: Sugar (and other) transporter Pfam Description: Sugar (and other) transporter
  misc_feature (16)..(414): Homolog of NCBI NO: 8347246 NR Description: hexose transporter [Solanum tuberosum]
  misc_feature (11)..(414): Homolog of NCBI NO: 2688830 NR Description: putative sugar transporter [Prunus armeniaca]
  misc_feature (16)..(414): Homolog of NCBI NO: 9858106 NR Description: putative glucose translocator [Mesembryanthemum
  misc_feature (16)..(414): Homolog of NCBI NO: 8347242 NR Description: hexose transporter [Spinacia oleracea]
  misc_feature (16)..(414): Homolog of NCBI NO: 8347250 NR Description: hexose transporter [Arabidopsis thaliana]
  misc_feature (16)..(412): Homolog of NCBI NO: 18417892 NR Description: sugar transporter-like protein
  misc_feature (16)..(414): Homolog of NCBI NO: 8347244 NR Description: hexose transporter [Nicotiana tabacum]
  misc_feature (4)..(412): Homolog of NCBI NO: 11278994 NR Description: sugar transporter-like protein - Arabidopsis
  misc_feature (11)..(414): Homolog of NCBI NO: 15625046 NR Description: hexose transporter pGlT [Olea europaea]
  misc_feature (11)..(415): Homolog of NCBI NO: 8347248 NR Description: hexose transporter [Zea mays]
ISFFHMLHWTSAYYSGWVVSTSLAGATLGSFTGGSLADKFGRTRTFILDAAPLAVGAFLSATAQDIRTMIIGRLLAGIGIGISSALVPLYISEISPTEIRGTLGSVNQLFICIGILAALLAGLPLAGNPAWWRTMFGIAVVPSILLAVGMAFSPESPRWLFQQGKVIQAESAVKRLYGKEMVTEIMYDLRASGQSSSETEAGWLDLFSKRYWKVVSVGAALFLFQQLAGINAVVYYSTSVFRNAGITSDVAASALVGAANVFGTMVASSLMDKKGRKSLLMTSFSGMGASMLLLALSFTWKALAPYSGTLAVVGTVLYVLSFALGAGPVPALLLPEIFASRIRAKAVALSLGMHWVSNFFIGLYFLSVVNKFGISNVYLGFASVCVLAVLYIAGNVVETKGRSLEEIERELSVAE

SEQ ID NO: 3112 - protein, 410 aa, Zea mays subsp. mays
  peptide (1)..(410): Ceres Seq. ID no. 12347492
  misc_feature (6)..(406): Pfam Name: Sugar (and other) transporter Pfam Description: Sugar (and other) transporter
  misc_feature (11)..(409): Homolog of NCBI NO: 8347246 NR Description: hexose transporter [Solanum tuberosum]
  misc_feature (6)..(409): Homolog of NCBI NO: 2688830 NR Description: putative sugar transporter [Prunus armeniaca]
  misc_feature (11)..(409): Homolog of NCBI NO: 9858106 NR Description: putative glucose translocator [Mesembryanthemum
  misc_feature (11)..(409): Homolog of NCBI NO: 8347242 NR Description: hexose transporter [Spinacia oleracea]
  misc_feature (11)..(409): Homolog of NCBI NO: 8347250 NR Description: hexose transporter [Arabidopsis thaliana]
  misc_feature (11)..(407): Homolog of NCBI NO: 18417892 NR Description: sugar transporter-like protein
  misc_feature (11)..(409): Homolog of NCBI NO: 8347244 NR Description: hexose transporter [Nicotiana tabacum]
  misc_feature (1)..(407): Homolog of NCBI NO: 11278994 NR Description: sugar transporter-like protein - Arabidopsis
  misc_feature (6)..(409): Homolog of NCBI NO: 15625046 NR Description: hexose transporter pGlT [Olea europaea]
  misc_feature (6)..(410): Homolog of NCBI NO: 8347248 NR Description: hexose transporter [Zea mays]
MLHWTSAYYSGWVVSTSLAGATLGSFTGGSLADKFGRTRTFILDAAPLAVGAFLSATAQDIRTMIIGRLLAGIGIGISSALVPLYISEISPTEIRGTLGSVNQLFICIGILAALLAGLPLAGNPAWWRTMFGIAVVPSILLAVGMAFSPESPRWLFQQGKVIQAESAVKRLYGKEMVTEIMYDLRASGQSSSETEAGWLDLFSKRYWKVVSVGAALFLFQQLAGINAVVYYSTSVFRNAGITSDVAASALVGAANVFGTMVASSLMDKKGRKSLLMTSFSGMGASMLLLALSFTWKALAPYSGTLAVVGTVLYVLSFALGAGPVPALLLPEIFASRIRAKAVALSLGMHWVSNFFIGLYFLSVVNKFGISNVYLGFASVCVLAVLYIAGNVVETKGRSLEEIERELSVAE

SEQ ID NO: 3113 - protein, 347 aa, Zea mays subsp. mays
  peptide (1)..(347): Ceres Seq. ID no. 12347493
  misc_feature (1)..(343): Pfam Name: Sugar (and other) transporter Pfam Description: Sugar (and other) transporter
  misc_feature (1)..(346): Homolog of NCBI NO: 8347246 NR Description: hexose transporter [Solanum tuberosum]
  misc_feature (1)..(346): Homolog of NCBI NO: 2688830 NR Description: putative sugar transporter [Prunus armeniaca]
  misc_feature (1)..(346): Homolog of NCBI NO: 9858106 NR Description: putative glucose translocator [Mesembryanthemum
  misc_feature (1)..(346): Homolog of NCBI NO: 8347242 NR Description: hexose transporter [Spinacia oleracea]
  misc_feature (1)..(346): Homolog of NCBI NO: 8347250 NR Description: hexose transporter [Arabidopsis thaliana]
  misc_feature (1)..(344): Homolog of NCBI NO: 18417892 NR Description: sugar transporter-like protein
  misc_feature (1)..(346): Homolog of NCBI NO: 8347244 NR Description: hexose transporter [Nicotiana tabacum]
  misc_feature (1)..(344): Homolog of NCBI NO: 11278994 NR Description: sugar transporter-like protein - Arabidopsis
  misc_feature (1)..(346): Homolog of NCBI NO: 15625046 NR Description: hexose transporter pGlT [Olea europaea]
  misc_feature (1)..(347): Homolog of NCBI NO: 8347248 NR Description: hexose transporter [Zea mays]
MIIGRLLAGIGIGISSALVPLYISEISPTEIRGTLGSVNQLFICIGILAALLAGLPLAGNPAWWRTMFGIAVVPSILLAVGMAFSPESPRWLFQQGKVIQAESAVKRLYGKEMVTEIMYDLRASGQSSSETEAGWLDLFSKRYWKVVSVGAALFLFQQLAGINAVVYYSTSVFRNAGITSDVAASALVGAANVFGTMVASSLMDKKGRKSLLMTSFSGMGASMLLLALSFTWKALAPYSGTLAVVGTVLYVLSFALGAGPVPALLLPEIFASRIRAKAVALSLGMHWVSNFFIGLYFLSVVNKFGISNVYLGFASVCVLAVLYIAGNVVETKGRSLEEIERELSVAE

SEQ ID NO: 3114 - DNA, 1775 bp, Zea mays subsp. mays
  misc_feature (1)..(1775): Ceres Seq. ID no. 12410409
  misc_feature: MA Experiment ID: 108523 Result: Up-regulated in Transcription
  misc_feature: MA Experiment 108523 PARAMETER Experiment Name: Zm_42deg_Heat_P Parameter: Age (day) Value: 8
  misc_feature: MA Experiment 108523 PARAMETER Experiment Name: Zm_42deg_Heat_P Parameter: Organism Value: Zea mays
  misc_feature: MA Experiment 108523 PARAMETER Experiment Name: Zm_42deg_Heat_P Parameter: Plant Line Value: 35A19
  misc_feature: MA Experiment 108523 PARAMETER Experiment Name: Zm_42deg_Heat_P Parameter: Temperature (deg C) Value: 42 vs. 22
  misc_feature: MA Experiment 108523 PARAMETER Experiment Name: Zm_42deg_Heat_P Parameter: Timepoint (hr) Value: 6
  misc_feature: MA Experiment 108523 PARAMETER Experiment Name: Zm_42deg_Heat_P Parameter: Tissue Value: Aerial
  misc_feature: MA Experiment ID: 108543 Result: Down-regulated in Transcription
  misc_feature: MA Experiment ID: 20000477 Result: Up-regulated in Transcription
  misc_feature: MA Experiment 20000477 PARAMETER Experiment Name: Zm_5mM_SA_P Parameter: Age (day) Value: 10
  misc_feature: MA Experiment 20000477 PARAMETER Experiment Name: Zm_5mM_SA_P Parameter: Organism Value: Zea mays
  misc_feature: MA Experiment 20000477 PARAMETER Experiment Name: Zm_5mM_SA_P Parameter: Plant Line Value: 35A19
  misc_feature: MA Experiment 20000477 PARAMETER Experiment Name: Zm_5mM_SA_P Parameter: Timepoint (hr) Value: 48
  misc_feature: MA Experiment 20000477 PARAMETER Experiment Name: Zm_5mM_SA_P Parameter: Tissue Value: Aerial
  misc_feature: MA Experiment 20000477 PARAMETER Experiment Name: Zm_5mM_SA_P Parameter: Treatment Value: 5mM SA vs. No Treatment
  misc_feature: MA Experiment ID: 20000478 Result: Up-regulated in Transcription
  misc_feature: MA Experiment 20000478 PARAMETER Experiment Name: Zm_5mM_SA_P Parameter: Age (day) Value: 11
  misc_feature: MA Experiment 20000478 PARAMETER Experiment Name: Zm_5mM_SA_P Parameter: Organism Value: Zea mays
  misc_feature: MA Experiment 20000478 PARAMETER Experiment Name: Zm_5mM_SA_P Parameter: Plant Line Value: 35A19
  misc_feature: MA Experiment 20000478 PARAMETER Experiment Name: Zm_5mM_SA_P Parameter: Timepoint (hr) Value: 72
  misc_feature: MA Experiment 20000478 PARAMETER Experiment Name: Zm_5mM_SA_P Parameter: Tissue Value: Aerial
  misc_feature: MA Experiment 20000478 PARAMETER Experiment Name: Zm_5mM_SA_P Parameter: Treatment Value: 5mM SA vs. No Treatment
aatccctccctccctcatcgcgttttattattcccgtccttcttcattcggcccttcgccgctgctatatttcgcggccgccttgcctcctaataatagccgccgcggcagtggataccgccaccgccatgggagcgctcgaggaggcccacctcgcggccgccgcgtgcgcgtgcgaggaggaggaggaaagcgactacatcggcctcctcgcaggggaagcggcggcgggcgacgccgtggagccggccgtgcgcgccctgctgctggggctcggtgaggacgaccgccgcgagggcctgctccggacgcccaagcgcgtcgccaaggccttccgcgacggcacccgaggctacaggcaaaaagtaaaagacatagtgcaaggtgctctgtttccagaggttggtgtggataaaaggactggatctgctggtggaactggcgggcaagtagttgttcgagacattgaacttttctcctattgtgagtcatgcttgcttccattcagcatacagtgccatgtcgggtatgttccctcaggtggaagagtggttgggttaagcaagctttctagagtatctgatgtctttgccaagagattgcaaaaccctcaaagactagctaatgaaatctgtggtgcactgcatgctagcattcaacctgccggcgtggctgttgctctgcagtgctggcacattcctttaccagaaaacttggaatgcaagactttggaaggttggattagaacttcacattcatctcgctctggagtctttgaaggtgaaagcagcactttctggactgacttcttggctcttgttaagcttaggggcatagacgtggaggctaaggaccatactgtttctattccttggtgccctttaaggtctcatgaggttctactctctaacgggctctgcaagaaaaactcaactaatggcatggtttctgctgttacctcgatgctcttatcactcggagaggaccccctcaggaaagagcttttaggcactcctcagcgttatgtgcagtggctgatgaagttcaaagcatgtaatctactagacgtgaagctgaatggttttacacttagtaatgttagcttatatgagaggctaggtggaggcacaactgatcatggagcaatccgatcggagctgcacttgccattttgtgctcaatgtgaacaccatcttctgcccttctacggagtagttcacattgggtactttgacaatggaagcggagaaggcattgatcggtcgcattttcaggcgttggttcatttctacgggtgcaagcttcaggttcaagaaaggatgacaaggcagatagctgaagcggtttattcggtttcgcaccatggggccatggtcgttgttgaggccaaccacatttgcatgatctcaagggggatagagaaaataaggagcaacacggcaacaattgcagttttgggccagtttttggccgacccttctgccaaggcgtgcttcttacaaaatgttttggattctgttggttctgcggtatgaatcgtatcgcaagcagcaaaggaaaaaaatgtctagttgggagtcactatccagcaattgaaatttttagcaatctacttgtctagcatgattcttctcgggtgcaaatttgtcacctgtgggactgtaccgaggatgtcacaagaaagcaccaaaagggttttggttctctcgtgttgtaccatgtcacttgtaaggcacttcaaataaaaaagaaatagtaatagttacaactgtgcc

SEQ ID NO: 3115 - protein, 510 aa, Zea mays subsp. mays
  peptide (1)..(510): Ceres Seq. ID no. 12410410
  misc_feature (79)..(273): Homolog of NCBI NO: 13699226 NR Description: GTP cyclohydrolase I [Physarum polycephalum]
  misc_feature (73)..(274): Homolog of NCBI NO: 22002492 NR Description: Gch1 [Synechococcus sp. PCC 7942]
  misc_feature (73)..(274): Homolog of NCBI NO: 23831177 NR Description: GTP cyclohydrolase I (GTP-CH-I)
  misc_feature (73)..(274): Homolog of NCBI NO: 1399847 NR Description: GTP cyclohydrolase I [Synechococcus sp. PCC 7942]
  misc_feature (71)..(273): Homolog of NCBI NO: 37521149 NR Description: GTP cyclohydrolase I [Gloeobacter violaceus]
  misc_feature (79)..(502): Homolog of NCBI NO: 19909132 NR Description: GTP cyclohydrolase I [Arabidopsis thaliana]
  misc_feature (79)..(502): Homolog of NCBI NO: 15231435 NR Description: GTP cyclohydrolase I
  misc_feature (43)..(509): Homolog of NCBI NO: 17979018 NR Description: GTP cyclohydrolase I [Lycopersicon esculentum]
  misc_feature (80)..(100): Homolog of NCBI NO: 38346071 NR Description: OSJNBa0084K01.11 [Oryza sativa (japonica
  misc_feature (116)..(510): Homolog of NCBI NO: 38346071 NR Description: OSJNBa0084K01.11 [Oryza sativa (japonica
SLPPSSRFIIPVLLHSALRRCYISRPPCLLIIAAAAVDTATAMGALEEAHLAAAACACEEEEESDYIGLLAGEAAAGDAVEPAVRALLLGLGEDDRREGLLRTPKRVAKAFRDGTRGYRQKVKDIVQGALFPEVGVDKRTGSAGGTGGQVVVRDIELFSYCESCLLPFSIQCHVGYVPSGGRVVGLSKLSRVSDVFAKRLQNPQRLANEICGALHASIQPAGVAVALQCWHIPLPENLECKTLEGWIRTSHSSRSGVFEGESSTFWTDFLALVKLRGIDVEAKDHTVSIPWCPLRSHEVLLSNGLCKKNSTNGMVSAVTSMLLSLGEDPLRKELLGTPQRYVQWLMKFKACNLLDVKLNGFTLSNVSLYERLGGGTTDHGAIRSELHLPFCAQCEHHLLPFYGVVHIGYFDNGSGEGIDRSHFQALVHFYGCKLQVQERMTRQIAEAVYSVSHHGAMVVVEANHICMISRGIEKIRSNTATIAVLGQFLADPSAKACFLQNVLDSVGSAV

SEQ ID NO: 3116 - protein, 468 aa, Zea mays subsp. mays
  peptide (1)..(468): Ceres Seq. ID no. 12410411
  misc_feature (37)..(231): Homolog of NCBI NO: 13699226 NR Description: GTP cyclohydrolase I [Physarum polycephalum]
  misc_feature (31)..(232): Homolog of NCBI NO: 22002492 NR Description: Gch1 [Synechococcus sp. PCC 7942]
  misc_feature (31)..(232): Homolog of NCBI NO: 23831177 NR Description: GTP cyclohydrolase I (GTP-CH-I)
  misc_feature (31)..(232): Homolog of NCBI NO: 1399847 NR Description: GTP cyclohydrolase I [Synechococcus sp. PCC 7942]
  misc_feature (29)..(231): Homolog of NCBI NO: 37521149 NR Description: GTP cyclohydrolase I [Gloeobacter violaceus]
  misc_feature (37)..(460): Homolog of NCBI NO: 19909132 NR Description: GTP cyclohydrolase I [Arabidopsis thaliana]
  misc_feature (37)..(460): Homolog of NCBI NO: 15231435 NR Description: GTP cyclohydrolase I
  misc_feature (1)..(467): Homolog of NCBI NO: 17979018 NR Description: GTP cyclohydrolase I [Lycopersicon esculentum]
  misc_feature (38)..(58): Homolog of NCBI NO: 38346071 NR Description: OSJNBa0084K01.11 [Oryza sativa (japonica
  misc_feature (74)..(468): Homolog of NCBI NO: 38346071 NR Description: OSJNBa0084K01.11 [Oryza sativa (japonica
MGALEEAHLAAAACACEEEEESDYIGLLAGEAAAGDAVEPAVRALLLGLGEDDRREGLLRTPKRVAKAFRDGTRGYRQKVKDIVQGALFPEVGVDKRTGSAGGTGGQVVVRDIELFSYCESCLLPFSIQCHVGYVPSGGRVVGLSKLSRVSDVFAKRLQNPQRLANEICGALHASIQPAGVAVALQCWHIPLPENLECKTLEGWIRTSHSSRSGVFEGESSTFWTDFLALVKLRGIDVEAKDHTVSIPWCPLRSHEVLLSNGLCKKNSTNGMVSAVTSMLLSLGEDPLRKELLGTPQRYVQWLMKFKACNLLDVKLNGFTLSNVSLYERLGGGTTDHGAIRSELHLPFCAQCEHHLLPFYGVVHIGYFDNGSGEGIDRSHFQALVHFYGCKLQVQERMTRQIAEAVYSVSHHGAMVVVEANHICMISRGIEKIRSNTATIAVLGQFLADPSAKACFLQNVLDSVGSAV

SEQ ID NO: 3117 - DNA, 1255 bp, Zea mays subsp. mays
  misc_feature (1)..(1255): Ceres Seq. ID no. 12358141
  misc_feature: MA Experiment ID: 108544 Result: Up-regulated in Transcription
gcaaaaatctcctctctcgcttcatttcttttttctttccatcgaattcctcgtcaccaacacgcacgcggcctctgcctccgcgatccgcgtctccatcctgaggctccgaatcgatctcccttcctcaccaaaccggagcacttcggaggccggacccggcgagaagcgaccgaccgcagccagctcacgtctccctcttcatccaccatgctgagggtcgcgggcaggcgcctctcgtccgctctcgcctggcgccccgccgccgccgcctcaggctcccggggccctctcgccggtacactacccggccgcgacgacgacgacacacgcgactgcagggcgcgtttcgccatcgaatctcccttcttcgccgctgccagagggttttctgcagagactcttgctccaagaaaccaggatgtgggcttatccgagctcccagcaactgtggcagctgtgaagaatccaagtggaaaaatcgtgtatgatgagtataaccatgagcgctacccgcctggagaccccagcaagcgtgcatttgcctactttgtgctgagtggtgggaggttcatttacgcatctttgctgcgacttctcgtcttaaaatttgtcctgagcatgtcagcaagtaaggatgttctcgcgcttgcctcacttgaggttgacctctcaagcattgagcctggaaccacggtgacggtgaagtggcgtggcaagccggtcttcataaggcggaggacagaggatgatatcaagttggccaacagtgttgacgtcgcatccctccgccacccagagcaggatgcagagcgtgtcaagaaccccgaatggctggtcgtcattggggtctgcactcacctgggctgcatcccgctccctaatgcaggagactttggtggctggttctgcccgtgccacggctcgcactacgacatttctggtaggatccgcaagggcccggcacccttcaacctggaagtgccgacatacagcttcttggaagagaacaagcttctcatcggctgagattgctgttagtgttgttcgtgtggccctgtcgtttttgtttgatcaacaacttcaccttttctcttgcctgggttagggcatacctttgtgggttgtttctgagtgcagtgttgttgctagcacctgacagtaatgaataacctgctgctacataaaggatactgttaattgttgtcaaatttggttctgtttttttcctgacagcaatgaacaaacttctgct

SEQ ID NO: 3118 - protein, 342 aa, Zea mays subsp. mays
  peptide (1)..(342): Ceres Seq. ID no. 12358142
  misc_feature (242)..(338): Pfam Name: Rieske [2Fe-2S] domain Pfam Description: Rieske [2Fe-2S] domain
  misc_feature (71)..(342): Homolog of NCBI NO: 21553507 NR Description: ubiquinol--cytochrome-c reductase-like protein
  misc_feature (71)..(342): Homolog of NCBI NO: 18417067 NR Description: ubiquinol--cytochrome-c reductase - like protein
  misc_feature (85)..(342): Homolog of NCBI NO: 1717949 NR Description: Ubiquinol-cytochrome C reductase iron-sulfur
  misc_feature (71)..(342): Homolog of NCBI NO: 586145 NR Description: Ubiquinol-cytochrome C reductase iron-sulfur
  misc_feature (71)..(342): Homolog of NCBI NO: 1076675 NR Description: ubiquinol-cytochrome-c reductase (EC 1.10.2.2)
  misc_feature (71)..(342): Homolog of NCBI NO: 1717950 NR Description: Ubiquinol-cytochrome C reductase iron-sulfur
  misc_feature (71)..(342): Homolog of NCBI NO: 1717953 NR Description: Ubiquinol-cytochrome C reductase iron-sulfur
  misc_feature (71)..(342): Homolog of NCBI NO: 1717951 NR Description: Ubiquinol-cytochrome C reductase iron-sulfur
  misc_feature (71)..(342): Homolog of NCBI NO: 38347166 NR Description: OSJNBa0039C07.12 [Oryza sativa (japonica
  misc_feature (71)..(342): Homolog of NCBI NO: 1717957 NR Description: Ubiquinol-cytochrome C reductase iron-sulfur
AKISSLASFLFSFHRIPRHQHARGLCLRDPRLHPEAPNRSPFLTKPEHFGGRTRREATDRSQLTSPSSSTMLRVAGRRLSSALAWRPAAAASGSRGPLAGTLPGRDDDDTRDCRARFAIESPFFAAARGFSAETLAPRNQDVGLSELPATVAAVKNPSGKIVYDEYNHERYPPGDPSKRAFAYFVLSGGRFIYASLLRLLVLKFVLSMSASKDVLALASLEVDLSSIEPGTTVTVKWRGKPVFIRRRTEDDIKLANSVDVASLRHPEQDAERVKNPEWLVVIGVCTHLGCIPLPNAGDFGGWFCPCHGSHYDISGRIRKGPAPFNLEVPTYSFLEENKLLIG

SEQ ID NO: 3119 - protein, 272 aa, Zea mays subsp. mays
  peptide (1)..(272): Ceres Seq. ID no. 12358143
  misc_feature (172)..(268): Pfam Name: Rieske [2Fe-2S] domain Pfam Description: Rieske [2Fe-2S] domain
  misc_feature (1)..(272): Homolog of NCBI NO: 21553507 NR Description: ubiquinol--cytochrome-c reductase-like protein
  misc_feature (1)..(272): Homolog of NCBI NO: 18417067 NR Description: ubiquinol--cytochrome-c reductase - like protein
  misc_feature (15)..(272): Homolog of NCBI NO: 1717949 NR Description: Ubiquinol-cytochrome C reductase iron-sulfur
  misc_feature (1)..(272): Homolog of NCBI NO: 586145 NR Description: Ubiquinol-cytochrome C reductase iron-sulfur
  misc_feature (1)..(272): Homolog of NCBI NO: 1076675 NR Description: ubiquinol-cytochrome-c reductase (EC 1.10.2.2)
  misc_feature (1)..(272): Homolog of NCBI NO: 1717950 NR Description: Ubiquinol-cytochrome C reductase iron-sulfur
  misc_feature (1)..(272): Homolog of NCBI NO: 1717953 NR Description: Ubiquinol-cytochrome C reductase iron-sulfur
  misc_feature (1)..(272): Homolog of NCBI NO: 1717951 NR Description: Ubiquinol-cytochrome C reductase iron-sulfur
  misc_feature (1)..(272): Homolog of NCBI NO: 38347166 NR Description: OSJNBa0039C07.12 [Oryza sativa (japonica
  misc_feature (1)..(272): Homolog of NCBI NO: 1717957 NR Description: Ubiquinol-cytochrome C reductase iron-sulfur
MLRVAGRRLSSALAWRPAAAASGSRGPLAGTLPGRDDDDTRDCRARFAIESPFFAAARGFSAETLAPRNQDVGLSELPATVAAVKNPSGKIVYDEYNHERYPPGDPSKRAFAYFVLSGGRFIYASLLRLLVLKFVLSMSASKDVLALASLEVDLSSIEPGTTVTVKWRGKPVFIRRRTEDDIKLANSVDVASLRHPEQDAERVKNPEWLVVIGVCTHLGCIPLPNAGDFGGWFCPCHGSHYDISGRIRKGPAPFNLEVPTYSFLEENKLLIG

SEQ ID NO: 3120 - DNA, 817 bp, Zea mays subsp. mays
  misc_feature (1)..(817): Ceres Seq. ID no. 12342710
  misc_feature: MA Experiment ID: 108504 Result: Up-regulated in Transcription
  misc_feature: MA Experiment 108504 PARAMETER Experiment Name: Zm_Drought_P Parameter: Age (day) Value: 8
  misc_feature: MA Experiment 108504 PARAMETER Experiment Name: Zm_Drought_P Parameter: Organism Value: Zea mays
  misc_feature: MA Experiment 108504 PARAMETER Experiment Name: Zm_Drought_P Parameter: Plant Line Value: 35A19
  misc_feature: MA Experiment 108504 PARAMETER Experiment Name: Zm_Drought_P Parameter: Timepoint (hr) Value: 12
  misc_feature: MA Experiment 108504 PARAMETER Experiment Name: Zm_Drought_P Parameter: Tissue Value: Aerial
  misc_feature: MA Experiment 108504 PARAMETER Experiment Name: Zm_Drought_P Parameter: Treatment Value: Drought vs. No Drought
  misc_feature: MA Experiment ID: 108523 Result: Down-regulated in Transcription
  misc_feature: MA Experiment 108523 PARAMETER Experiment Name: Zm_42deg_Heat_P Parameter: Age (day) Value: 8
  misc_feature: MA Experiment 108523 PARAMETER Experiment Name: Zm_42deg_Heat_P Parameter: Organism Value: Zea mays
  misc_feature: MA Experiment 108523 PARAMETER Experiment Name: Zm_42deg_Heat_P Parameter: Plant Line Value: 35A19
  misc_feature: MA Experiment 108523 PARAMETER Experiment Name: Zm_42deg_Heat_P Parameter: Temperature (deg C) Value: 42 vs. 22
  misc_feature: MA Experiment 108523 PARAMETER Experiment Name: Zm_42deg_Heat_P Parameter: Timepoint (hr) Value: 6
  misc_feature: MA Experiment 108523 PARAMETER Experiment Name: Zm_42deg_Heat_P Parameter: Tissue Value: Aerial
  misc_feature: MA Experiment ID: 108527 Result: Up-regulated in Transcription
  misc_feature: MA Experiment 108527 PARAMETER Experiment Name: Zm_5mM_NO_P Parameter: Age (day) Value: 8
  misc_feature: MA Experiment 108527 PARAMETER Experiment Name: Zm_5mM_NO_P Parameter: Organism Value: Zea mays
  misc_feature: MA Experiment 108527 PARAMETER Experiment Name: Zm_5mM_NO_P Parameter: Plant Line Value: 35A19
  misc_feature: MA Experiment 108527 PARAMETER Experiment Name: Zm_5mM_NO_P Parameter: Timepoint (hr) Value: 6
  misc_feature: MA Experiment 108527 PARAMETER Experiment Name: Zm_5mM_NO_P Parameter: Tissue Value: Aerial
  misc_feature: MA Experiment 108527 PARAMETER Experiment Name: Zm_5mM_NO_P Parameter: Treatment Value: 5mM NO vs. No Treatment
  misc_feature: MA Experiment ID: 108534 Result: Down-regulated in Transcription
  misc_feature: MA Experiment 108534 PARAMETER Experiment Name: Zm_4deg_Cold_P Parameter: Age (hr) Value: 8
  misc_feature: MA Experiment 108534 PARAMETER Experiment Name: Zm_4deg_Cold_P Parameter: Organism Value: Zea mays
  misc_feature: MA Experiment 108534 PARAMETER Experiment Name: Zm_4deg_Cold_P Parameter: Plant Line Value: 35A19
  misc_feature: MA Experiment 108534 PARAMETER Experiment Name: Zm_4deg_Cold_P Parameter: Temperature (deg C) Value: 4 vs. 22
  misc_feature: MA Experiment 108534 PARAMETER Experiment Name: Zm_4deg_Cold_P Parameter: Timepoint (hr) Value: 6
  misc_feature: MA Experiment 108534 PARAMETER Experiment Name: Zm_4deg_Cold_P Parameter: Tissue Value: Aerial
  misc_feature: MA Experiment ID: 108556 Result: Up-regulated in Transcription
  misc_feature: MA Experiment 108556 PARAMETER Experiment Name: Zm_Drought_P Parameter: Age (day) Value: 9
  misc_feature: MA Experiment 108556 PARAMETER Experiment Name: Zm_Drought_P Parameter: Organism Value: Zea mays
  misc_feature: MA Experiment 108556 PARAMETER Experiment Name: Zm_Drought_P Parameter: Plant Line Value: 35A19
  misc_feature: MA Experiment 108556 PARAMETER Experiment Name: Zm_Drought_P Parameter: Timepoint (hr) Value: 24
  misc_feature: MA Experiment 108556 PARAMETER Experiment Name: Zm_Drought_P Parameter: Tissue Value: Aerial
  misc_feature: MA Experiment 108556 PARAMETER Experiment Name: Zm_Drought_P Parameter: Treatment Value: Drought vs. No Drought
  misc_feature: MA Experiment ID: 108597 Result: Up-regulated in Transcription
  misc_feature: MA Experiment 108597 PARAMETER Experiment Name: Zm_100uM_ABA_P Parameter: Age (day) Value: 9
  misc_feature: MA Experiment 108597 PARAMETER Experiment Name: Zm_100uM_ABA_P Parameter: Organism Value: Zea mays
  misc_feature: MA Experiment 108597 PARAMETER Experiment Name: Zm_100uM_ABA_P Parameter: Plant Line Value: 35A19
  misc_feature: MA Experiment 108597 PARAMETER Experiment Name: Zm_100uM_ABA_P Parameter: Timepoint (hr) Value: 24
  misc_feature: MA Experiment 108597 PARAMETER Experiment Name: Zm_100uM_ABA_P Parameter: Tissue Value: Aerial
  misc_feature: MA Experiment 108597 PARAMETER Experiment Name: Zm_100uM_ABA_P Parameter: Treatment Value: 100uM ABA vs. No Treatment
  misc_feature: MA Experiment ID: 20000477 Result: Up-regulated in Transcription
  misc_feature: MA Experiment 20000477 PARAMETER Experiment Name: Zm_5mM_SA_P Parameter: Age (day) Value: 10
  misc_feature: MA Experiment 20000477 PARAMETER Experiment Name: Zm_5mM_SA_P Parameter: Organism Value: Zea mays
  misc_feature: MA Experiment 20000477 PARAMETER Experiment Name: Zm_5mM_SA_P Parameter: Plant Line Value: 35A19
  misc_feature: MA Experiment 20000477 PARAMETER Experiment Name: Zm_5mM_SA_P Parameter: Timepoint (hr) Value: 48
  misc_feature: MA Experiment 20000477 PARAMETER Experiment Name: Zm_5mM_SA_P Parameter: Tissue Value: Aerial
  misc_feature: MA Experiment 20000477 PARAMETER Experiment Name: Zm_5mM_SA_P Parameter: Treatment Value: 5mM SA vs. No Treatment
  misc_feature: MA Experiment ID: 20000478 Result: Up-regulated in Transcription
  misc_feature: MA Experiment 20000478 PARAMETER Experiment Name: Zm_5mM_SA_P Parameter: Age (day) Value: 11
  misc_feature: MA Experiment 20000478 PARAMETER Experiment Name: Zm_5mM_SA_P Parameter: Organism Value: Zea mays
  misc_feature: MA Experiment 20000478 PARAMETER Experiment Name: Zm_5mM_SA_P Parameter: Plant Line Value: 35A19
  misc_feature: MA Experiment 20000478 PARAMETER Experiment Name: Zm_5mM_SA_P Parameter: Timepoint (hr) Value: 72
  misc_feature: MA Experiment 20000478 PARAMETER Experiment Name: Zm_5mM_SA_P Parameter: Tissue Value: Aerial
  misc_feature: MA Experiment 20000478 PARAMETER Experiment Name: Zm_5mM_SA_P Parameter: Treatment Value: 5mM SA vs. No Treatment
  misc_feature: MA Experiment ID: 20000479 Result: Up-regulated in Transcription
  misc_feature: MA Experiment 20000479 PARAMETER Experiment Name: Zm_Drought_P Parameter: Age (day) Value: 10
  misc_feature: MA Experiment 20000479 PARAMETER Experiment Name: Zm_Drought_P Parameter: Organism Value: Zea mays
  misc_feature: MA Experiment 20000479 PARAMETER Experiment Name: Zm_Drought_P Parameter: Plant Line Value: 35A19
  misc_feature: MA Experiment 20000479 PARAMETER Experiment Name: Zm_Drought_P Parameter: Timepoint (hr) Value: 48
  misc_feature: MA Experiment 20000479 PARAMETER Experiment Name: Zm_Drought_P Parameter: Tissue Value: Aerial
  misc_feature: MA Experiment 20000479 PARAMETER Experiment Name: Zm_Drought_P Parameter: Treatment Value: Drought vs. No Drought
  misc_feature: MA Experiment ID: 20000480 Result: Up-regulated in Transcription
  misc_feature: MA Experiment 20000480 PARAMETER Experiment Name: Zm_Drought_P Parameter: Age (day) Value: 11
  misc_feature: MA Experiment 20000480 PARAMETER Experiment Name: Zm_Drought_P Parameter: Organism Value: Zea mays
  misc_feature: MA Experiment 20000480 PARAMETER Experiment Name: Zm_Drought_P Parameter: Plant Line Value: 35A19
  misc_feature: MA Experiment 20000480 PARAMETER Experiment Name: Zm_Drought_P Parameter: Timepoint (hr) Value: 72
  misc_feature: MA Experiment 20000480 PARAMETER Experiment Name: Zm_Drought_P Parameter: Tissue Value: Aerial
  misc_feature: MA Experiment 20000480 PARAMETER Experiment Name: Zm_Drought_P Parameter: Treatment Value: Drought vs. No Drought
  misc_feature: MA Experiment ID: 20000487 Result: Down-regulated in Transcription
  misc_feature: MA Experiment 20000487 PARAMETER Experiment Name: Zm_50mM_NH4NO3_L_to_H_P Parameter: Organism Value: Zea mays
  misc_feature: MA Experiment 20000487 PARAMETER Experiment Name: Zm_50mM_NH4NO3_L_to_H_P Parameter: Timepoint (hr) Value: 4
  misc_feature: MA Experiment 20000487 PARAMETER Experiment Name: Zm_50mM_NH4NO3_L_to_H_P Parameter: Tissue Value: Leaves
  misc_feature: MA Experiment 20000487 PARAMETER Experiment Name: Zm_50mM_NH4NO3_L_to_H_P Parameter: Treatment Value: 50mM NH4NO3 vs. 100mM Mannitol
atccggcatcccgatcctgtgtgtctctactctgcactcctcgattcgattcccccgacccagcaggcgggaaatggcgaacggtggggccgaggcatcgccgctgcggccccggcggcgcgccggctccagggacccgttcctcatcgtgtgccgcttcttcggcgtcgtcacggccgccgccgcgctgctctgcgtcgccgccaacgtcctctccgcggtctactccttccgcggtggcgctgacatcatcggcggcgtgttccggtgctacgcggtggtgttctccgtcttcgtcgccgttctcgagaccgagtgggcacccgtcatcaggctctggaagatatttgagtacttgccggcaaggggaatgctgcagacctttgttgctatcatgactaaggcgtacccaaatgttgagaggagcgagctgattttgatccaggagatcgctacctacatgcttcttgtgtgtggagctgtctacataatcgcaggtatactatgtcttggtgttttaaaacgttctaggcagcataaagcaacatcacaggagcaagcggccaaggatctggaggagctagagaagaggagagaggagcttgagtctctgttaactgctgagcggtcagagatggcctgatgtcgacctaccatctctcttctggtgtaaataagtgttttttttcattctctgttgaatgttggtagcgtgcatactgctttgccgtgaccattttgtttcagcatgttgtttcagctgggttctagacattcgtgtaatgcactgtttacttatatgatgatctcctgttgt

SEQ ID NO: 3121 - protein, 213 aa, Zea mays subsp. mays
  peptide (1)..(213): Ceres Seq. ID no. 12342711
  misc_feature (31)..(210): Homolog of NCBI NO: 30689751 NR Description: expressed protein [Arabidopsis thaliana]
  misc_feature (20)..(211): Homolog of NCBI NO: 34915380 NR Description: contains ESTs
SGIPILCVSTLHSSIRFPRPSRREMANGGAEASPLRPRRRAGSRDPFLIVCRFFGVVTAAAALLCVAANVLSAVYSFRGGADIIGGVFRCYAVVFSVFVAVLETEWAPVIRLWKIFEYLPARGMLQTFVAIMTKAYPNVERSELILIQEIATYMLLVCGAVYIIAGILCLGVLKRSRQHKATSQEQAAKDLEELEKRREELESLLTAERSEMA

SEQ ID NO: 3122 - protein, 189 aa, Zea mays subsp. mays
  peptide (1)..(189): Ceres Seq. ID no. 12342712
  misc_feature (7)..(186): Homolog of NCBI NO: 30689751 NR Description: expressed protein [Arabidopsis thaliana]
  misc_feature (1)..(187): Homolog of NCBI NO: 34915380 NR Description: contains ESTs
MANGGAEASPLRPRRRAGSRDPFLIVCRFFGVVTAAAALLCVAANVLSAVYSFRGGADIIGGVFRCYAVVFSVFVAVLETEWAPVIRLWKIFEYLPARGMLQTFVAIMTKAYPNVERSELILIQEIATYMLLVCGAVYIIAGILCLGVLKRSRQHKATSQEQAAKDLEELEKRREELESLLTAERSEMA

SEQ ID NO: 3123 - protein, 131 aa, Zea mays subsp. mays
  peptide (1)..(131): Ceres Seq. ID no. 12342713
PASRSCVSLLCTPRFDSPDPAGGKWRTVGPRHRRCGPGGAPAPGTRSSSCAASSASSRPPPRCSASPPTSSPRSTPSAVALTSSAACSGATRWCSPSSSPFSRPSGHPSSGSGRYLSTCRQGECCRPLLLS

SEQ ID NO: 3124 - DNA, 1402 bp, Zea mays subsp. mays
  misc_feature (1)..(1402): Ceres Seq. ID no. 12344673
  misc_feature: MA Experiment ID: 20000480 Result: Up-regulated in Transcription
  misc_feature: MA Experiment 20000480 PARAMETER Experiment Name: Zm_Drought_P Parameter: Age (day) Value: 11
  misc_feature: MA Experiment 20000480 PARAMETER Experiment Name: Zm_Drought_P Parameter: Organism Value: Zea mays
  misc_feature: MA Experiment 20000480 PARAMETER Experiment Name: Zm_Drought_P Parameter: Plant Line Value: 35A19
  misc_feature: MA Experiment 20000480 PARAMETER Experiment Name: Zm_Drought_P Parameter: Timepoint (hr) Value: 72
  misc_feature: MA Experiment 20000480 PARAMETER Experiment Name: Zm_Drought_P Parameter: Tissue Value: Aerial
  misc_feature: MA Experiment 20000480 PARAMETER Experiment Name: Zm_Drought_P Parameter: Treatment Value: Drought vs. No Drought
cttgaccctggcctccacggcgtaggccttgtacccggctaccctccgccgtcgcttcgcctcggggtcgcccgacgaccaccacgagtccacgacggcgcgcgcacctcgctgtcgcccccgtcgtgcgacgccgccggctgggcatcgccccggaactcctcctgaaggcccctcatcacgctcttgcaggctctggacggacgtgggaggccccgcggcgcccgtacgtatatctagcggcgagacggcaagctcccgccccatctccgccgcctccgctccccgtcgtccggctgcgctgttgctgctcatacggatcaagctcggctacacccgtttctgcgagcagatcagaggacgccatcgtcgggtcggtagggatgggacctgttcactccgatcaaaaggcgaagaaattggcgattatttgcgaacaaagagttataattccaaacgggcatggggagaagcttgttggtttattacatcgaacaagttcaaagaatcttgtgatcctttgtcatggattccaagccacaaaggatgacagcatcttggttgaccttgctgatgccatcacaaaggaaggaattagtgcttttcggtttgatttttctggaaatggggaaagtgatggtgaattccagtatggaagctacagaaaagaggcagctgatttgcgctctgtagtattacatttctcagaacagaaatatgacataattgctcttatcgggcatagcaaaggaggaaatgctgttcttctttatgcttccaagtaccatgatgtccctgccattgtgaacatttctggccgctttgcattagagcgaggtatggagggacgccttgggaagaatttcatgaggagaataaacgaagatggatacattgatgtgaagaataaaaaaggggagttgcagtaccgggtgtcgaaagcgagtctggatgaccggctgagcactgataccctattttccagccgtgccataagcaaagactgcagggttctcacgatccacggcgccaaagacgagatcgtcccggcggaggacgcccggcagttcgcggcgaacatccgcaaccacgagctgcgcatcatggcagaggccaaccaccgttacaccgggcacagggaggagctggcctcgctggtgctgggcttcctcagctcccatccctaccagatcacgtcgcgcttgcgtccgagactctagatagagtagagcacacccacttgaccgtttgcgaacaaaaaaaaaatcccctgtaccaatccaagagttgtgggtatggtgatgtgtttatccagaaccagaacacgagcacctgccgtccaaatcagcgtgactctgtctcgctcaagaatttcaaaaaaagtcagtgccaggcatctaac

SEQ ID NO: 3125 - protein, 278 aa, Zea mays subsp. mays
  peptide (1)..(278): Ceres Seq. ID no. 12344674
  misc_feature (18)..(266): Homolog of NCBI NO: 22135864 NR Description: putative protein [Arabidopsis thaliana]
  misc_feature (14)..(267): Homolog of NCBI NO: 11358640 NR Description: probable esterase-like protein - Arabidopsis
  misc_feature (18)..(266): Homolog of NCBI NO: 15232826 NR Description: putative protein
  misc_feature (6)..(267): Homolog of NCBI NO: 21595418 NR Description: putative esterase-like protein [Arabidopsis
  misc_feature (6)..(267): Homolog of NCBI NO: 18416707 NR Description: putative esterase - like protein
  misc_feature (18)..(266): Homolog of NCBI NO: 21554728 NR Description: putative esterase [Arabidopsis thaliana]
  misc_feature (6)..(265): Homolog of NCBI NO: 15228202 NR Description: putative protein; protein id: At3g47590.1
  misc_feature (1)..(266): Homolog of NCBI NO: 34913068 NR Description: P0013G02.26 [Oryza sativa (japonica
  misc_feature (1)..(265): Homolog of NCBI NO: 34913064 NR Description: P0013G02.24 [Oryza sativa (japonica
  misc_feature (18)..(265): Homolog of NCBI NO: 15220578 NR Description: hypothetical protein; protein id: At1g29840.1
MGPVHSDQKAKKLAIICEQRVIIPNGHGEKLVGLLHRTSSKNLVILCHGFQATKDDSILVDLADAITKEGISAFRFDFSGNGESDGEFQYGSYRKEAADLRSVVLHFSEQKYDIIALIGHSKGGNAVLLYASKYHDVPAIVNISGRFALERGMEGRLGKNFMRRINEDGYIDVKNKKGELQYRVSKASLDDRLSTDTLFSSRAISKDCRVLTIHGAKDEIVPAEDARQFAANIRNHELRIMAEANHRYTGHREELASLVLGFLSSHPYQITSRLRPRL

SEQ ID NO: 3126 - DNA, 1531 bp, Zea mays subsp. mays
  misc_feature (1)..(1531): Ceres Seq. ID no. 12358795
  misc_feature: MA Experiment ID: 108535 Result: Up-regulated in Transcription
  misc_feature: MA Experiment 108535 PARAMETER Experiment Name: Zm_Meristem_P Parameter: Age (day) Value: 8
  misc_feature: MA Experiment 108535 PARAMETER Experiment Name: Zm_Meristem_P Parameter: Organism Value: Zea mays
  misc_feature: MA Experiment 108535 PARAMETER Experiment Name: Zm_Meristem_P Parameter: Plant Line Value: 35A19
  misc_feature: MA Experiment 108535 PARAMETER Experiment Name: Zm_Meristem_P Parameter: Tissue Value: Root Meristem vs. Above Root Meristem
  misc_feature: MA Experiment ID: 108544 Result: Down-regulated in Transcription
  misc_feature: MA Experiment ID: 20000478 Result: Down-regulated in Transcription
  misc_feature: MA Experiment 20000478 PARAMETER Experiment Name: Zm_5mM_SA_P Parameter: Age (day) Value: 11
  misc_feature: MA Experiment 20000478 PARAMETER Experiment Name: Zm_5mM_SA_P Parameter: Organism Value: Zea mays
  misc_feature: MA Experiment 20000478 PARAMETER Experiment Name: Zm_5mM_SA_P Parameter: Plant Line Value: 35A19
  misc_feature: MA Experiment 20000478 PARAMETER Experiment Name: Zm_5mM_SA_P Parameter: Timepoint (hr) Value: 72
  misc_feature: MA Experiment 20000478 PARAMETER Experiment Name: Zm_5mM_SA_P Parameter: Tissue Value: Aerial
  misc_feature: MA Experiment 20000478 PARAMETER Experiment Name: Zm_5mM_SA_P Parameter: Treatment Value: 5mM SA vs. No Treatment
  misc_feature: MA Experiment ID: 20000488 Result: Up-regulated in Transcription
  misc_feature: MA Experiment 20000488 PARAMETER Experiment Name: Zm_50mM_NH4NO3_L_to_H_P Parameter: Organism Value: Zea mays
  misc_feature: MA Experiment 20000488 PARAMETER Experiment Name: Zm_50mM_NH4NO3_L_to_H_P Parameter: Timepoint (hr) Value: 8
  misc_feature: MA Experiment 20000488 PARAMETER Experiment Name: Zm_50mM_NH4NO3_L_to_H_P Parameter: Tissue Value: Leaves
  misc_feature: MA Experiment 20000488 PARAMETER Experiment Name: Zm_50mM_NH4NO3_L_to_H_P Parameter: Treatment Value: 50mM NH4NO3 vs. 100mM Mannitol
  misc_feature: MA Experiment ID: 20000492 Result: Up-regulated in Transcription
  misc_feature: MA Experiment 20000492 PARAMETER Experiment Name: Zm_Hybrid_Seed_Dev_P Parameter: DAP Value: 12
  misc_feature: MA Experiment 20000492 PARAMETER Experiment Name: Zm_Hybrid_Seed_Dev_P Parameter: Organism Value: Zea mays
  misc_feature: MA Experiment 20000492 PARAMETER Experiment Name: Zm_Hybrid_Seed_Dev_P Parameter: Plant Line Value: 35A19
  misc_feature: MA Experiment 20000492 PARAMETER Experiment Name: Zm_Hybrid_Seed_Dev_P Parameter: Tissue Value: Fert Kernel vs. Unfert Floret
  misc_feature: MA Experiment ID: 20000535 Result: Up-regulated in Transcription
  misc_feature: MA Experiment 20000535 PARAMETER Experiment Name: Zm_Hybrid_Seed_Dev_P Parameter: DAP Value: 30 vs. 12
  misc_feature: MA Experiment 20000535 PARAMETER Experiment Name: Zm_Hybrid_Seed_Dev_P Parameter: Organism Value: Zea mays
  misc_feature: MA Experiment 20000535 PARAMETER Experiment Name: Zm_Hybrid_Seed_Dev_P Parameter: Plant Line Value: 35A19
  misc_feature: MA Experiment 20000535 PARAMETER Experiment Name: Zm_Hybrid_Seed_Dev_P Parameter: Tissue Value: Embryo vs. Unfert Floret
ctagccgcctgcctctcctcctccagagctcgtcgccaccggccaccgccaccctcgatcacgccgtccgtcgaggtaaagttagtctccacgcccctttccctccgccctagtcctccgtagctctccgccgcgtcgtccgtcgaggtaaggtcagcatggtgagggtcagtgtgctcaacgatgcgctcaagtccatgtacaacgctgagaagatcggcaagaggcaggtcatgatcaggccgtcgtccaaggtcatcatcaagttcctgacggtcatgcagcgccacggctacattggagagttcgagtacgttgatgaccaccgatcgggcaagatcgtggtcgaactcaacgggaggctgaacaagtgcggcgtcatcagccctcgctttgatatcggcgtgaaagacattgagggatggactgcaaggctgctcccgtccaggcagttcggatacatcgtcctcacaacttcggcaggcatcatggaccacgaggaggcccgccggaagagcgtaggaggcaaggttctaggtttcttctattgaagaagctgagaatctttgttatggcctgcctgcctgtcttactctctcagactagagtacctgttattttactttaatatgtctctctcagactagagcgccttcttttacttgaatattggtgactgcattggtctttcactttaaaatcggtgactgcattgatcgaaaaaaaaaaaaaaaaaacggcacgagaagcgcttctcgtgccgttttttttttttttttttaccactactactaccatgtttgtgtatataaaaagaatgtgttctttcacgggcccgtgaaatcgtgtgctggggacaacatacatcaagtttcttcctcattacatcactcgccgctagtgtatggacaaggggtcacaatcaccaacgacaagggccgtctctccaaggaggagatcgagaagatggttcaggacgctgagaagtacaagtctgaggatgaggagcacaagaagaaggtggaggccaagaactcgctggagaactactcctacaacatgcgcaacacgatcaaggacgagaagattgcgtccaagctgccggccgatgacaagaagaagatcgaggacgccatcgacgcggccatcagctggctggacgccaaccagctcgccgaggcggacgagttcgaggacaagatgaaggagctggagagcctctgcaaccccatcatcgccaagatgtaccagggcgcgggtgaagacatgggcggcgctggcggcatggacgaggacgcccctgccggcagcggcggccctggccccaagatcgaggaggtggactaagcggtttgttgtcagtcttgagtgtgctgcagttgctggctggcccagttgctgccgagagttatcgtcagttggtgcggtgtgtccgcttaaactttatttgtggttggttggtacttttgtggtggttatttttttggacctcgtgatagtcggtcggttcaatgttatcgcggctactggt

SEQ ID NO: 3127 - protein, 130 aa, Zea mays subsp. mays
  peptide (1)..(130): Ceres Seq. ID no. 12358796
  misc_feature (5)..(130): Pfam Name: Ribosomal protein S8 Pfam Description: Ribosomal protein S8
  misc_feature (1)..(130): Homolog of NCBI NO: 23051991 NR Description: hypothetical protein [Methanosarcina barkeri]
  misc_feature (1)..(130): Homolog of NCBI NO: 133793 NR Description: 40S RIBOSOMAL PROTEIN S15A (PPCB8)
  misc_feature (1)..(130): Homolog of NCBI NO: 15223001 NR Description: ribosomal protein S15
MVRVSVLNDALKSMYNAEKIGKRQVMIRPSSKVIIKFLTVMQRHGYIGEFEYVDDHRSGKIVVELNGRLNKCGVISPRFDIGVKDIEGWTARLLPSRQFGYIVLTTSAGIMDHEEARRKSVGGKVLGFFY

SEQ ID NO: 3128 - protein, 126 aa, Zea mays subsp. mays
  peptide (1)..(126): Ceres Seq. ID no. 12358797
  misc_feature (1)..(95): Pfam Name: Hsp70 protein Pfam Description: Hsp70 protein
  misc_feature (1)..(126): Homolog of NCBI NO: 21664287 NR Description: heat shock protein 70 [Oryza sativa (indica
  misc_feature (1)..(126): Homolog of NCBI NO: 1076746 NR Description: dnaK-type molecular chaperone hsp70 - rice
  misc_feature (1)..(126): Homolog of NCBI NO: 3986110 NR Description: heat shock protein 70 cognate [Salix gilgiana]
  misc_feature (1)..(126): Homolog of NCBI NO: 29124135 NR Description: heat shock protein cognate 70
  misc_feature (1)..(126): Homolog of NCBI NO: 2827002 NR Description: HSP70 [Triticum aestivum]
  misc_feature (1)..(126): Homolog of NCBI NO: 15230534 NR Description: heat shock protein 70; protein id: At3g12580.1
  misc_feature (1)..(126): Homolog of NCBI NO: 3962377 NR Description: heat shock protein 70 [Arabidopsis thaliana]
  misc_feature (1)..(126): Homolog of NCBI NO: 34908140 NR Description: putative HSP70 [Oryza sativa (japonica
  misc_feature (1)..(126): Homolog of NCBI NO: 629843 NR Description: dnaK-type molecular chaperone hsp70.4 - maize
  misc_feature (1)..(126): Homolog of NCBI NO: 629844 NR Description: dnaK-type molecular chaperone hsp70.5 - maize
MVQDAEKYKSEDEEHKKKVEAKNSLENYSYNMRNTIKDEKIASKLPADDKKKIEDAIDAAISWLDANQLAEADEFEDKMKELESLCNPIIAKMYQGAGEDMGGAGGMDEDAPAGSGGPGPKIEEVD

SEQ ID NO: 3129 - protein, 117 aa, Zea mays subsp. mays
  peptide (1)..(117): Ceres Seq. ID no. 12358798
  misc_feature (1)..(117): Pfam Name: Ribosomal protein S8 Pfam Description: Ribosomal protein S8
  misc_feature (1)..(117): Homolog of NCBI NO: 23051991 NR Description: hypothetical protein [Methanosarcina barkeri]
  misc_feature (1)..(117): Homolog of NCBI NO: 133793 NR Description: 40S RIBOSOMAL PROTEIN S15A (PPCB8)
  misc_feature (1)..(117): Homolog of NCBI NO: 15223001 NR Description: ribosomal protein S15
MYNAEKIGKRQVMIRPSSKVIIKFLTVMQRHGYIGEFEYVDDHRSGKIVVELNGRLNKCGVISPRFDIGVKDIEGWTARLLPSRQFGYIVLTTSAGIMDHEEARRKSVGGKVLGFFY

SEQ ID NO: 3130 - DNA, 1201 bp, Zea mays subsp. mays
  misc_feature (1)..(1201): Ceres Seq. ID no. 12410398
  misc_feature: MA Experiment ID: 20000632 Result: Down-regulated in Transcription
  misc_feature: MA Experiment 20000632 PARAMETER Experiment Name: Zm_Herbicide-Treatments_P Parameter: Timepoint (hr) Value: 4
  misc_feature: MA Experiment 20000632 PARAMETER Experiment Name: Zm_Herbicide-Treatments_P Parameter: Tissue Value: Aerial
  misc_feature: MA Experiment 20000632 PARAMETER Experiment Name: Zm_Herbicide-Treatments_P Parameter: Treatment Value: Glean vs. No Treatment
cccggttagctcccgcgggagacgagacagcgcgcgcaaaacaaacctcaaacgccaaacgcaacacccgccagcaggccacctgtgagcagcgatgagctcgtcgacgcccggccgcgatgacgacgcgccggacctcgtctgccagatcgactgcgtccacggcatggtggacgcgctctcctcagtccgctggaagcgccaccaggacgcggtgatggagctgtcggagcacgggatcgttctctccgtagaggagagcgggtgtctccaggccaaggtcttcctcaagcgcgagctgttcgtagagtacgactatgcgggggacgggaggcagcggttcggcctcagcctgggtctcttcgtcgactgcctcaacatcttctcatcgccaggccacgcgtccgccgtcgagatccgttaccctggccccgacatgcagcttctcctcaagtctgtgggctctgccgatgcatgcctgtacgcagaaatcagaaccaggattccagatacagtctcctgggattaccattttgagcatgctgggaatagtccagtcagttttaccgtcaagtccgccgtcctgaaagaaacgatcgacgacctcgaatggccaggttccagcatccagattcgaatgcaaccagatcctccaactgttatactaaaaggcgaaggtcatggcgacttgcagaccgaattcccctactatgcaaacaccgaccttctaatcgtgttccaatgcgagcacgaagtgtcacacaggtacaaatacaagttcctccgagcgaccacctcgaacatccccagcagtgccgtgaaggagaaccgcaggaccaaggtctcgatcgggaggggagggatgctgaaggtccagcacctggtgtcgcttgccaggccaggcatgccgtacttccgtagcattggtggagggaacgagcagacgagccggatcgcgcatatagagttcttcgtgaagcccgaagaagacgataacggtgcctagctagcgttttgtggagtgtgttatcggcatgttgtttgagtagttcatgtgaaactgaagccgggtcttggtttttgaaacggctagtgtcgtctatcatacaggcatcacgcttctaatcatgtggatcctgttactaggcacgcattattttcctaatcaggtgaaacacatgtttgtggccttgtgatttgc

SEQ ID NO: 3131 - protein, 303 aa, Zea mays subsp. mays
  peptide (1)..(303): Ceres Seq. ID no. 12410399
  misc_feature (112)..(264): Pfam Name: Repair protein Rad1/Rec1/Rad17 Pfam Description: Repair protein Rad1/Rec1/Rad17
  misc_feature (1)..(264): Homolog of NCBI NO: 29437240 NR Description: Similar to RAD1 homolog (S. pombe) [Danio rerio]
  misc_feature (1)..(264): Homolog of NCBI NO: 39795628 NR Description: Unknown (protein for MGC:77779) [Danio rerio]
  misc_feature (53)..(298): Homolog of NCBI NO: 7452416 NR Description: hypothetical protein dl4915w - Arabidopsis
  misc_feature (2)..(298): Homolog of NCBI NO: 30684177 NR Description: expressed protein [Arabidopsis thaliana]
  misc_feature (1)..(298): Homolog of NCBI NO: 11875164 NR Description: hypothetical protein [Oryza sativa (japonica
MSSSTPGRDDDAPDLVCQIDCVHGMVDALSSVRWKRHQDAVMELSEHGIVLSVEESGCLQAKVFLKRELFVEYDYAGDGRQRFGLSLGLFVDCLNIFSSPGHASAVEIRYPGPDMQLLLKSVGSADACLYAEIRTRIPDTVSWDYHFEHAGNSPVSFTVKSAVLKETIDDLEWPGSSIQIRMQPDPPTVILKGEGHGDLQTEFPYYANTDLLIVFQCEHEVSHRYKYKFLRATTSNIPSSAVKENRRTKVSIGRGGMLKVQHLVSLARPGMPYFRSIGGGNEQTSRIAHIEFFVKPEEDDNGA

SEQ ID NO: 3132 - protein, 279 aa, Zea mays subsp. mays
  peptide (1)..(279): Ceres Seq. ID no. 12410400
  misc_feature (88)..(240): Pfam Name: Repair protein Rad1/Rec1/Rad17 Pfam Description: Repair protein Rad1/Rec1/Rad17
  misc_feature (1)..(240): Homolog of NCBI NO: 29437240 NR Description: Similar to RAD1 homolog (S. pombe) [Danio rerio]
  misc_feature (1)..(240): Homolog of NCBI NO: 39795628 NR Description: Unknown (protein for MGC:77779) [Danio rerio]
  misc_feature (29)..(274): Homolog of NCBI NO: 7452416 NR Description: hypothetical protein dl4915w - Arabidopsis
  misc_feature (1)..(274): Homolog of NCBI NO: 30684177 NR Description: expressed protein [Arabidopsis thaliana]
  misc_feature (1)..(274): Homolog of NCBI NO: 11875164 NR Description: hypothetical protein [Oryza sativa (japonica
MVDALSSVRWKRHQDAVMELSEHGIVLSVEESGCLQAKVFLKRELFVEYDYAGDGRQRFGLSLGLFVDCLNIFSSPGHASAVEIRYPGPDMQLLLKSVGSADACLYAEIRTRIPDTVSWDYHFEHAGNSPVSFTVKSAVLKETIDDLEWPGSSIQIRMQPDPPTVILKGEGHGDLQTEFPYYANTDLLIVFQCEHEVSHRYKYKFLRATTSNIPSSAVKENRRTKVSIGRGGMLKVQHLVSLARPGMPYFRSIGGGNEQTSRIAHIEFFVKPEEDDNGA

SEQ ID NO: 3133 - protein, 262 aa, Zea mays subsp. mays
  peptide (1)..(262): Ceres Seq. ID no. 12410401
  misc_feature (71)..(223): Pfam Name: Repair protein Rad1/Rec1/Rad17 Pfam Description: Repair protein Rad1/Rec1/Rad17
  misc_feature (1)..(223): Homolog of NCBI NO: 29437240 NR Description: Similar to RAD1 homolog (S. pombe) [Danio rerio]
  misc_feature (1)..(223): Homolog of NCBI NO: 39795628 NR Description: Unknown (protein for MGC:77779) [Danio rerio]
  misc_feature (12)..(257): Homolog of NCBI NO: 7452416 NR Description: hypothetical protein dl4915w - Arabidopsis
  misc_feature (1)..(257): Homolog of NCBI NO: 30684177 NR Description: expressed protein [Arabidopsis thaliana]
  misc_feature (1)..(257): Homolog of NCBI NO: 11875164 NR Description: hypothetical protein [Oryza sativa (japonica
MELSEHGIVLSVEESGCLQAKVFLKRELFVEYDYAGDGRQRFGLSLGLFVDCLNIFSSPGHASAVEIRYPGPDMQLLLKSVGSADACLYAEIRTRIPDTVSWDYHFEHAGNSPVSFTVKSAVLKETIDDLEWPGSSIQIRMQPDPPTVILKGEGHGDLQTEFPYYANTDLLIVFQCEHEVSHRYKYKFLRATTSNIPSSAVKENRRTKVSIGRGGMLKVQHLVSLARPGMPYFRSIGGGNEQTSRIAHIEFFVKPEEDDNGA

SEQ ID NO: 3134 - DNA, 938 bp, Zea mays subsp. mays
  misc_feature (1)..(938): Ceres Seq. ID no. 12410394
  misc_feature: MA Experiment ID: 108523 Result: Down-regulated in Transcription
  misc_feature: MA Experiment 108523 PARAMETER Experiment Name: Zm_42deg_Heat_P Parameter: Age (day) Value: 8
  misc_feature: MA Experiment 108523 PARAMETER Experiment Name: Zm_42deg_Heat_P Parameter: Organism Value: Zea mays
  misc_feature: MA Experiment 108523 PARAMETER Experiment Name: Zm_42deg_Heat_P Parameter: Plant Line Value: 35A19
  misc_feature: MA Experiment 108523 PARAMETER Experiment Name: Zm_42deg_Heat_P Parameter: Temperature (deg C) Value: 42 vs. 22
  misc_feature: MA Experiment 108523 PARAMETER Experiment Name: Zm_42deg_Heat_P Parameter: Timepoint (hr) Value: 6
  misc_feature: MA Experiment 108523 PARAMETER Experiment Name: Zm_42deg_Heat_P Parameter: Tissue Value: Aerial
  misc_feature: MA Experiment ID: 108527 Result: Down-regulated in Transcription
  misc_feature: MA Experiment 108527 PARAMETER Experiment Name: Zm_5mM_NO_P Parameter: Age (day) Value: 8
  misc_feature: MA Experiment 108527 PARAMETER Experiment Name: Zm_5mM_NO_P Parameter: Organism Value: Zea mays
  misc_feature: MA Experiment 108527 PARAMETER Experiment Name: Zm_5mM_NO_P Parameter: Plant Line Value: 35A19
  misc_feature: MA Experiment 108527 PARAMETER Experiment Name: Zm_5mM_NO_P Parameter: Timepoint (hr) Value: 6
  misc_feature: MA Experiment 108527 PARAMETER Experiment Name: Zm_5mM_NO_P Parameter: Tissue Value: Aerial
  misc_feature: MA Experiment 108527 PARAMETER Experiment Name: Zm_5mM_NO_P Parameter: Treatment Value: 5mM NO vs. No Treatment
  misc_feature: MA Experiment ID: 108535 Result: Up-regulated in Transcription
  misc_feature: MA Experiment 108535 PARAMETER Experiment Name: Zm_Meristem_P Parameter: Age (day) Value: 8
  misc_feature: MA Experiment 108535 PARAMETER Experiment Name: Zm_Meristem_P Parameter: Organism Value: Zea mays
  misc_feature: MA Experiment 108535 PARAMETER Experiment Name: Zm_Meristem_P Parameter: Plant Line Value: 35A19
  misc_feature: MA Experiment 108535 PARAMETER Experiment Name: Zm_Meristem_P Parameter: Tissue Value: Root Meristem vs. Above Root Meristem
  misc_feature: MA Experiment ID: 108556 Result: Down-regulated in Transcription
  misc_feature: MA Experiment 108556 PARAMETER Experiment Name: Zm_Drought_P Parameter: Age (day) Value: 9
  misc_feature: MA Experiment 108556 PARAMETER Experiment Name: Zm_Drought_P Parameter: Organism Value: Zea mays
  misc_feature: MA Experiment 108556 PARAMETER Experiment Name: Zm_Drought_P Parameter: Plant Line Value: 35A19
  misc_feature: MA Experiment 108556 PARAMETER Experiment Name: Zm_Drought_P Parameter: Timepoint (hr) Value: 24
  misc_feature: MA Experiment 108556 PARAMETER Experiment Name: Zm_Drought_P Parameter: Tissue Value: Aerial
  misc_feature: MA Experiment 108556 PARAMETER Experiment Name: Zm_Drought_P Parameter: Treatment Value: Drought vs. No Drought
  misc_feature: MA Experiment ID: 108559 Result: Down-regulated in Transcription
  misc_feature: MA Experiment 108559 PARAMETER Experiment Name: Zm_5mM_NO_P Parameter: Age (day) Value: 8
  misc_feature: MA Experiment 108559 PARAMETER Experiment Name: Zm_5mM_NO_P Parameter: Organism Value: Zea mays
  misc_feature: MA Experiment 108559 PARAMETER Experiment Name: Zm_5mM_NO_P Parameter: Plant Line Value: 35A19
  misc_feature: MA Experiment 108559 PARAMETER Experiment Name: Zm_5mM_NO_P Parameter: Timepoint (hr) Value: 12
  misc_feature: MA Experiment 108559 PARAMETER Experiment Name: Zm_5mM_NO_P Parameter: Tissue Value: Aerial
  misc_feature: MA Experiment 108559 PARAMETER Experiment Name: Zm_5mM_NO_P Parameter: Treatment Value: 5mM NO vs. No Treatment
  misc_feature: MA Experiment ID: 108597 Result: Down-regulated in Transcription
  misc_feature: MA Experiment 108597 PARAMETER Experiment Name: Zm_100uM_ABA_P Parameter: Age (day) Value: 9
  misc_feature: MA Experiment 108597 PARAMETER Experiment Name: Zm_100uM_ABA_P Parameter: Organism Value: Zea mays
  misc_feature: MA Experiment 108597 PARAMETER Experiment Name: Zm_100uM_ABA_P Parameter: Plant Line Value: 35A19
  misc_feature: MA Experiment 108597 PARAMETER Experiment Name: Zm_100uM_ABA_P Parameter: Timepoint (hr) Value: 24
  misc_feature: MA Experiment 108597 PARAMETER Experiment Name: Zm_100uM_ABA_P Parameter: Tissue Value: Aerial
  misc_feature: MA Experiment 108597 PARAMETER Experiment Name: Zm_100uM_ABA_P Parameter: Treatment Value: 100uM ABA vs. No Treatment
  misc_feature: MA Experiment ID: 20000532 Result: Down-regulated in Transcription
  misc_feature: MA Experiment 20000532 PARAMETER Experiment Name: Zm_0.001percent_MeJA_P Parameter: Age (day) Value: 10
  misc_feature: MA Experiment 20000532 PARAMETER Experiment Name: Zm_0.001percent_MeJA_P Parameter: Organism Value: Zea mays
  misc_feature: MA Experiment 20000532 PARAMETER Experiment Name: Zm_0.001percent_MeJA_P Parameter: Plant Line Value: 35A19
  misc_feature: MA Experiment 20000532 PARAMETER Experiment Name: Zm_0.001percent_MeJA_P Parameter: Timepoint (hr) Value: 48
  misc_feature: MA Experiment 20000532 PARAMETER Experiment Name: Zm_0.001percent_MeJA_P Parameter: Tissue Value: Aerial
  misc_feature: MA Experiment 20000532 PARAMETER Experiment Name: Zm_0.001percent_MeJA_P Parameter: Treatment Value: 0.001percent MeJA vs. No Treatment
  misc_feature: MA Experiment ID: 20000632 Result: Down-regulated in Transcription
  misc_feature: MA Experiment 20000632 PARAMETER Experiment Name: Zm_Herbicide-Treatments_P Parameter: Timepoint (hr) Value: 4
  misc_feature: MA Experiment 20000632 PARAMETER Experiment Name: Zm_Herbicide-Treatments_P Parameter: Tissue Value: Aerial
  misc_feature: MA Experiment 20000632 PARAMETER Experiment Name: Zm_Herbicide-Treatments_P Parameter: Treatment Value: Glean vs. No Treatment
agtgtctccactcgcacttccgcgacgcgcaacccaaagcaaacgcaccgggtcgagccaatccaccacccagccatgcctcccaagcgcaagtccccggcgacgattgcccctgcggcggggtccccgaggaagacgcggagcatggctgctgctgctgctgcagggaagcgggcaacggagcctgctccggcgaaggcagtgccggccaagaaggaagacgaggcggcggttgccgagttgaaagggaggaagaggggcaagaaggaagccgaggcggtgacggtggccaccgagccgaaagggaggaatagggacaagaaggaagccgaggcggtgacggtggccaccgagccgaaagggaggaagaggggcaagaaggaagccgaggcggtggcaccagcggcagaggaggaggatggggttgatgtggcggctgtagggaagcgtgtcatcgtcgaggcctgcactcagtgcagacagtttaagatccgagctcagaaggtgaaggaggacctggaaagttatgtttcgggggtgtctgtgataatcaaccctcagaagccacgccgtggttgccttgagatacgtgaagaaggcggtgaagtgttcatatcactgctgaacatgccacgccccttcacaccaatgaagaagctcgacatggacaaggttatcaaggacatcgccaagaagatctcctaaaccatgttggctggctatggctcggcggcaccattttgtgattgaaatattcaatctaagatcgtaatcttcaaagggtacggtgtaccttaggtgtaggttccaatcagtggcgtttcctattgcattggccatgtgcccatgtctcgtactcgtacctatgcttgtcctgcattgctggggcatatcgttttctgttatatgatatatgccctgaaaattccttgacttcc

SEQ ID NO: 3135 - protein, 234 aa, Zea mays subsp. mays
  peptide (1)..(234): Ceres Seq. ID no. 12410395
  misc_feature (57)..(188): Homolog of NCBI NO: 7486666 NR Description: hypothetical protein F8F16.180 - Arabidopsis
  misc_feature (106)..(233): Homolog of NCBI NO: 18400547 NR Description: expressed protein
  misc_feature (57)..(233): Homolog of NCBI NO: 22329049 NR Description: hypothetical protein
SVSTRTSATRNPKQTHRVEPIHHPAMPPKRKSPATIAPAAGSPRKTRSMAAAAAAGKRATEPAPAKAVPAKKEDEAAVAELKGRKRGKKEAEAVTVATEPKGRNRDKKEAEAVTVATEPKGRKRGKKEAEAVAPAAEEEDGVDVAAVGKRVIVEACTQCRQFKIRAQKVKEDLESYVSGVSVIINPQKPRRGCLEIREEGGEVFISLLNMPRPFTPMKKLDMDKVIKDIAKKIS

SEQ ID NO: 3136 - protein, 209 aa, Zea mays subsp. mays
  peptide (1)..(209): Ceres Seq. ID no. 12410396
  misc_feature (32)..(163): Homolog of NCBI NO: 7486666 NR Description: hypothetical protein F8F16.180 - Arabidopsis
  misc_feature (81)..(208): Homolog of NCBI NO: 18400547 NR Description: expressed protein
  misc_feature (32)..(208): Homolog of NCBI NO: 22329049 NR Description: hypothetical protein
MPPKRKSPATIAPAAGSPRKTRSMAAAAAAGKRATEPAPAKAVPAKKEDEAAVAELKGRKRGKKEAEAVTVATEPKGRNRDKKEAEAVTVATEPKGRKRGKKEAEAVAPAAEEEDGVDVAAVGKRVIVEACTQCRQFKIRAQKVKEDLESYVSGVSVIINPQKPRRGCLEIREEGGEVFISLLNMPRPFTPMKKLDMDKVIKDIAKKIS

SEQ ID NO: 3137 - protein, 186 aa, Zea mays subsp. mays
  peptide (1)..(186): Ceres Seq. ID no. 12410397
  misc_feature (9)..(140): Homolog of NCBI NO: 7486666 NR Description: hypothetical protein F8F16.180 - Arabidopsis
  misc_feature (58)..(185): Homolog of NCBI NO: 18400547 NR Description: expressed protein
  misc_feature (9)..(185): Homolog of NCBI NO: 22329049 NR Description: hypothetical protein
MAAAAAAGKRATEPAPAKAVPAKKEDEAAVAELKGRKRGKKEAEAVTVATEPKGRNRDKKEAEAVTVATEPKGRKRGKKEAEAVAPAAEEEDGVDVAAVGKRVIVEACTQCRQFKIRAQKVKEDLESYVSGVSVIINPQKPRRGCLEIREEGGEVFISLLNMPRPFTPMKKLDMDKVIKDIAKKIS

SEQ ID NO: 3138 - DNA, 1370 bp, Zea mays subsp. mays
  misc_feature (1)..(1370): Ceres Seq. ID no. 12356099
  misc_feature: MA Experiment ID: 108529 Result: Up-regulated in Transcription
  misc_feature: MA Experiment 108529 PARAMETER Experiment Name: Zm_Imbibed_Seeds_P Parameter: Age (day) Value: 5 vs. 2
  misc_feature: MA Experiment 108529 PARAMETER Experiment Name: Zm_Imbibed_Seeds_P Parameter: Organism Value: Zea mays
  misc_feature: MA Experiment 108529 PARAMETER Experiment Name: Zm_Imbibed_Seeds_P Parameter: Plant Line Value: 35A19
  misc_feature: MA Experiment 108529 PARAMETER Experiment Name: Zm_Imbibed_Seeds_P Parameter: Tissue Value: Roots vs. Embryo
  misc_feature: MA Experiment ID: 108535 Result: Down-regulated in Transcription
  misc_feature: MA Experiment 108535 PARAMETER Experiment Name: Zm_Meristem_P Parameter: Age (day) Value: 8
  misc_feature: MA Experiment 108535 PARAMETER Experiment Name: Zm_Meristem_P Parameter: Organism Value: Zea mays
  misc_feature: MA Experiment 108535 PARAMETER Experiment Name: Zm_Meristem_P Parameter: Plant Line Value: 35A19
  misc_feature: MA Experiment 108535 PARAMETER Experiment Name: Zm_Meristem_P Parameter: Tissue Value: Root Meristem vs. Above Root Meristem
  misc_feature: MA Experiment ID: 20000535 Result: Down-regulated in Transcription
  misc_feature: MA Experiment 20000535 PARAMETER Experiment Name: Zm_Hybrid_Seed_Dev_P Parameter: DAP Value: 30 vs. 12
  misc_feature: MA Experiment 20000535 PARAMETER Experiment Name: Zm_Hybrid_Seed_Dev_P Parameter: Organism Value: Zea mays
  misc_feature: MA Experiment 20000535 PARAMETER Experiment Name: Zm_Hybrid_Seed_Dev_P Parameter: Plant Line Value: 35A19
  misc_feature: MA Experiment 20000535 PARAMETER Experiment Name: Zm_Hybrid_Seed_Dev_P Parameter: Tissue Value: Embryo vs. Unfert Floret
tcaagagtcaagatacatcagagtagctcattgcatagtttcagtgtgtaattatatatttgtctcctctagtgcagtactagagtctagtctagctagtttagattgagtctgcttgttcatctagcgcgtgttttggggtaggtagctagctagctagacacgcgcacccggacaaacgcacgcagcagacaccaagcaggaatcatcggcggcaggcggagggatggggctgagggagattgagtcgacattgccgccggggttcaggttctatcccagcgacgaggagctggtatgccattacctctacaggaaggtggccaacgagcgctccgtgcaggggacgctggtggaggtcgacctgcacgcgcgggaaccatgggagcttccagacgcggccaagctgacggcgagcgagtggtacttcttcagcttcagggaccgcaagtacgcgaccgggccgcgcacgaaccgcgccaccaagacgggctactggaaggccaccggcaaggaccgcgaggtgcgcgacccggccgcccgcgccgtcgtcgtcggcatgcggaagacgctcgtcttctaccagggccgtgcccccagcggcgtcaagtcatgctgggtcatgcacgagttccgcctcgactcgccgcgtacgacgacgacgccaccgaaggaggactgggtgctgtgcagggtgttccagaagcggaaagtcgacggcagcgagcaagacaacggcgtctccccctcgccgccggtctttgccggcgcatcgcagtcgcagggggtcgtcctgccgccggaccagccctgcgtggtggacgcgtacgtcgtggtagaccagccgggctcttcttccgtcggactcgcgccgccgcaggagaacctcggtagcggcctggacgcgttgctgacgaacggagcgatgtggcagtacacctcgtcggtcttcggtcacttgttgccgcaggaggcgaccagctccccgccggtgatggacctaggctccaggggaggagaaggaggagactacgggtgcagcttcttctacgacagcagcttcgaggacatggccaacatcgggttccgacaagggtggatgggctgatccaggaccaggaagcacacgtacgtgcgtgcagtcatgcgatatggaatgtgcatttgtgaaggaagtgattgaattaattgattccattagtagtagcaccctctagtgttgtacagtaggtacgtatatagtgtgagattagattattattgggaattgttagagtgcaccggcctctcaaatccaaagaagtaacagcggaaagaaaagctagtagctagagcacacatgtatatatttgcacaaggtagatggtttg

SEQ ID NO: 3139 - protein, 293 aa, Zea mays subsp. mays
  peptide (1)..(293): Ceres Seq. ID no. 12356100
  misc_feature (10)..(139): Pfam Name: No apical meristem (NAM) protein Pfam Description: No apical meristem (NAM) protein
  misc_feature (6)..(210): Homolog of NCBI NO: 15222818 NR Description: NAC1
  misc_feature (6)..(179): Homolog of NCBI NO: 15229637 NR Description: organ separation protein, putative; protein id:
  misc_feature (6)..(252): Homolog of NCBI NO: 38636961 NR Description: putative NAC domain protein NAC1
  misc_feature (7)..(160): Homolog of NCBI NO: 15224139 NR Description: NAM (no apical meristem)-like protein; protein
  misc_feature (1)..(192): Homolog of NCBI NO: 15232511 NR Description: NAM-like protein
  misc_feature (1)..(192): Homolog of NCBI NO: 11994506 NR Description: contains similarity to NAM (no apical meristem)
  misc_feature (1)..(170): Homolog of NCBI NO: 21593065 NR Description: NAM / CUC2-like protein [Arabidopsis thaliana]
  misc_feature (1)..(170): Homolog of NCBI NO: 18417214 NR Description: NAM / CUC2 -like protein
  misc_feature (2)..(183): Homolog of NCBI NO: 37535380 NR Description: putative NAM (no apical meristem) protein
  misc_feature (1)..(291): Homolog of NCBI NO: 32482946 NR Description: OSJNBb0072M01.11 [Oryza sativa (japonica
MGLREIESTLPPGFRFYPSDEELVCHYLYRKVANERSVQGTLVEVDLHAREPWELPDAAKLTASEWYFFSFRDRKYATGPRTNRATKTGYWKATGKDREVRDPAARAVVVGMRKTLVFYQGRAPSGVKSCWVMHEFRLDSPRTTTTPPKEDWVLCRVFQKRKVDGSEQDNGVSPSPPVFAGASQSQGVVLPPDQPCVVDAYVVVDQPGSSSVGLAPPQENLGSGLDALLTNGAMWQYTSSVFGHLLPQEATSSPPVMDLGSRGGEGGDYGCSFFYDSSFEDMANIGFRQGWMG

SEQ ID NO: 3140 - protein, 198 aa, Zea mays subsp. mays
  peptide (1)..(198): Ceres Seq. ID no. 12356101
MPLPLQEGGQRALRAGDAGGGRPARAGTMGASRRGQADGERVVLLQLQGPQVRDRAAHEPRHQDGLLEGHRQGPRGARPGRPRRRRRHAEDARLLPGPCPQRRQVMLGHARVPPRLAAYDDDATEGGLGAVQGVPEAESRRQRARQRRLPLAAGLCRRIAVAGGRPAAGPALRGGRVRRGRPAGLFFRRTRAAAGEPR

SEQ ID NO: 3141 - protein, 182 aa, Zea mays subsp. mays
  peptide (1)..(182): Ceres Seq. ID no. 12356102
  misc_feature (1)..(99): Homolog of NCBI NO: 15222818 NR Description: NAC1
  misc_feature (1)..(68): Homolog of NCBI NO: 15229637 NR Description: organ separation protein, putative; protein id:
  misc_feature (1)..(141): Homolog of NCBI NO: 38636961 NR Description: putative NAC domain protein NAC1
  misc_feature (1)..(49): Homolog of NCBI NO: 15224139 NR Description: NAM (no apical meristem)-like protein; protein
  misc_feature (1)..(81): Homolog of NCBI NO: 15232511 NR Description: NAM-like protein
  misc_feature (1)..(81): Homolog of NCBI NO: 11994506 NR Description: contains similarity to NAM (no apical meristem)
  misc_feature (1)..(59): Homolog of NCBI NO: 21593065 NR Description: NAM / CUC2-like protein [Arabidopsis thaliana]
  misc_feature (1)..(59): Homolog of NCBI NO: 18417214 NR Description: NAM / CUC2 -like protein
  misc_feature (1)..(72): Homolog of NCBI NO: 37535380 NR Description: putative NAM (no apical meristem) protein
  misc_feature (1)..(180): Homolog of NCBI NO: 32482946 NR Description: OSJNBb0072M01.11 [Oryza sativa (japonica
MRKTLVFYQGRAPSGVKSCWVMHEFRLDSPRTTTTPPKEDWVLCRVFQKRKVDGSEQDNGVSPSPPVFAGASQSQGVVLPPDQPCVVDAYVVVDQPGSSSVGLAPPQENLGSGLDALLTNGAMWQYTSSVFGHLLPQEATSSPPVMDLGSRGGEGGDYGCSFFYDSSFEDMANIGFRQGWMG

SEQ ID NO: 3142 - DNA, 1312 bp, Zea mays subsp. mays
  misc_feature (1)..(1312): Ceres Seq. ID no. 12410390
  misc_feature: MA Experiment ID: 20000535 Result: Down-regulated in Transcription
  misc_feature: MA Experiment 20000535 PARAMETER Experiment Name: Zm_Hybrid_Seed_Dev_P Parameter: DAP Value: 30 vs. 12
  misc_feature: MA Experiment 20000535 PARAMETER Experiment Name: Zm_Hybrid_Seed_Dev_P Parameter: Organism Value: Zea mays
  misc_feature: MA Experiment 20000535 PARAMETER Experiment Name: Zm_Hybrid_Seed_Dev_P Parameter: Plant Line Value: 35A19
  misc_feature: MA Experiment 20000535 PARAMETER Experiment Name: Zm_Hybrid_Seed_Dev_P Parameter: Tissue Value: Embryo vs. Unfert Floret
aatcatgctagttgttctcgttcccttgttagttgagctctttcccttcctcgcttggaaccaaatcaaatcggagcggcggagcaatacgatccctcgcctcgcttccattcgaatcatctcgaacggggcactaatcgggaagctaatgtcgcgcaattcgcgagatctgtagcgccactcggcttcaccggcggcgcggcgggcatggaagcgcagaacggctccggcgtaggggcgcccgtggtgctcaacgtgtacgaccttacgcccatgaacaactacctctactggttcggcctcggtattttccactccggaatcgaagtccacggcatggagtacggatatggagcacacgagtttccaacaagtggggtatttgaggtggaaccaaagagctgtcctggtttcacctacagaagatctgtgtggatgggcacaactgacttgtctagaacagagttccgctcgttcattgaaaaccttgcaggaaagtacaatggcaacacataccatttgatttcaaagaactgcaaccattttacagatgatgtctgtaagaacttgaccaggaaatcaatccctgggtgggtcaatcggctagcaagagtgggttcatttttcaactgtcttctaccagaaagcatccaagtttccacagtaagacacgtccctactcatcctgcattttctgatgatgatatggattcggtatcttcatcggttattggagacagtgatctggaagagctggaccaacaccttctgccatcaactgctgacgtccattctatagacgtgccgccaaagctagcgaaagatcttctctgagttattcagcactttgggttttcacatagcaaggataacttggactgctgcagtggatgtccgctgagtgcttctctgggtggcgcagccgcgcaggactccaggaatgtcgaatgctgctaattgtatcgattcttttgccactgaggtccttacatgcacacagagctctcgacagaaatgacacgctttctaatcctttgcctgttacttgtatgttgtgacttcatcctaggtattttgtgttcgagtgatactgtatgcattcagaatgccgtcaatggcgtgtctggttcgaggcatacaaagtagtatcttgtgttcgagtgatactgtaggcactgagaatgccgtcaatggtgtgtgtgtttgaggggtcacaggtaatccatcgagtgtagttaaaccaaacaaatcttaatatcatctgacttcaatccgtgcagcttttcctagtgatatatataatttttgtttt

SEQ ID NO: 3143 - protein, 208 aa, Zea mays subsp. mays
  peptide (1)..(208): Ceres Seq. ID no. 12410391
  misc_feature (12)..(134): Pfam Name: Eukaryotic protein of unknown function (DUF862) Pfam Description: Eukaryotic protein of unknown function (DUF862)
  misc_feature (4)..(156): Homolog of NCBI NO: 17529024 NR Description: unknown protein [Arabidopsis thaliana]
  misc_feature (4)..(156): Homolog of NCBI NO: 15236618 NR Description: putative protein; protein id: At4g31980.1
  misc_feature (5)..(157): Homolog of NCBI NO: 9802596 NR Description: T2E6.19 [Arabidopsis thaliana]
  misc_feature (1)..(156): Homolog of NCBI NO: 18400749 NR Description: expressed protein
  misc_feature (1)..(156): Homolog of NCBI NO: 18420889 NR Description: putative protein
  misc_feature (5)..(157): Homolog of NCBI NO: 21593644 NR Description: unknown [Arabidopsis thaliana]
  misc_feature (5)..(157): Homolog of NCBI NO: 18401869 NR Description: expressed protein
  misc_feature (2)..(206): Homolog of NCBI NO: 30684058 NR Description: expressed protein [Arabidopsis thaliana]
  misc_feature (2)..(208): Homolog of NCBI NO: 15238059 NR Description: putative protein; protein id: At5g47310.1
  misc_feature (1)..(198): Homolog of NCBI NO: 38346173 NR Description: OSJNBa0079A21.20 [Oryza sativa (japonica
MEAQNGSGVGAPVVLNVYDLTPMNNYLYWFGLGIFHSGIEVHGMEYGYGAHEFPTSGVFEVEPKSCPGFTYRRSVWMGTTDLSRTEFRSFIENLAGKYNGNTYHLISKNCNHFTDDVCKNLTRKSIPGWVNRLARVGSFFNCLLPESIQVSTVRHVPTHPAFSDDDMDSVSSSVIGDSDLEELDQHLLPSTADVHSIDVPPKLAKDLL

SEQ ID NO: 3144 - protein, 186 aa, Zea mays subsp. mays
  peptide (1)..(186): Ceres Seq. ID no. 12410392
  misc_feature (1)..(112): Pfam Name: Eukaryotic protein of unknown function (DUF862) Pfam Description: Eukaryotic protein of unknown function (DUF862)
  misc_feature (1)..(184): Homolog of NCBI NO: 30684058 NR Description: expressed protein [Arabidopsis thaliana]
  misc_feature (1)..(186): Homolog of NCBI NO: 15238059 NR Description: putative protein; protein id: At5g47310.1
  misc_feature (1)..(134): Homolog of NCBI NO: 15236618 NR Description: putative protein; protein id: At4g31980.1
  misc_feature (1)..(134): Homolog of NCBI NO: 18400749 NR Description: expressed protein
  misc_feature (1)..(135): Homolog of NCBI NO: 21593644 NR Description: unknown [Arabidopsis thaliana]
  misc_feature (1)..(135): Homolog of NCBI NO: 18401869 NR Description: expressed protein
  misc_feature (1)..(134): Homolog of NCBI NO: 18420889 NR Description: putative protein
  misc_feature (1)..(135): Homolog of NCBI NO: 9802596 NR Description: T2E6.19 [Arabidopsis thaliana]
  misc_feature (1)..(134): Homolog of NCBI NO: 17529024 NR Description: unknown protein [Arabidopsis thaliana]
  misc_feature (1)..(176): Homolog of NCBI NO: 38346173 NR Description: OSJNBa0079A21.20 [Oryza sativa (japonica
MNNYLYWFGLGIFHSGIEVHGMEYGYGAHEFPTSGVFEVEPKSCPGFTYRRSVWMGTTDLSRTEFRSFIENLAGKYNGNTYHLISKNCNHFTDDVCKNLTRKSIPGWVNRLARVGSFFNCLLPESIQVSTVRHVPTHPAFSDDDMDSVSSSVIGDSDLEELDQHLLPSTADVHSIDVPPKLAKDLL

SEQ ID NO: 3145 - protein, 165 aa, Zea mays subsp. mays
  peptide (1)..(165): Ceres Seq. ID no. 12410393
  misc_feature (1)..(91): Pfam Name: Eukaryotic protein of unknown function (DUF862) Pfam Description: Eukaryotic protein of unknown function (DUF862)
  misc_feature (1)..(113): Homolog of NCBI NO: 17529024 NR Description: unknown protein [Arabidopsis thaliana]
  misc_feature (1)..(113): Homolog of NCBI NO: 15236618 NR Description: putative protein; protein id: At4g31980.1
  misc_feature (1)..(114): Homolog of NCBI NO: 9802596 NR Description: T2E6.19 [Arabidopsis thaliana]
  misc_feature (1)..(113): Homolog of NCBI NO: 18400749 NR Description: expressed protein
  misc_feature (1)..(113): Homolog of NCBI NO: 18420889 NR Description: putative protein
  misc_feature (1)..(114): Homolog of NCBI NO: 21593644 NR Description: unknown [Arabidopsis thaliana]
  misc_feature (1)..(114): Homolog of NCBI NO: 18401869 NR Description: expressed protein
  misc_feature (1)..(163): Homolog of NCBI NO: 30684058 NR Description: expressed protein [Arabidopsis thaliana]
  misc_feature (1)..(165): Homolog of NCBI NO: 15238059 NR Description: putative protein; protein id: At5g47310.1
  misc_feature (1)..(155): Homolog of NCBI NO: 38346173 NR Description: OSJNBa0079A21.20 [Oryza sativa (japonica
MEYGYGAHEFPTSGVFEVEPKSCPGFTYRRSVWMGTTDLSRTEFRSFIENLAGKYNGNTYHLISKNCNHFTDDVCKNLTRKSIPGWVNRLARVGSFFNCLLPESIQVSTVRHVPTHPAFSDDDMDSVSSSVIGDSDLEELDQHLLPSTADVHSIDVPPKLAKDLL

SEQ ID NO: 3146 - DNA, 1058 bp, Zea mays subsp. mays
  misc_feature (1)..(1058): Ceres Seq. ID no. 12406184
  misc_feature: MA Experiment ID: 108543 Result: Up-regulated in Transcription
  misc_feature: MA Experiment ID: 20000534 Result: Down-regulated in Transcription
  misc_feature: MA Experiment 20000534 PARAMETER Experiment Name: Zm_Hybrid_Pollen_P Parameter: Age (day) Value: 8
  misc_feature: MA Experiment 20000534 PARAMETER Experiment Name: Zm_Hybrid_Pollen_P Parameter: Organism Value: Zea mays
  misc_feature: MA Experiment 20000534 PARAMETER Experiment Name: Zm_Hybrid_Pollen_P Parameter: Plant Line Value: 35A19
  misc_feature: MA Experiment 20000534 PARAMETER Experiment Name: Zm_Hybrid_Pollen_P Parameter: Tissue Value: Pollen vs. Aerial
gctagggttttctcgcaatccagcccctctgtcatggccaagacgaagcaagggaagcgggatgtcgacgcctataccatcaagggcaccaacaaggtggtccgagtgggggactgcgtgctgatgcggccagcggacacggacaacccgccgtacgtggcgcgggtggagcggatggagtcggacgggcgcggcagcgtgagggtgcgggtgcgctggtactaccgccccgaggaggccaagggcggccgacgcccgttccacggtgccaaggagctcttcctctccgaccacttcgacacgcagagcgcccacaccattgagggcaagtgcatcgttcactccttcaagagctacaccaagctcgacaacgttggtccggaggacttctactgccgatttgactacaaggccgccaccggtgcattcacccccgaccgtgtcgccgtatattgcaagtgtgagatgccgtacaacccggatgacctcatggtgcagtgtgaaggatgcaaggactggttccatccgtcttgtatgggaatgaccattgagcaagcaaaaaagatagatcattacatgtgctcggattgtgctaaagaaaatggtgcaaagagaccctcaaattcatactcagtttcaccaaactcagattctaagattgaatcaaagaggcgcaagagataaatgctgcggcagaagcacccctggcaaaggagatgcggtatttatggtgtcagctcctcattactggtgcatatttgagatgttgatgtgtacactgcgagagaagagccaagccaattgtagggcaaaacctatttgacttatcattcttctgtgtattctgcctagacattagtgtgatgagtacgtgagttccccgttgcggcgtgtgcatgatcagctgctggaggcgggatgtcgggaaatgctagaattatgctgactcttgtcgatgtaagtgtatcgtgtgtgtgtgttaacatatgcactggctggaaacgttcccatgtgtgaatggaggatgctgatgatagcttgactgttgtttcatattc

SEQ ID NO: 3147 - protein, 227 aa, Zea mays subsp. mays
  peptide (1)..(227): Ceres Seq. ID no. 12406185
  misc_feature (31)..(147): Pfam Name: BAH domain Pfam Description: BAH domain
  misc_feature (19)..(227): Homolog of NCBI NO: 629783 NR Description: ES43 protein - barley
  misc_feature (12)..(220): Homolog of NCBI NO: 7484948 NR Description: ES43 protein homolog F19H22.200 - Arabidopsis
  misc_feature (12)..(227): Homolog of NCBI NO: 21595796 NR Description: ES43 like protein [Arabidopsis thaliana]
  misc_feature (12)..(227): Homolog of NCBI NO: 18420377 NR Description: ES43 like protein
  misc_feature (12)..(227): Homolog of NCBI NO: 34897170 NR Description: putative DNA-binding protein
  misc_feature (42)..(220): Homolog of NCBI NO: 15234729 NR Description: receptor like protein (fragment); protein id:
  misc_feature (37)..(220): Homolog of NCBI NO: 11292613 NR Description: receptor like protein - Arabidopsis thaliana
  misc_feature (12)..(227): Homolog of NCBI NO: 33146914 NR Description: putative ES43 protein [Oryza sativa (japonica
  misc_feature (12)..(219): Homolog of NCBI NO: 34904940 NR Description: OSJNBa0077M12.13 [Oryza sativa (japonica
  misc_feature (12)..(227): Homolog of NCBI NO: 37573088 NR Description: receptor like protein [Oryza sativa (japonica
ARVFSQSSPSVMAKTKQGKRDVDAYTIKGTNKVVRVGDCVLMRPADTDNPPYVARVERMESDGRGSVRVRVRWYYRPEEAKGGRRPFHGAKELFLSDHFDTQSAHTIEGKCIVHSFKSYTKLDNVGPEDFYCRFDYKAATGAFTPDRVAVYCKCEMPYNPDDLMVQCEGCKDWFHPSCMGMTIEQAKKIDHYMCSDCAKENGAKRPSNSYSVSPNSDSKIESKRRKR

SEQ ID NO: 3148 - protein, 216 aa, Zea mays subsp. mays
  peptide (1)..(216): Ceres Seq. ID no. 12406186
  misc_feature (20)..(136): Pfam Name: BAH domain Pfam Description: BAH domain
  misc_feature (8)..(216): Homolog of NCBI NO: 629783 NR Description: ES43 protein - barley
  misc_feature (1)..(209): Homolog of NCBI NO: 7484948 NR Description: ES43 protein homolog F19H22.200 - Arabidopsis
  misc_feature (1)..(216): Homolog of NCBI NO: 21595796 NR Description: ES43 like protein [Arabidopsis thaliana]
  misc_feature (1)..(216): Homolog of NCBI NO: 18420377 NR Description: ES43 like protein
  misc_feature (1)..(216): Homolog of NCBI NO: 34897170 NR Description: putative DNA-binding protein
  misc_feature (31)..(209): Homolog of NCBI NO: 15234729 NR Description: receptor like protein (fragment); protein id:
  misc_feature (26)..(209): Homolog of NCBI NO: 11292613 NR Description: receptor like protein - Arabidopsis thaliana
  misc_feature (1)..(216): Homolog of NCBI NO: 33146914 NR Description: putative ES43 protein [Oryza sativa (japonica
  misc_feature (1)..(208): Homolog of NCBI NO: 34904940 NR Description: OSJNBa0077M12.13 [Oryza sativa (japonica
  misc_feature (1)..(216): Homolog of NCBI NO: 37573088 NR Description: receptor like protein [Oryza sativa (japonica
MAKTKQGKRDVDAYTIKGTNKVVRVGDCVLMRPADTDNPPYVARVERMESDGRGSVRVRVRWYYRPEEAKGGRRPFHGAKELFLSDHFDTQSAHTIEGKCIVHSFKSYTKLDNVGPEDFYCRFDYKAATGAFTPDRVAVYCKCEMPYNPDDLMVQCEGCKDWFHPSCMGMTIEQAKKIDHYMCSDCAKENGAKRPSNSYSVSPNSDSKIESKRRKR

SEQ ID NO: 3149 - protein, 186 aa, Zea mays subsp. mays
  peptide (1)..(186): Ceres Seq. ID no. 12406187
  misc_feature (1)..(106): Pfam Name: BAH domain Pfam Description: BAH domain
  misc_feature (1)..(186): Homolog of NCBI NO: 629783 NR Description: ES43 protein - barley
  misc_feature (1)..(179): Homolog of NCBI NO: 7484948 NR Description: ES43 protein homolog F19H22.200 - Arabidopsis
  misc_feature (1)..(186): Homolog of NCBI NO: 21595796 NR Description: ES43 like protein [Arabidopsis thaliana]
  misc_feature (1)..(186): Homolog of NCBI NO: 18420377 NR Description: ES43 like protein
  misc_feature (1)..(186): Homolog of NCBI NO: 34897170 NR Description: putative DNA-binding protein
  misc_feature (1)..(179): Homolog of NCBI NO: 15234729 NR Description: receptor like protein (fragment); protein id:
  misc_feature (1)..(179): Homolog of NCBI NO: 11292613 NR Description: receptor like protein - Arabidopsis thaliana
  misc_feature (1)..(186): Homolog of NCBI NO: 33146914 NR Description: putative ES43 protein [Oryza sativa (japonica
  misc_feature (1)..(178): Homolog of NCBI NO: 34904940 NR Description: OSJNBa0077M12.13 [Oryza sativa (japonica
  misc_feature (1)..(186): Homolog of NCBI NO: 37573088 NR Description: receptor like protein [Oryza sativa (japonica
MRPADTDNPPYVARVERMESDGRGSVRVRVRWYYRPEEAKGGRRPFHGAKELFLSDHFDTQSAHTIEGKCIVHSFKSYTKLDNVGPEDFYCRFDYKAATGAFTPDRVAVYCKCEMPYNPDDLMVQCEGCKDWFHPSCMGMTIEQAKKIDHYMCSDCAKENGAKRPSNSYSVSPNSDSKIESKRRKR

SEQ ID NO: 3150 - DNA, 1316 bp, Zea mays subsp. mays
  misc_feature (1)..(1316): Ceres Seq. ID no. 12408232
  misc_feature: MA Experiment ID: 108504 Result: Down-regulated in Transcription
  misc_feature: MA Experiment 108504 PARAMETER Experiment Name: Zm_Drought_P Parameter: Age (day) Value: 8
  misc_feature: MA Experiment 108504 PARAMETER Experiment Name: Zm_Drought_P Parameter: Organism Value: Zea mays
  misc_feature: MA Experiment 108504 PARAMETER Experiment Name: Zm_Drought_P Parameter: Plant Line Value: 35A19
  misc_feature: MA Experiment 108504 PARAMETER Experiment Name: Zm_Drought_P Parameter: Timepoint (hr) Value: 12
  misc_feature: MA Experiment 108504 PARAMETER Experiment Name: Zm_Drought_P Parameter: Tissue Value: Aerial
  misc_feature: MA Experiment 108504 PARAMETER Experiment Name: Zm_Drought_P Parameter: Treatment Value: Drought vs. No Drought
  misc_feature: MA Experiment ID: 108515 Result: Down-regulated in Transcription
  misc_feature: MA Experiment 108515 PARAMETER Experiment Name: Zm_2mM_SA_P Parameter: Age (day) Value: 8
  misc_feature: MA Experiment 108515 PARAMETER Experiment Name: Zm_2mM_SA_P Parameter: Organism Value: Zea mays
  misc_feature: MA Experiment 108515 PARAMETER Experiment Name: Zm_2mM_SA_P Parameter: Plant Line Value: 35A19
  misc_feature: MA Experiment 108515 PARAMETER Experiment Name: Zm_2mM_SA_P Parameter: Timepoint (hr) Value: 12
  misc_feature: MA Experiment 108515 PARAMETER Experiment Name: Zm_2mM_SA_P Parameter: Tissue Value: Aerial
  misc_feature: MA Experiment 108515 PARAMETER Experiment Name: Zm_2mM_SA_P Parameter: Treatment Value: 2mM SA vs. No Treatment
  misc_feature: MA Experiment ID: 108522 Result: Down-regulated in Transcription
  misc_feature: MA Experiment 108522 PARAMETER Experiment Name: Zm_42deg_Heat_P Parameter: Age (day) Value: 8
  misc_feature: MA Experiment 108522 PARAMETER Experiment Name: Zm_42deg_Heat_P Parameter: Organism Value: Zea mays
  misc_feature: MA Experiment 108522 PARAMETER Experiment Name: Zm_42deg_Heat_P Parameter: Plant Line Value: 35A19
  misc_feature: MA Experiment 108522 PARAMETER Experiment Name: Zm_42deg_Heat_P Parameter: Temperature (deg C) Value: 42 vs. 22
  misc_feature: MA Experiment 108522 PARAMETER Experiment Name: Zm_42deg_Heat_P Parameter: Timepoint (hr) Value: 1
  misc_feature: MA Experiment 108522 PARAMETER Experiment Name: Zm_42deg_Heat_P Parameter: Tissue Value: Aerial
  misc_feature: MA Experiment ID: 108523 Result: Down-regulated in Transcription
  misc_feature: MA Experiment 108523 PARAMETER Experiment Name: Zm_42deg_Heat_P Parameter: Age (day) Value: 8
  misc_feature: MA Experiment 108523 PARAMETER Experiment Name: Zm_42deg_Heat_P Parameter: Organism Value: Zea mays
  misc_feature: MA Experiment 108523 PARAMETER Experiment Name: Zm_42deg_Heat_P Parameter: Plant Line Value: 35A19
  misc_feature: MA Experiment 108523 PARAMETER Experiment Name: Zm_42deg_Heat_P Parameter: Temperature (deg C) Value: 42 vs. 22
  misc_feature: MA Experiment 108523 PARAMETER Experiment Name: Zm_42deg_Heat_P Parameter: Timepoint (hr) Value: 6
  misc_feature: MA Experiment 108523 PARAMETER Experiment Name: Zm_42deg_Heat_P Parameter: Tissue Value: Aerial
  misc_feature: MA Experiment ID: 108527 Result: Down-regulated in Transcription
  misc_feature: MA Experiment 108527 PARAMETER Experiment Name: Zm_5mM_NO_P Parameter: Age (day) Value: 8
  misc_feature: MA Experiment 108527 PARAMETER Experiment Name: Zm_5mM_NO_P Parameter: Organism Value: Zea mays
  misc_feature: MA Experiment 108527 PARAMETER Experiment Name: Zm_5mM_NO_P Parameter: Plant Line Value: 35A19
  misc_feature: MA Experiment 108527 PARAMETER Experiment Name: Zm_5mM_NO_P Parameter: Timepoint (hr) Value: 6
  misc_feature: MA Experiment 108527 PARAMETER Experiment Name: Zm_5mM_NO_P Parameter: Tissue Value: Aerial
  misc_feature: MA Experiment 108527 PARAMETER Experiment Name: Zm_5mM_NO_P Parameter: Treatment Value: 5mM NO vs. No Treatment
  misc_feature: MA Experiment ID: 108535 Result: Up-regulated in Transcription
  misc_feature: MA Experiment 108535 PARAMETER Experiment Name: Zm_Meristem_P Parameter: Age (day) Value: 8
  misc_feature: MA Experiment 108535 PARAMETER Experiment Name: Zm_Meristem_P Parameter: Organism Value: Zea mays
  misc_feature: MA Experiment 108535 PARAMETER Experiment Name: Zm_Meristem_P Parameter: Plant Line Value: 35A19
  misc_feature: MA Experiment 108535 PARAMETER Experiment Name: Zm_Meristem_P Parameter: Tissue Value: Root Meristem vs. Above Root Meristem
  misc_feature: MA Experiment ID: 108543 Result: Up-regulated in Transcription
  misc_feature: MA Experiment ID: 108545 Result: Up-regulated in Transcription
  misc_feature: MA Experiment 108545 PARAMETER Experiment Name: Zm_Imbibed_Seeds_P Parameter: Age (day) Value: 3 vs. 2
  misc_feature: MA Experiment 108545 PARAMETER Experiment Name: Zm_Imbibed_Seeds_P Parameter: Organism Value: Zea mays
  misc_feature: MA Experiment 108545 PARAMETER Experiment Name: Zm_Imbibed_Seeds_P Parameter: Plant Line Value: 35A19
  misc_feature: MA Experiment 108545 PARAMETER Experiment Name: Zm_Imbibed_Seeds_P Parameter: Tissue Value: Aerial vs. Embryo
  misc_feature: MA Experiment ID: 108546 Result: Down-regulated in Transcription
  misc_feature: MA Experiment 108546 PARAMETER Experiment Name: Zm_Imbibed_Seeds_P Parameter: Age (day) Value: 3 vs. 2
  misc_feature: MA Experiment 108546 PARAMETER Experiment Name: Zm_Imbibed_Seeds_P Parameter: Organism Value: Zea mays
  misc_feature: MA Experiment 108546 PARAMETER Experiment Name: Zm_Imbibed_Seeds_P Parameter: Plant Line Value: 35A19
  misc_feature: MA Experiment 108546 PARAMETER Experiment Name: Zm_Imbibed_Seeds_P Parameter: Tissue Value: Roots vs. Embryo
  misc_feature: MA Experiment ID: 108559 Result: Down-regulated in Transcription
  misc_feature: MA Experiment 108559 PARAMETER Experiment Name: Zm_5mM_NO_P Parameter: Age (day) Value: 8
  misc_feature: MA Experiment 108559 PARAMETER Experiment Name: Zm_5mM_NO_P Parameter: Organism Value: Zea mays
  misc_feature: MA Experiment 108559 PARAMETER Experiment Name: Zm_5mM_NO_P Parameter: Plant Line Value: 35A19
  misc_feature: MA Experiment 108559 PARAMETER Experiment Name: Zm_5mM_NO_P Parameter: Timepoint (hr) Value: 12
  misc_feature: MA Experiment 108559 PARAMETER Experiment Name: Zm_5mM_NO_P Parameter: Tissue Value: Aerial
  misc_feature: MA Experiment 108559 PARAMETER Experiment Name: Zm_5mM_NO_P Parameter: Treatment Value: 5mM NO vs. No Treatment
  misc_feature: MA Experiment ID: 108597 Result: Down-regulated in Transcription
  misc_feature: MA Experiment 108597 PARAMETER Experiment Name: Zm_100uM_ABA_P Parameter: Age (day) Value: 9
  misc_feature: MA Experiment 108597 PARAMETER Experiment Name: Zm_100uM_ABA_P Parameter: Organism Value: Zea mays
  misc_feature: MA Experiment 108597 PARAMETER Experiment Name: Zm_100uM_ABA_P Parameter: Plant Line Value: 35A19
  misc_feature: MA Experiment 108597 PARAMETER Experiment Name: Zm_100uM_ABA_P Parameter: Timepoint (hr) Value: 24
  misc_feature: MA Experiment 108597 PARAMETER Experiment Name: Zm_100uM_ABA_P Parameter: Tissue Value: Aerial
  misc_feature: MA Experiment 108597 PARAMETER Experiment Name: Zm_100uM_ABA_P Parameter: Treatment Value: 100uM ABA vs. No Treatment
  misc_feature: MA Experiment ID: 108687 Result: Down-regulated in Transcription
  misc_feature: MA Experiment 108687 PARAMETER Experiment Name: Zm_Embryos-Flowers__P Parameter: Tissue Value: Embryo vs. Aerial+
  misc_feature: MA Experiment ID: 108689 Result: Down-regulated in Transcription
  misc_feature: MA Experiment 108689 PARAMETER Experiment Name: Zm_Drought_Roots_P Parameter: Age (day) Value: 9
  misc_feature: MA Experiment 108689 PARAMETER Experiment Name: Zm_Drought_Roots_P Parameter: Organism Value: Zea mays
  misc_feature: MA Experiment 108689 PARAMETER Experiment Name: Zm_Drought_Roots_P Parameter: Plant Line Value: 35A19
  misc_feature: MA Experiment 108689 PARAMETER Experiment Name: Zm_Drought_Roots_P Parameter: Timepoint (hr) Value: 24
  misc_feature: MA Experiment 108689 PARAMETER Experiment Name: Zm_Drought_Roots_P Parameter: Tissue Value: Roots
  misc_feature: MA Experiment 108689 PARAMETER Experiment Name: Zm_Drought_Roots_P Parameter: Treatment Value: Drought vs. No Drought
  misc_feature: MA Experiment ID: 20000487 Result: Down-regulated in Transcription
  misc_feature: MA Experiment 20000487 PARAMETER Experiment Name: Zm_50mM_NH4NO3_L_to_H_P Parameter: Organism Value: Zea mays
  misc_feature: MA Experiment 20000487 PARAMETER Experiment Name: Zm_50mM_NH4NO3_L_to_H_P Parameter: Timepoint (hr) Value: 4
  misc_feature: MA Experiment 20000487 PARAMETER Experiment Name: Zm_50mM_NH4NO3_L_to_H_P Parameter: Tissue Value: Leaves
  misc_feature: MA Experiment 20000487 PARAMETER Experiment Name: Zm_50mM_NH4NO3_L_to_H_P Parameter: Treatment Value: 50mM NH4NO3 vs. 100mM Mannitol
  misc_feature: MA Experiment ID: 20000535 Result: Up-regulated in Transcription
  misc_feature: MA Experiment 20000535 PARAMETER Experiment Name: Zm_Hybrid_Seed_Dev_P Parameter: DAP Value: 30 vs. 12
  misc_feature: MA Experiment 20000535 PARAMETER Experiment Name: Zm_Hybrid_Seed_Dev_P Parameter: Organism Value: Zea mays
  misc_feature: MA Experiment 20000535 PARAMETER Experiment Name: Zm_Hybrid_Seed_Dev_P Parameter: Plant Line Value: 35A19
  misc_feature: MA Experiment 20000535 PARAMETER Experiment Name: Zm_Hybrid_Seed_Dev_P Parameter: Tissue Value: Embryo vs. Unfert Floret
  misc_feature: MA Experiment ID: 20000632 Result: Down-regulated in Transcription
  misc_feature: MA Experiment 20000632 PARAMETER Experiment Name: Zm_Herbicide-Treatments_P Parameter: Timepoint (hr) Value: 4
  misc_feature: MA Experiment 20000632 PARAMETER Experiment Name: Zm_Herbicide-Treatments_P Parameter: Tissue Value: Aerial
  misc_feature: MA Experiment 20000632 PARAMETER Experiment Name: Zm_Herbicide-Treatments_P Parameter: Treatment Value: Glean vs. No Treatment
  misc_feature: MA Experiment ID: 20000633 Result: Down-regulated in Transcription
  misc_feature: MA Experiment 20000633 PARAMETER Experiment Name: Zm_Herbicide-Treatments_P Parameter: Timepoint (hr) Value: 4
  misc_feature: MA Experiment 20000633 PARAMETER Experiment Name: Zm_Herbicide-Treatments_P Parameter: Tissue Value: Aerial
  misc_feature: MA Experiment 20000633 PARAMETER Experiment Name: Zm_Herbicide-Treatments_P Parameter: Treatment Value: Trimec vs. No Treatment
aattcaaacttcacatagagccgttgctcagcactcgcgacccactaccaatcctccaagcacaacaaccaatctttgcaagccgtccaaagacgccgcagccgccgccgccgacgccatggggaaactcggagccaagtccgactacgagagtctccgcgacgcccgcatctccgagaacatggcccggatggagatgctcggccttctccgctgcgcgggggagctcagcgacatcgcctccgcctccagccaccgcgcggcagggagcgcgacgcctcggaagacccccaggccacgggtgacgagcatgaccccgctccgccgctccggccgcctcctcgccgcgacgccgacccgcccgaccggatccgcgtcgacgcaccgctgttccactcggctgaatggacagggcacaggggttctgagtaagttgacggcggcgggatcggaggatgaggatgatacatgggaagatgataaggaggggaagtgggcggtggcggtggccaaggagagggtacaggcgctgcaggagaggcggtgcgacagcagggggaggggcggcgtgtacgactctgttcttgggatctgctgccatttctgcaggcagaagaaattgtgcggcgaggaggactgcaagcgctgcggggaaggagacctgaagcagccatgcttaggaaagacggagtgctcatcttgccattcttctaatgggatactctgccgtggttgcctgaaagttaggtacggcgaagagatggaagaggtgcggaagaacaagaactggctgtgccctcactgcgttgaggagaagggtatcaagaaattctggatatgcaacagctccttctgcttgaagaagcggaagataccaccgactgggattgccatatataatgcaagggagcaaggatacgagtcagttgcgcaccttctgatggacaggctgaagcgacaagctttctgatgacgactggtgtaatggtgttggcacgttcacttctacagcgacgatgatgacatagagattgtagtggcagtctgttgtctgacgacgtatggttttgcatgtttcacttctgcagtggcttagtgatgatggtagattggtagaggttatagcgagagtccgtttgtctggcagttccgatagtaggcatcttagcctctaggagaaaatgtttctgttgaaatgagttagactttttggcccaagaagaatgtgaagctaactctcggtagtctgatgtttcagagaacaacctcagcggccttctgacttctgagtggcagcatgtctgtttattgtaacc

SEQ ID NO: 3151 - protein, 322 aa, Zea mays subsp. mays
  peptide (1)..(322): Ceres Seq. ID no. 12408233
  misc_feature (9)..(320): Homolog of NCBI NO: 21362008 NR Description: cell division cycle associated protein 7 isoform 1
  misc_feature (9)..(320): Homolog of NCBI NO: 22027514 NR Description: cell division cycle associated protein 7 isoform 2
  misc_feature (187)..(320): Homolog of NCBI NO: 11360288 NR Description: hypothetical protein DKFZp762L0311.1 - human
  misc_feature (172)..(320): Homolog of NCBI NO: 20891867 NR Description: hypothetical protein XP_148415 [Mus musculus]
  misc_feature (14)..(320): Homolog of NCBI NO: 21313220 NR Description: RIKEN cDNA 2310021G01 [Mus musculus]
  misc_feature (2)..(320): Homolog of NCBI NO: 26324608 NR Description: unnamed protein product [Mus musculus]
  misc_feature (90)..(320): Homolog of NCBI NO: 15929382 NR Description: Unknown (protein for IMAGE:3829029) [Homo sapiens]
  misc_feature (172)..(297): Homolog of NCBI NO: 25407788 NR Description: hypothetical protein AT4g37110 [imported] -
  misc_feature (14)..(317): Homolog of NCBI NO: 34855191 NR Description: similar to RIKEN cDNA 2310021G01 [Rattus
  misc_feature (40)..(322): Homolog of NCBI NO: 13324785 NR Description: hypothetical protein [Oryza sativa]
IQTSHRAVAQHSRPTTNPPSTTTNLCKPSKDAAAAAADAMGKLGAKSDYESLRDARISENMARMEMLGLLRCAGELSDIASASSHRAAGSATPRKTPRPRVTSMTPLRRSGRLLAATPTRPTGSASTHRCSTRLNGQGTGVLSKLTAAGSEDEDDTWEDDKEGKWAVAVAKERVQALQERRCDSRGRGGVYDSVLGICCHFCRQKKLCGEEDCKRCGEGDLKQPCLGKTECSSCHSSNGILCRGCLKVRYGEEMEEVRKNKNWLCPHCVEEKGIKKFWICNSSFCLKKRKIPPTGIAIYNAREQGYESVAHLLMDRLKRQAF

SEQ ID NO: 3152 - protein, 283 aa, Zea mays subsp. mays
  peptide (1)..(283): Ceres Seq. ID no. 12408234
  misc_feature (1)..(281): Homolog of NCBI NO: 21362008 NR Description: cell division cycle associated protein 7 isoform 1
  misc_feature (1)..(281): Homolog of NCBI NO: 22027514 NR Description: cell division cycle associated protein 7 isoform 2
  misc_feature (148)..(281): Homolog of NCBI NO: 11360288 NR Description: hypothetical protein DKFZp762L0311.1 - human
  misc_feature (133)..(281): Homolog of NCBI NO: 20891867 NR Description: hypothetical protein XP_148415 [Mus musculus]
  misc_feature (1)..(281): Homolog of NCBI NO: 21313220 NR Description: RIKEN cDNA 2310021G01 [Mus musculus]
  misc_feature (1)..(281): Homolog of NCBI NO: 26324608 NR Description: unnamed protein product [Mus musculus]
  misc_feature (51)..(281): Homolog of NCBI NO: 15929382 NR Description: Unknown (protein for IMAGE:3829029) [Homo sapiens]
  misc_feature (133)..(258): Homolog of NCBI NO: 25407788 NR Description: hypothetical protein AT4g37110 [imported] -
  misc_feature (1)..(278): Homolog of NCBI NO: 34855191 NR Description: similar to RIKEN cDNA 2310021G01 [Rattus
  misc_feature (1)..(283): Homolog of NCBI NO: 13324785 NR Description: hypothetical protein [Oryza sativa]
MGKLGAKSDYESLRDARISENMARMEMLGLLRCAGELSDIASASSHRAAGSATPRKTPRPRVTSMTPLRRSGRLLAATPTRPTGSASTHRCSTRLNGQGTGVLSKLTAAGSEDEDDTWEDDKEGKWAVAVAKERVQALQERRCDSRGRGGVYDSVLGICCHFCRQKKLCGEEDCKRCGEGDLKQPCLGKTECSSCHSSNGILCRGCLKVRYGEEMEEVRKNKNWLCPHCVEEKGIKKFWICNSSFCLKKRKIPPTGIAIYNAREQGYESVAHLLMDRLKRQAF

SEQ ID NO: 3153 - protein, 262 aa, Zea mays subsp. mays
  peptide (1)..(262): Ceres Seq. ID no. 12408235
  misc_feature (1)..(260): Homolog of NCBI NO: 21362008 NR Description: cell division cycle associated protein 7 isoform 1
  misc_feature (1)..(260): Homolog of NCBI NO: 22027514 NR Description: cell division cycle associated protein 7 isoform 2
  misc_feature (127)..(260): Homolog of NCBI NO: 11360288 NR Description: hypothetical protein DKFZp762L0311.1 - human
  misc_feature (112)..(260): Homolog of NCBI NO: 20891867 NR Description: hypothetical protein XP_148415 [Mus musculus]
  misc_feature (1)..(260): Homolog of NCBI NO: 21313220 NR Description: RIKEN cDNA 2310021G01 [Mus musculus]
  misc_feature (1)..(260): Homolog of NCBI NO: 26324608 NR Description: unnamed protein product [Mus musculus]
  misc_feature (30)..(260): Homolog of NCBI NO: 15929382 NR Description: Unknown (protein for IMAGE:3829029) [Homo sapiens]
  misc_feature (112)..(237): Homolog of NCBI NO: 25407788 NR Description: hypothetical protein AT4g37110 [imported] -
  misc_feature (1)..(257): Homolog of NCBI NO: 34855191 NR Description: similar to RIKEN cDNA 2310021G01 [Rattus
  misc_feature (1)..(262): Homolog of NCBI NO: 13324785 NR Description: hypothetical protein [Oryza sativa]
MARMEMLGLLRCAGELSDIASASSHRAAGSATPRKTPRPRVTSMTPLRRSGRLLAATPTRPTGSASTHRCSTRLNGQGTGVLSKLTAAGSEDEDDTWEDDKEGKWAVAVAKERVQALQERRCDSRGRGGVYDSVLGICCHFCRQKKLCGEEDCKRCGEGDLKQPCLGKTECSSCHSSNGILCRGCLKVRYGEEMEEVRKNKNWLCPHCVEEKGIKKFWICNSSFCLKKRKIPPTGIAIYNAREQGYESVAHLLMDRLKRQAF

SEQ ID NO: 3154 - DNA, 1191 bp, Zea mays subsp. mays
  misc_feature (1)..(1191): Ceres Seq. ID no. 12410365
  misc_feature: MA Experiment ID: 108535 Result: Up-regulated in Transcription
  misc_feature: MA Experiment 108535 PARAMETER Experiment Name: Zm_Meristem_P Parameter: Age (day) Value: 8
  misc_feature: MA Experiment 108535 PARAMETER Experiment Name: Zm_Meristem_P Parameter: Organism Value: Zea mays
  misc_feature: MA Experiment 108535 PARAMETER Experiment Name: Zm_Meristem_P Parameter: Plant Line Value: 35A19
  misc_feature: MA Experiment 108535 PARAMETER Experiment Name: Zm_Meristem_P Parameter: Tissue Value: Root Meristem vs. Above Root Meristem
aaaccgcacacggcacctcctctcgtccgttcgccgcctggctcgcaccgctgacagtgcgtcagtccaggtcgatactccctctttccaagatccggtcattctctctcggggtcggctaccgccgccgccgtacgccaggtgccgactgccgagaccttctccgatctgtttgccggcgaagagcgcccgccaaatctgcccctggtttcaaccgattgaaccccgatgtccgacgtcgagaaccctggcgtgggtgggaagccgccgccgtacaaggaccctgacaatgggagtcagcgattcctactcgagttggagttcgtgcagtgcctcgccaaccctacctacatccactatctagcgcagaatagatatttcgaggatgaggcatttatcgggtacctcaagtatctaaaatactggcagcgaccagagtatatcaaatacataatgtatccacactgccttttctttcttgagcttctccaaaatgccaatttccgaaatgcaatggcacatccaacaaacaaggagcttgctcataggcagcaatatttcttctggaaaaactacaggaataacagactgaagcacatcataccgcgccctcctcctgaacctgcaccttcacaggcacctgctacattgcccctacaagcgtccgtgccgacacctgtagctccacctgttcctgcaccaacatcgtctatgccacctgtggtagcaggtggtgcatctgcaatgtctcctatgcagtttgtaggaactccaggcactaatatgccgaagaatgacatgagaaatgctatggacaatagaaaaaggaagatgggctaattgaagttcttgcgcaacttttcaacggacactgccggattcgagcacagttgctgcctcaggagccttattatttccttttgttttagtgctggttatttggccttgtagttgagggttcgtgagtttttagaatggaagcttctgacttagagtgaagttagaacaaatactccatgtcgcatgaacttgcacacgtgactttaggtgtcagcattctcctgaatgatcataccatttaccttaatgtttcagcatattgcttggcagcaggaaatatgtactgttcataaactatacatatgcccgttggccccaatacaaagttgacattttggcaatattctgttc

SEQ ID NO: 3155 - protein, 203 aa, Zea mays subsp. mays
  peptide (1)..(203): Ceres Seq. ID no. 12410366
  misc_feature (19)..(120): Homolog of NCBI NO: 39589769 NR Description: Hypothetical protein CBG12403 [Caenorhabditis
  misc_feature (24)..(202): Homolog of NCBI NO: 21355471 NR Description: CG1057-PA [Drosophila melanogaster]
  misc_feature (20)..(122): Homolog of NCBI NO: 7705592 NR Description: CGI-125 protein [Homo sapiens]
  misc_feature (20)..(122): Homolog of NCBI NO: 13385570 NR Description: RIKEN cDNA 3110004H13 [Mus musculus]
  misc_feature (20)..(122): Homolog of NCBI NO: 27673870 NR Description: similar to CGI-125 protein [Homo sapiens] [Rattus
  misc_feature (13)..(203): Homolog of NCBI NO: 22326900 NR Description: SOH1 - like protein
  misc_feature (12)..(203): Homolog of NCBI NO: 34899964 NR Description: P0428D12.23 [Oryza sativa (japonica
  misc_feature (12)..(201): Homolog of NCBI NO: 34899976 NR Description: P0039H02.5 [Oryza sativa (japonica
  misc_feature (12)..(203): Homolog of NCBI NO: 33146796 NR Description: SOH1-like protein [Oryza sativa (japonica
  misc_feature (15)..(203): Homolog of NCBI NO: 12597881 NR Description: hypothetical protein [Oryza sativa]
MSDVENPGVGGKPPPYKDPDNGSQRFLLELEFVQCLANPTYIHYLAQNRYFEDEAFIGYLKYLKYWQRPEYIKYIMYPHCLFFLELLQNANFRNAMAHPTNKELAHRQQYFFWKNYRNNRLKHIIPRPPPEPAPSQAPATLPLQASVPTPVAPPVPAPTSSMPPVVAGGASAMSPMQFVGTPGTNMPKNDMRNAMDNRKRKMG

SEQ ID NO: 3156 - protein, 128 aa, Zea mays subsp. mays
  peptide (1)..(128): Ceres Seq. ID no. 12410367
  misc_feature (1)..(128): Homolog of NCBI NO: 34899964 NR Description: P0428D12.23 [Oryza sativa (japonica
  misc_feature (1)..(126): Homolog of NCBI NO: 34899976 NR Description: P0039H02.5 [Oryza sativa (japonica
  misc_feature (1)..(128): Homolog of NCBI NO: 33146796 NR Description: SOH1-like protein [Oryza sativa (japonica
  misc_feature (1)..(128): Homolog of NCBI NO: 12597881 NR Description: hypothetical protein [Oryza sativa]
  misc_feature (1)..(45): Homolog of NCBI NO: 39589769 NR Description: Hypothetical protein CBG12403 [Caenorhabditis
  misc_feature (1)..(127): Homolog of NCBI NO: 21355471 NR Description: CG1057-PA [Drosophila melanogaster]
  misc_feature (1)..(47): Homolog of NCBI NO: 7705592 NR Description: CGI-125 protein [Homo sapiens]
  misc_feature (1)..(47): Homolog of NCBI NO: 13385570 NR Description: RIKEN cDNA 3110004H13 [Mus musculus]
  misc_feature (1)..(47): Homolog of NCBI NO: 27673870 NR Description: similar to CGI-125 protein [Homo sapiens] [Rattus
  misc_feature (1)..(128): Homolog of NCBI NO: 22326900 NR Description: SOH1 - like protein
MYPHCLFFLELLQNANFRNAMAHPTNKELAHRQQYFFWKNYRNNRLKHIIPRPPPEPAPSQAPATLPLQASVPTPVAPPVPAPTSSMPPVVAGGASAMSPMQFVGTPGTNMPKNDMRNAMDNRKRKMG

SEQ ID NO: 3157 - protein, 120 aa, Zea mays subsp. mays
  peptide (1)..(120): Ceres Seq. ID no. 12410368
NRTRHLLSSVRRLARTADSASVQVDTPSFQDPVILSRGRLPPPPYARCRLPRPSPICLPAKSARQICPWFQPIEPRCPTSRTLAWVGSRRRTRTLTMGVSDSYSSWSSCSASPTLPTSTI

SEQ ID NO: 3158 - DNA, 1583 bp, Zea mays subsp. mays
  misc_feature (1)..(1583): Ceres Seq. ID no. 12362521
  misc_feature: MA Experiment ID: 108504 Result: Up-regulated in Transcription
  misc_feature: MA Experiment 108504 PARAMETER Experiment Name: Zm_Drought_P Parameter: Age (day) Value: 8
  misc_feature: MA Experiment 108504 PARAMETER Experiment Name: Zm_Drought_P Parameter: Organism Value: Zea mays
  misc_feature: MA Experiment 108504 PARAMETER Experiment Name: Zm_Drought_P Parameter: Plant Line Value: 35A19
  misc_feature: MA Experiment 108504 PARAMETER Experiment Name: Zm_Drought_P Parameter: Timepoint (hr) Value: 12
  misc_feature: MA Experiment 108504 PARAMETER Experiment Name: Zm_Drought_P Parameter: Tissue Value: Aerial
  misc_feature: MA Experiment 108504 PARAMETER Experiment Name: Zm_Drought_P Parameter: Treatment Value: Drought vs. No Drought
  misc_feature: MA Experiment ID: 108529 Result: Up-regulated in Transcription
  misc_feature: MA Experiment 108529 PARAMETER Experiment Name: Zm_Imbibed_Seeds_P Parameter: Age (day) Value: 5 vs. 2
  misc_feature: MA Experiment 108529 PARAMETER Experiment Name: Zm_Imbibed_Seeds_P Parameter: Organism Value: Zea mays
  misc_feature: MA Experiment 108529 PARAMETER Experiment Name: Zm_Imbibed_Seeds_P Parameter: Plant Line Value: 35A19
  misc_feature: MA Experiment 108529 PARAMETER Experiment Name: Zm_Imbibed_Seeds_P Parameter: Tissue Value: Roots vs. Embryo
  misc_feature: MA Experiment ID: 108545 Result: Down-regulated in Transcription
  misc_feature: MA Experiment 108545 PARAMETER Experiment Name: Zm_Imbibed_Seeds_P Parameter: Age (day) Value: 3 vs. 2
  misc_feature: MA Experiment 108545 PARAMETER Experiment Name: Zm_Imbibed_Seeds_P Parameter: Organism Value: Zea mays
  misc_feature: MA Experiment 108545 PARAMETER Experiment Name: Zm_Imbibed_Seeds_P Parameter: Plant Line Value: 35A19
  misc_feature: MA Experiment 108545 PARAMETER Experiment Name: Zm_Imbibed_Seeds_P Parameter: Tissue Value: Aerial vs. Embryo
  misc_feature: MA Experiment ID: 108546 Result: Up-regulated in Transcription
  misc_feature: MA Experiment 108546 PARAMETER Experiment Name: Zm_Imbibed_Seeds_P Parameter: Age (day) Value: 3 vs. 2
  misc_feature: MA Experiment 108546 PARAMETER Experiment Name: Zm_Imbibed_Seeds_P Parameter: Organism Value: Zea mays
  misc_feature: MA Experiment 108546 PARAMETER Experiment Name: Zm_Imbibed_Seeds_P Parameter: Plant Line Value: 35A19
  misc_feature: MA Experiment 108546 PARAMETER Experiment Name: Zm_Imbibed_Seeds_P Parameter: Tissue Value: Roots vs. Embryo
  misc_feature: MA Experiment ID: 108547 Result: Down-regulated in Transcription
  misc_feature: MA Experiment 108547 PARAMETER Experiment Name: Zm_Imbibed_Seeds_P Parameter: Age (day) Value: 4 vs. 2
  misc_feature: MA Experiment 108547 PARAMETER Experiment Name: Zm_Imbibed_Seeds_P Parameter: Organism Value: Zea mays
  misc_feature: MA Experiment 108547 PARAMETER Experiment Name: Zm_Imbibed_Seeds_P Parameter: Plant Line Value: 35A19
  misc_feature: MA Experiment 108547 PARAMETER Experiment Name: Zm_Imbibed_Seeds_P Parameter: Tissue Value: Aerial vs. Embryo
  misc_feature: MA Experiment ID: 108689 Result: Up-regulated in Transcription
  misc_feature: MA Experiment 108689 PARAMETER Experiment Name: Zm_Drought_Roots_P Parameter: Age (day) Value: 9
  misc_feature: MA Experiment 108689 PARAMETER Experiment Name: Zm_Drought_Roots_P Parameter: Organism Value: Zea mays
  misc_feature: MA Experiment 108689 PARAMETER Experiment Name: Zm_Drought_Roots_P Parameter: Plant Line Value: 35A19
  misc_feature: MA Experiment 108689 PARAMETER Experiment Name: Zm_Drought_Roots_P Parameter: Timepoint (hr) Value: 24
  misc_feature: MA Experiment 108689 PARAMETER Experiment Name: Zm_Drought_Roots_P Parameter: Tissue Value: Roots
  misc_feature: MA Experiment 108689 PARAMETER Experiment Name: Zm_Drought_Roots_P Parameter: Treatment Value: Drought vs. No Drought
  misc_feature: MA Experiment ID: 20000479 Result: Up-regulated in Transcription
  misc_feature: MA Experiment 20000479 PARAMETER Experiment Name: Zm_Drought_P Parameter: Age (day) Value: 10
  misc_feature: MA Experiment 20000479 PARAMETER Experiment Name: Zm_Drought_P Parameter: Organism Value: Zea mays
  misc_feature: MA Experiment 20000479 PARAMETER Experiment Name: Zm_Drought_P Parameter: Plant Line Value: 35A19
  misc_feature: MA Experiment 20000479 PARAMETER Experiment Name: Zm_Drought_P Parameter: Timepoint (hr) Value: 48
  misc_feature: MA Experiment 20000479 PARAMETER Experiment Name: Zm_Drought_P Parameter: Tissue Value: Aerial
  misc_feature: MA Experiment 20000479 PARAMETER Experiment Name: Zm_Drought_P Parameter: Treatment Value: Drought vs. No Drought
  misc_feature: MA Experiment ID: 20000480 Result: Up-regulated in Transcription
  misc_feature: MA Experiment 20000480 PARAMETER Experiment Name: Zm_Drought_P Parameter: Age (day) Value: 11
  misc_feature: MA Experiment 20000480 PARAMETER Experiment Name: Zm_Drought_P Parameter: Organism Value: Zea mays
  misc_feature: MA Experiment 20000480 PARAMETER Experiment Name: Zm_Drought_P Parameter: Plant Line Value: 35A19
  misc_feature: MA Experiment 20000480 PARAMETER Experiment Name: Zm_Drought_P Parameter: Timepoint (hr) Value: 72
  misc_feature: MA Experiment 20000480 PARAMETER Experiment Name: Zm_Drought_P Parameter: Tissue Value: Aerial
  misc_feature: MA Experiment 20000480 PARAMETER Experiment Name: Zm_Drought_P Parameter: Treatment Value: Drought vs. No Drought
gcacgagaccattacctagaacatcctaatcgaaaagaccaatcgttcctatgaagatcaccgtgcagtcgtcgaagctggtcacgggcagctccagcggcggtcgtccttcttccgccgatgccgccgaggcggtcccgctcacggtgttcgacaagctccactacgatctgtacgtgcatgccttatacttcttccacccgccagcgccgcccagctccgtcctcgaggccgggctcgccgccgcgctggccgagtacccggagtaggccgggcggctcggcgtggacgcgcgcggcaaccgcgccatcctgctcaacggcgcgggcgcgcggctcgtcgaagccacggccgccgccgccgacgtctgctcgctcgacagcgtcgtgccgccggagccagcgactcccgcgaccatgagcctgcaccccagcgccgaggacgccgtcgacggcgaggtcctgctgctccaggtcacgcggttcgcctgcggctccttcgtcgtgggcacggcggtgcagcatgtcgtcggcgacggcgccgccttccactgcttcgtgagcgcctggggccaggcctcgcgcggcgccgccgtggaccccgcgcccgtgcacgaccgcgtgtccttcttcgtgccccggcacccgcccttggtcgagttcgagcaccgcggcgcggagtacaagcggccgcctcgccctcgcgagggcgaggagaaggccgggggcagcgagtcaggggccaaggccaaggccaacgccgacgtcggcgaaaagcagctggtgacgcgtagggtgaactttagccgagagttcgtcgccgagctcaagacgagggcgtcagcgggggcgcccttgccgcggcggtacagcacgctgcagtgcgtggcggcgcacctgtggcggtgcgtgacgagggcgcggaggctcgacgcgcgcgcccgcaccaccctccgcatcgccgtgaacgggcggtcgcggatgaggaacccgcgggtgcccgaggcgtacgccggcaacgtcgtgctctgggcgcgggcgaccgcggccgcaggcggcctggtacggagcccgctcccggaggccgtgcggctcgtgtccgaggcggtggcggccgtggacgacgcctacttcaggtccgtcatcgacttcgccagctccggggccctggaggaggaaggcctggtgccggcggccgacccgttggagacggtgttcagcccggacgtcgaggtgtacagcctgctgggggcctcgttccaggacttcgacttcggcggtggcccgcccttcttcttcatgccgagctactcgcccgtggagggcgccgtattcgtcgtgtcgtctttctccggcgacggcagtatcgacgcctacgtccctctcttcagccacgcgatggacatcttcgacaaatgctgccactccctgcctgctgcggacgcacgactttaggcgcgttgactttgcttcgtccgagatgatacatttcgtgaaataatcatttgcaaaaaaaagaagtaagatggattcggttatcatgtcaggagatgaatattaaggtagataattaagatatttcct

SEQ ID NO: 3159 - protein, 345 aa, Zea mays subsp. mays
  peptide (1)..(345): Ceres Seq. ID no. 12362522
  misc_feature (1)..(90): Pfam Name: Transferase family Pfam Description: Transferase family
  misc_feature (1)..(192): Homolog of NCBI NO: 32490471 NR Description: putative anthranilate N-benzoyltransferase
  misc_feature (1)..(90): Homolog of NCBI NO: 30025135 NR Description: agmatine coumaroyltransferase [Hordeum vulgare]
  misc_feature (1)..(90): Homolog of NCBI NO: 37533700 NR Description: putative anthranilate N-benzoyltransferase
  misc_feature (127)..(338): Homolog of NCBI NO: 37533700 NR Description: putative anthranilate N-benzoyltransferase
  misc_feature (1)..(338): Homolog of NCBI NO: 30025137 NR Description: putative agmatine coumaroyltransferase [Triticum
  misc_feature (1)..(338): Homolog of NCBI NO: 30025135 NR Description: agmatine coumaroyltransferase [Hordeum vulgare]
  misc_feature (1)..(338): Homolog of NCBI NO: 32490472 NR Description: putative anthranilate N-benzoyltransferase
  misc_feature (50)..(337): Homolog of NCBI NO: 32488651 NR Description: OSJNBa0087O24.1 [Oryza sativa (japonica
  misc_feature (1)..(338): Homolog of NCBI NO: 31712073 NR Description: putative hydroxycinnamoyl transferase
  misc_feature (1)..(339): Homolog of NCBI NO: 32488652 NR Description: OSJNBa0087O24.2 [Oryza sativa (japonica
MSLHPSAEDAVDGEVLLLQVTRFACGSFVVGTAVQHVVGDGAAFHCFVSAWGQASRGAAVDPAPVHDRVSFFVPRHPPLVEFEHRGAEYKRPPRPREGEEKAGGSESGAKAKANADVGEKQLVTRRVNFSREFVAELKTRASAGAPLPRRYSTLQCVAAHLWRCVTRARRLDARARTTLRIAVNGRSRMRNPRVPEAYAGNVVLWARATAAAGGLVRSPLPEAVRLVSEAVAAVDDAYFRSVIDFASSGALEEEGLVPAADPLETVFSPDVEVYSLLGASFQDFDFGGGPPFFFMPSYSPVEGAVFVVSSFSGDGSIDAYVPLFSHAMDIFDKCCHSLPAADARL

SEQ ID NO: 3160 - DNA, 1743 bp, Zea mays subsp. mays
  misc_feature (1)..(1743): Ceres Seq. ID no. 12348976
  misc_feature: MA Experiment ID: 108522 Result: Down-regulated in Transcription
  misc_feature: MA Experiment 108522 PARAMETER Experiment Name: Zm_42deg_Heat_P Parameter: Age (day) Value: 8
  misc_feature: MA Experiment 108522 PARAMETER Experiment Name: Zm_42deg_Heat_P Parameter: Organism Value: Zea mays
  misc_feature: MA Experiment 108522 PARAMETER Experiment Name: Zm_42deg_Heat_P Parameter: Plant Line Value: 35A19
  misc_feature: MA Experiment 108522 PARAMETER Experiment Name: Zm_42deg_Heat_P Parameter: Temperature (deg C) Value: 42 vs. 22
  misc_feature: MA Experiment 108522 PARAMETER Experiment Name: Zm_42deg_Heat_P Parameter: Timepoint (hr) Value: 1
  misc_feature: MA Experiment 108522 PARAMETER Experiment Name: Zm_42deg_Heat_P Parameter: Tissue Value: Aerial
  misc_feature: MA Experiment ID: 108543 Result: Down-regulated in Transcription
acgacgctactcgtcctcatccagtcacgaaaaatcggaatctctgaaaaatcctccgtaccatgaagctccggttgcgatctatgcaggcgcgcggcggctccgccgccgtggagacccaccgcgtggacctgccgcccacggccactctggccgacgtgaagaccctcctcgcgtcgaagctctctgcggcgcaacccgtccccgccgagtccgtccgcctctccctcaaccgtagcgaggagctcgtctcgccggaccctgccgctacgctcccgtccctcggcctcgcgtccggtgatctcgtatttttcaccctatcccccctcacggccctagcgccgccggctcaggccctgccacggaaccctagcccgagctctggcgctgcagcgtcgatcgctgaggctgccgaccgcgggaagggttcgaagcaatctggtactggagatttctcttcctcgtcactggcgcaggctgtggttgtgagccctagctttccggtcgcttccggtacgcgggatgtggtgatggaggaggaggccgtcgatgccacaaagggctggtcgagttttgtgcttagggatctcaagagggagatggacaacgtcggggccgcggagggaaccgccgcaggtcgcctggttgcggccttgcatgcagctctgcttgatgccggttttctcaccgctaaactgacgggctctcacctttcgctgcctcagggctggccgtcaggtgctttgaagccattgaccatcaagtatactataccagagctttcatcaatggtatctgtgactgaggaaggaaaggtggtggtgctgaactactccttgatggccaatttcgtgatggtttatgggtatgttcctggggcacagtctgaggtttgccggttgtgcttggagttgccggggctggagcctctactttatctggatggcgatcagctgaatggagtgcatgagaagggagttcatgatctgtggagagtgctgaaggatgagatttgcctgccactgatgatatcattgtgccaactgaacggtctgccttgccgccttgcttgatggctttgcctgctgatctcaagactaaggtattggggtttttacctggggttgatcttgcaaaggttgagtgcacatgcaaggaaatgatgaatcttgcatcagatgatagtatctggaagaagcttgtatccaagtttgaaaattatggcgagggctctaggctggcaggcaagaatgcaaaggccatatttgtagaagcttggcaggccaataagagacggcagaagaggcccaatccaaccttttggaactatggctggggaaacagtccttatagccgcccacttaggctgccattgattggtggggactcggacagacttccttttattgggaatcatggttctgttgggcgccactttggaaatcaacgaaggaatatctcaccgaactgcattcttgatggtcaccgtcataacttcctttgaagccatgtcaatgagttttacttgtatgttaagagtgttttataaggacttcaatggtgcatatacggttagaccgccttgttcatatcgtcaagtcgcacacttatgcttgtgcacagcactcttatgatcttatcctaatatatccccttagtatcttagatcgtatctttactatctttttttggtaccaaatgtaatccagtgtcctagtaataaagtacccttgttctattctc

SEQ ID NO: 3161 - protein, 336 aa, Zea mays subsp. mays
  peptide (1)..(336): Ceres Seq. ID no. 12348977
  misc_feature (1)..(333): Homolog of NCBI NO: 18395296 NR Description: expressed protein
  misc_feature (1)..(336): Homolog of NCBI NO: 27311243 NR Description: Hypothetical protein [Oryza sativa (japonica
MKLRLRSMQARGGSAAVETHRVDLPPTATLADVKTLLASKLSAAQPVPAESVRLSLNRSEELVSPDPAATLPSLGLASGDLVFFTLSPLTALAPPAQALPRNPSPSSGAAASIAEAADRGKGSKQSGTGDFSSSSLAQAVVVSPSFPVASGTRDVVMEEEAVDATKGWSSFVLRDLKREMDNVGAAEGTAAGRLVAALHAALLDAGFLTAKLTGSHLSLPQGWPSGALKPLTIKYTIPELSSMVSVTEEGKVVVLNYSLMANFVMVYGYVPGAQSEVCRLCLELPGLEPLLYLDGDQLNGVHEKGVHDLWRVLKDEICLPLMISLCQLNGLPCRLA

SEQ ID NO: 3162 - protein, 329 aa, Zea mays subsp. mays
  peptide (1)..(329): Ceres Seq. ID no. 12348978
  misc_feature (1)..(326): Homolog of NCBI NO: 18395296 NR Description: expressed protein
  misc_feature (1)..(329): Homolog of NCBI NO: 27311243 NR Description: Hypothetical protein [Oryza sativa (japonica
MQARGGSAAVETHRVDLPPTATLADVKTLLASKLSAAQPVPAESVRLSLNRSEELVSPDPAATLPSLGLASGDLVFFTLSPLTALAPPAQALPRNPSPSSGAAASIAEAADRGKGSKQSGTGDFSSSSLAQAVVVSPSFPVASGTRDVVMEEEAVDATKGWSSFVLRDLKREMDNVGAAEGTAAGRLVAALHAALLDAGFLTAKLTGSHLSLPQGWPSGALKPLTIKYTIPELSSMVSVTEEGKVVVLNYSLMANFVMVYGYVPGAQSEVCRLCLELPGLEPLLYLDGDQLNGVHEKGVHDLWRVLKDEICLPLMISLCQLNGLPCRLA

SEQ ID NO: 3163 - protein, 180 aa, Zea mays subsp. mays
  peptide (1)..(180): Ceres Seq. ID no. 12348979
  misc_feature (1)..(177): Homolog of NCBI NO: 18395296 NR Description: expressed protein
  misc_feature (1)..(180): Homolog of NCBI NO: 27311243 NR Description: Hypothetical protein [Oryza sativa (japonica
MEEEAVDATKGWSSFVLRDLKREMDNVGAAEGTAAGRLVAALHAALLDAGFLTAKLTGSHLSLPQGWPSGALKPLTIKYTIPELSSMVSVTEEGKVVVLNYSLMANFVMVYGYVPGAQSEVCRLCLELPGLEPLLYLDGDQLNGVHEKGVHDLWRVLKDEICLPLMISLCQLNGLPCRLA

SEQ ID NO: 3164 - DNA, 1993 bp, Zea mays subsp. mays
  misc_feature (1)..(1993): Ceres Seq. ID no. 12352173
  misc_feature: MA Experiment ID: 108515 Result: Up-regulated in Transcription
  misc_feature: MA Experiment 108515 PARAMETER Experiment Name: Zm_2mM_SA_P Parameter: Age (day) Value: 8
  misc_feature: MA Experiment 108515 PARAMETER Experiment Name: Zm_2mM_SA_P Parameter: Organism Value: Zea mays
  misc_feature: MA Experiment 108515 PARAMETER Experiment Name: Zm_2mM_SA_P Parameter: Plant Line Value: 35A19
  misc_feature: MA Experiment 108515 PARAMETER Experiment Name: Zm_2mM_SA_P Parameter: Timepoint (hr) Value: 12
  misc_feature: MA Experiment 108515 PARAMETER Experiment Name: Zm_2mM_SA_P Parameter: Tissue Value: Aerial
  misc_feature: MA Experiment 108515 PARAMETER Experiment Name: Zm_2mM_SA_P Parameter: Treatment Value: 2mM SA vs. No Treatment
  misc_feature: MA Experiment ID: 108527 Result: Up-regulated in Transcription
  misc_feature: MA Experiment 108527 PARAMETER Experiment Name: Zm_5mM_NO_P Parameter: Age (day) Value: 8
  misc_feature: MA Experiment 108527 PARAMETER Experiment Name: Zm_5mM_NO_P Parameter: Organism Value: Zea mays
  misc_feature: MA Experiment 108527 PARAMETER Experiment Name: Zm_5mM_NO_P Parameter: Plant Line Value: 35A19
  misc_feature: MA Experiment 108527 PARAMETER Experiment Name: Zm_5mM_NO_P Parameter: Timepoint (hr) Value: 6
  misc_feature: MA Experiment 108527 PARAMETER Experiment Name: Zm_5mM_NO_P Parameter: Tissue Value: Aerial
  misc_feature: MA Experiment 108527 PARAMETER Experiment Name: Zm_5mM_NO_P Parameter: Treatment Value: 5mM NO vs. No Treatment
  misc_feature: MA Experiment ID: 108543 Result: Down-regulated in Transcription
  misc_feature: MA Experiment ID: 20000477 Result: Up-regulated in Transcription
  misc_feature: MA Experiment 20000477 PARAMETER Experiment Name: Zm_5mM_SA_P Parameter: Age (day) Value: 10
  misc_feature: MA Experiment 20000477 PARAMETER Experiment Name: Zm_5mM_SA_P Parameter: Organism Value: Zea mays
  misc_feature: MA Experiment 20000477 PARAMETER Experiment Name: Zm_5mM_SA_P Parameter: Plant Line Value: 35A19
  misc_feature: MA Experiment 20000477 PARAMETER Experiment Name: Zm_5mM_SA_P Parameter: Timepoint (hr) Value: 48
  misc_feature: MA Experiment 20000477 PARAMETER Experiment Name: Zm_5mM_SA_P Parameter: Tissue Value: Aerial
  misc_feature: MA Experiment 20000477 PARAMETER Experiment Name: Zm_5mM_SA_P Parameter: Treatment Value: 5mM SA vs. No Treatment
  misc_feature: MA Experiment ID: 20000478 Result: Up-regulated in Transcription
  misc_feature: MA Experiment 20000478 PARAMETER Experiment Name: Zm_5mM_SA_P Parameter: Age (day) Value: 11
  misc_feature: MA Experiment 20000478 PARAMETER Experiment Name: Zm_5mM_SA_P Parameter: Organism Value: Zea mays
  misc_feature: MA Experiment 20000478 PARAMETER Experiment Name: Zm_5mM_SA_P Parameter: Plant Line Value: 35A19
  misc_feature: MA Experiment 20000478 PARAMETER Experiment Name: Zm_5mM_SA_P Parameter: Timepoint (hr) Value: 72
  misc_feature: MA Experiment 20000478 PARAMETER Experiment Name: Zm_5mM_SA_P Parameter: Tissue Value: Aerial
  misc_feature: MA Experiment 20000478 PARAMETER Experiment Name: Zm_5mM_SA_P Parameter: Treatment Value: 5mM SA vs. No Treatment
  misc_feature: MA Experiment ID: 20000479 Result: Up-regulated in Transcription
  misc_feature: MA Experiment 20000479 PARAMETER Experiment Name: Zm_Drought_P Parameter: Age (day) Value: 10
  misc_feature: MA Experiment 20000479 PARAMETER Experiment Name: Zm_Drought_P Parameter: Organism Value: Zea mays
  misc_feature: MA Experiment 20000479 PARAMETER Experiment Name: Zm_Drought_P Parameter: Plant Line Value: 35A19
  misc_feature: MA Experiment 20000479 PARAMETER Experiment Name: Zm_Drought_P Parameter: Timepoint (hr) Value: 48
  misc_feature: MA Experiment 20000479 PARAMETER Experiment Name: Zm_Drought_P Parameter: Tissue Value: Aerial
  misc_feature: MA Experiment 20000479 PARAMETER Experiment Name: Zm_Drought_P Parameter: Treatment Value: Drought vs. No Drought
  misc_feature: MA Experiment ID: 20000480 Result: Up-regulated in Transcription
  misc_feature: MA Experiment 20000480 PARAMETER Experiment Name: Zm_Drought_P Parameter: Age (day) Value: 11
  misc_feature: MA Experiment 20000480 PARAMETER Experiment Name: Zm_Drought_P Parameter: Organism Value: Zea mays
  misc_feature: MA Experiment 20000480 PARAMETER Experiment Name: Zm_Drought_P Parameter: Plant Line Value: 35A19
  misc_feature: MA Experiment 20000480 PARAMETER Experiment Name: Zm_Drought_P Parameter: Timepoint (hr) Value: 72
  misc_feature: MA Experiment 20000480 PARAMETER Experiment Name: Zm_Drought_P Parameter: Tissue Value: Aerial
  misc_feature: MA Experiment 20000480 PARAMETER Experiment Name: Zm_Drought_P Parameter: Treatment Value: Drought vs. No Drought
  misc_feature: MA Experiment ID: 20000535 Result: Down-regulated in Transcription
  misc_feature: MA Experiment 20000535 PARAMETER Experiment Name: Zm_Hybrid_Seed_Dev_P Parameter: DAP Value: 30 vs. 12
  misc_feature: MA Experiment 20000535 PARAMETER Experiment Name: Zm_Hybrid_Seed_Dev_P Parameter: Organism Value: Zea mays
  misc_feature: MA Experiment 20000535 PARAMETER Experiment Name: Zm_Hybrid_Seed_Dev_P Parameter: Plant Line Value: 35A19
  misc_feature: MA Experiment 20000535 PARAMETER Experiment Name: Zm_Hybrid_Seed_Dev_P Parameter: Tissue Value: Embryo vs. Unfert Floret
  misc_feature: MA Experiment ID: 20000626 Result: Up-regulated in Transcription
  misc_feature: MA Experiment 20000626 PARAMETER Experiment Name: Zm_Herbicide-Treatments_P Parameter: Timepoint (hr) Value: 12
  misc_feature: MA Experiment 20000626 PARAMETER Experiment Name: Zm_Herbicide-Treatments_P Parameter: Tissue Value: Aerial
  misc_feature: MA Experiment 20000626 PARAMETER Experiment Name: Zm_Herbicide-Treatments_P Parameter: Treatment Value: Roundup vs. No Treatment
  misc_feature: MA Experiment ID: 20000627 Result: Up-regulated in Transcription
  misc_feature: MA Experiment 20000627 PARAMETER Experiment Name: Zm_Herbicide-Treatments_P Parameter: Timepoint (hr) Value: 12
  misc_feature: MA Experiment 20000627 PARAMETER Experiment Name: Zm_Herbicide-Treatments_P Parameter: Tissue Value: Aerial
  misc_feature: MA Experiment 20000627 PARAMETER Experiment Name: Zm_Herbicide-Treatments_P Parameter: Treatment Value: Finale vs. No Treatment
  misc_feature: MA Experiment ID: 20000630 Result: Up-regulated in Transcription
  misc_feature: MA Experiment 20000630 PARAMETER Experiment Name: Zm_Herbicide-Treatments_P Parameter: Timepoint (hr) Value: 4
  misc_feature: MA Experiment 20000630 PARAMETER Experiment Name: Zm_Herbicide-Treatments_P Parameter: Tissue Value: Aerial
  misc_feature: MA Experiment 20000630 PARAMETER Experiment Name: Zm_Herbicide-Treatments_P Parameter: Treatment Value: Roundup vs. No Treatment
attagaatagccaggggcctcgctcctctccaccacgtactccactccatccatccatcatcgtctatccatgaagagcttgcaggaggagagggcggcgttggtgccgtcgccgtggccccagcaacagagaaaggacggcggcgagcatgatccggagcagctgatggatgaggatgacggtgacgatgaggaggatctgcaggatgagcagcacacaagaacaattaggacgtcgaccaagacggcggaagcatcgtcatcagcggagcggcgggtgccggcgtggtggaggcggcggcgggcgcagaagctggtgcccaccagaggtgttggcctggtcatcgccggtctcctcgtgctggtcttgctcgtcgtcgtcggcggcggcggcaacaccagtcgtcgtcgctggatccacctcgactatgcatcgtcgtttctgctaggcagcggcggcggcggcggcttgaagcagcatcaatggcctcctcaccacgtcccttcacccgcagcggacctcgtgcccatacccttcagctgcggcggcaacggctcggcatgtccccgtcgtcaaaccgcaacatcacccccctctccgtcgccgtcatcgtcatcgccaccagcagccaccaagtcatcatcgtccaagaataaacaaccccctcctcagtgcccggattacttccgcttcatccactccgacctgtcgccgtggcgcgagacggggatcacgcgcgaggcggtggagcgggggcgccaccgggcggcgttccggctggtggtcgtggacggccgcgcgtacgtggagacgtaccaccgcgtgttccagacgcgtgacaccttcacgcagtggggcatcgcgcagctgctggcgcgctaccccggacgcgtcccggacctggacctcatgttcaactgcgaggacatgcccgaggtcaaggtcaagccgtcggaggagtcgtccgcgccgccgctgttccgctactgcaaggacgactccacggtggacatcgtgttcccggactggtccttctggggctggcccgaggtcaacatccgtccctgggcgccgctgctggaggagatggccgccgagatgggtcgcctgccgtgggcggaccgggagccgtacgcgtactggaagggcaaccccaccgtgtccgccgagcgcgccgacctccgccgctgcaacgactcctcgtcgtccggcggcacgcgcgtgttctggcaggactggggcgccgccatccgggacggcttccgggactccaacctggccaagcagtgccgctaccgctacaagatctacgtgcgtggccggtcctggtcggtcagcctcaagtacatcctcgcctgcgactcgccggtgctgctcatcgccacgcccttcaaggacttcttctcccggggcctcgtcgccggcaggcactactggcccatcgaccccggagcccgcaagtgcgccgacatcaacttcgccgtccacgactggggcaacgcgcacccggagcaggcgcgccggatggcggaggaaggcagcggcttcgcgcgccaccagctcagcatggactacgtctacgactacatgctgcacctgctcacccagtacgccggcctgctccgctacaagcccaccgtgccggagaacgccgtagagctgtgcgccgagaccgtcgcctgccccgctgcgcaccacagcaacaggagggagttcgacttcatgatgcagtccagggagaggtacatcgccgactaccagccctgcacgctgccgccgccctttaccgaccgtcacatcagggagatgacgcgaagagaccaggaggtgcgcgccaacgtgcacaagatgatgaccaccgtcactccatgacgtcaccaattaagggattctcttgttctctatctatctatctatcttgaatatccacttcgttatactacgtcctggtctctgtctctataatattaaaatatcagttttaatggtctt

SEQ ID NO: 3165 - protein, 600 aa, Zea mays subsp. mays
  peptide (1)..(600): Ceres Seq. ID no. 12352174
  misc_feature (198)..(593): Pfam Name: Arabidopsis thaliana protein of unknown function Pfam Description: Arabidopsis thaliana protein of unknown
  misc_feature (393)..(593): Homolog of NCBI NO: 25404907 NR Description: protein F2K11.20 [imported] - Arabidopsis
  misc_feature (141)..(388): Homolog of NCBI NO: 25404907 NR Description: protein F2K11.20 [imported] - Arabidopsis
  misc_feature (228)..(588): Homolog of NCBI NO: 21742339 NR Description: OSJNBb0020O11.18 [Oryza sativa (japonica
  misc_feature (161)..(591): Homolog of NCBI NO: 15233070 NR Description: putative protein; protein id: At3g61270.1
  misc_feature (141)..(593): Homolog of NCBI NO: 15222413 NR Description: hypothetical protein; protein id: At1g63420.1
  misc_feature (167)..(591): Homolog of NCBI NO: 7486461 NR Description: hypothetical protein At2g45830 [imported] -
  misc_feature (160)..(586): Homolog of NCBI NO: 38346998 NR Description: OSJNBb0039L24.21 [Oryza sativa (japonica
  misc_feature (170)..(591): Homolog of NCBI NO: 15237842 NR Description: putative protein; protein id: At5g23850.1
  misc_feature (161)..(593): Homolog of NCBI NO: 15229061 NR Description: putative protein; protein id: At3g48980.1
  misc_feature (25)..(597): Homolog of NCBI NO: 38637028 NR Description: unknown protein [Oryza sativa (japonica
MKSLQEERAALVPSPWPQQQRKDGGEHDPEQLMDEDDGDDEEDLQDEQHTRTIRTSTKTAEASSSAERRVPAWWRRRRAQKLVPTRGVGLVIAGLLVLVLLVVVGGGGNTSRRRWIHLDYASSFLLGSGGGGGLKQHQWPPHHVPSPAADLVPIPFSCGGNGSACPRRQTATSPPSPSPSSSSPPAATKSSSSKNKQPPPQCPDYFRFIHSDLSPWRETGITREAVERGRHRAAFRLVVVDGRAYVETYHRVFQTRDTFTQWGIAQLLARYPGRVPDLDLMFNCEDMPEVKVKPSEESSAPPLFRYCKDDSTVDIVFPDWSFWGWPEVNIRPWAPLLEEMAAEMGRLPWADREPYAYWKGNPTVSAERADLRRCNDSSSSGGTRVFWQDWGAAIRDGFRDSNLAKQCRYRYKIYVRGRSWSVSLKYILACDSPVLLIATPFKDFFSRGLVAGRHYWPIDPGARKCADINFAVHDWGNAHPEQARRMAEEGSGFARHQLSMDYVYDYMLHLLTQYAGLLRYKPTVPENAVELCAETVACPAAHHSNRREFDFMMQSRERYIADYQPCTLPPPFTDRHIREMTRRDQEVRANVHKMMTTVTP

SEQ ID NO: 3166 - protein, 568 aa, Zea mays subsp. mays
  peptide (1)..(568): Ceres Seq. ID no. 12352175
  misc_feature (166)..(561): Pfam Name: Arabidopsis thaliana protein of unknown function Pfam Description: Arabidopsis thaliana protein of unknown
  misc_feature (361)..(561): Homolog of NCBI NO: 25404907 NR Description: protein F2K11.20 [imported] - Arabidopsis
  misc_feature (109)..(356): Homolog of NCBI NO: 25404907 NR Description: protein F2K11.20 [imported] - Arabidopsis
  misc_feature (196)..(556): Homolog of NCBI NO: 21742339 NR Description: OSJNBb0020O11.18 [Oryza sativa (japonica
  misc_feature (129)..(559): Homolog of NCBI NO: 15233070 NR Description: putative protein; protein id: At3g61270.1
  misc_feature (109)..(561): Homolog of NCBI NO: 15222413 NR Description: hypothetical protein; protein id: At1g63420.1
  misc_feature (135)..(559): Homolog of NCBI NO: 7486461 NR Description: hypothetical protein At2g45830 [imported] -
  misc_feature (128)..(554): Homolog of NCBI NO: 38346998 NR Description: OSJNBb0039L24.21 [Oryza sativa (japonica
  misc_feature (138)..(559): Homolog of NCBI NO: 15237842 NR Description: putative protein; protein id: At5g23850.1
  misc_feature (129)..(561): Homolog of NCBI NO: 15229061 NR Description: putative protein; protein id: At3g48980.1
  misc_feature (1)..(565): Homolog of NCBI NO: 38637028 NR Description: unknown protein [Oryza sativa (japonica
MDEDDGDDEEDLQDEQHTRTIRTSTKTAEASSSAERRVPAWWRRRRAQKLVPTRGVGLVIAGLLVLVLLVVVGGGGNTSRRRWIHLDYASSFLLGSGGGGGLKQHQWPPHHVPSPAADLVPIPFSCGGNGSACPRRQTATSPPSPSPSSSSPPAATKSSSSKNKQPPPQCPDYFRFIHSDLSPWRETGITREAVERGRHRAAFRLVVVDGRAYVETYHRVFQTRDTFTQWGIAQLLARYPGRVPDLDLMFNCEDMPEVKVKPSEESSAPPLFRYCKDDSTVDIVFPDWSFWGWPEVNIRPWAPLLEEMAAEMGRLPWADREPYAYWKGNPTVSAERADLRRCNDSSSSGGTRVFWQDWGAAIRDGFRDSNLAKQCRYRYKIYVRGRSWSVSLKYILACDSPVLLIATPFKDFFSRGLVAGRHYWPIDPGARKCADINFAVHDWGNAHPEQARRMAEEGSGFARHQLSMDYVYDYMLHLLTQYAGLLRYKPTVPENAVELCAETVACPAAHHSNRREFDFMMQSRERYIADYQPCTLPPPFTDRHIREMTRRDQEVRANVHKMMTTVTP

SEQ ID NO: 3167 - protein, 320 aa, Zea mays subsp. mays
  peptide (1)..(320): Ceres Seq. ID no. 12352176
  misc_feature (1)..(313): Pfam Name: Arabidopsis thaliana protein of unknown function Pfam Description: Arabidopsis thaliana protein of unknown
  misc_feature (113)..(313): Homolog of NCBI NO: 25404907 NR Description: protein F2K11.20 [imported] - Arabidopsis
  misc_feature (1)..(108): Homolog of NCBI NO: 25404907 NR Description: protein F2K11.20 [imported] - Arabidopsis
  misc_feature (1)..(308): Homolog of NCBI NO: 21742339 NR Description: OSJNBb0020O11.18 [Oryza sativa (japonica
  misc_feature (1)..(311): Homolog of NCBI NO: 15233070 NR Description: putative protein; protein id: At3g61270.1
  misc_feature (1)..(313): Homolog of NCBI NO: 15222413 NR Description: hypothetical protein; protein id: At1g63420.1
  misc_feature (1)..(311): Homolog of NCBI NO: 7486461 NR Description: hypothetical protein At2g45830 [imported] -
  misc_feature (1)..(306): Homolog of NCBI NO: 38346998 NR Description: OSJNBb0039L24.21 [Oryza sativa (japonica
  misc_feature (1)..(311): Homolog of NCBI NO: 15237842 NR Description: putative protein; protein id: At5g23850.1
  misc_feature (1)..(313): Homolog of NCBI NO: 15229061 NR Description: putative protein; protein id: At3g48980.1
  misc_feature (1)..(317): Homolog of NCBI NO: 38637028 NR Description: unknown protein [Oryza sativa (japonica
MFNCEDMPEVKVKPSEESSAPPLFRYCKDDSTVDIVFPDWSFWGWPEVNIRPWAPLLEEMAAEMGRLPWADREPYAYWKGNPTVSAERADLRRCNDSSSSGGTRVFWQDWGAAIRDGFRDSNLAKQCRYRYKIYVRGRSWSVSLKYILACDSPVLLIATPFKDFFSRGLVAGRHYWPIDPGARKCADINFAVHDWGNAHPEQARRMAEEGSGFARHQLSMDYVYDYMLHLLTQYAGLLRYKPTVPENAVELCAETVACPAAHHSNRREFDFMMQSRERYIADYQPCTLPPPFTDRHIREMTRRDQEVRANVHKMMTTVTP

SEQ ID NO: 3168 - DNA, 1676 bp, Zea mays subsp. mays
  misc_feature (1)..(1676): Ceres Seq. ID no. 12357283
  misc_feature: MA Experiment ID: 108515 Result: Up-regulated in Transcription
  misc_feature: MA Experiment 108515 PARAMETER Experiment Name: Zm_2mM_SA_P Parameter: Age (day) Value: 8
  misc_feature: MA Experiment 108515 PARAMETER Experiment Name: Zm_2mM_SA_P Parameter: Organism Value: Zea mays
  misc_feature: MA Experiment 108515 PARAMETER Experiment Name: Zm_2mM_SA_P Parameter: Plant Line Value: 35A19
  misc_feature: MA Experiment 108515 PARAMETER Experiment Name: Zm_2mM_SA_P Parameter: Timepoint (hr) Value: 12
  misc_feature: MA Experiment 108515 PARAMETER Experiment Name: Zm_2mM_SA_P Parameter: Tissue Value: Aerial
  misc_feature: MA Experiment 108515 PARAMETER Experiment Name: Zm_2mM_SA_P Parameter: Treatment Value: 2mM SA vs. No Treatment
  misc_feature: MA Experiment ID: 108526 Result: Up-regulated in Transcription
  misc_feature: MA Experiment 108526 PARAMETER Experiment Name: Zm_5mM_NO_P Parameter: Age (day) Value: 8
  misc_feature: MA Experiment 108526 PARAMETER Experiment Name: Zm_5mM_NO_P Parameter: Organism Value: Zea mays
  misc_feature: MA Experiment 108526 PARAMETER Experiment Name: Zm_5mM_NO_P Parameter: Plant Line Value: 35A19
  misc_feature: MA Experiment 108526 PARAMETER Experiment Name: Zm_5mM_NO_P Parameter: Timepoint (hr) Value: 1
  misc_feature: MA Experiment 108526 PARAMETER Experiment Name: Zm_5mM_NO_P Parameter: Tissue Value: Aerial
  misc_feature: MA Experiment 108526 PARAMETER Experiment Name: Zm_5mM_NO_P Parameter: Treatment Value: 5mM NO vs. No Treatment
  misc_feature: MA Experiment ID: 108527 Result: Up-regulated in Transcription
  misc_feature: MA Experiment 108527 PARAMETER Experiment Name: Zm_5mM_NO_P Parameter: Age (day) Value: 8
  misc_feature: MA Experiment 108527 PARAMETER Experiment Name: Zm_5mM_NO_P Parameter: Organism Value: Zea mays
  misc_feature: MA Experiment 108527 PARAMETER Experiment Name: Zm_5mM_NO_P Parameter: Plant Line Value: 35A19
  misc_feature: MA Experiment 108527 PARAMETER Experiment Name: Zm_5mM_NO_P Parameter: Timepoint (hr) Value: 6
  misc_feature: MA Experiment 108527 PARAMETER Experiment Name: Zm_5mM_NO_P Parameter: Tissue Value: Aerial
  misc_feature: MA Experiment 108527 PARAMETER Experiment Name: Zm_5mM_NO_P Parameter: Treatment Value: 5mM NO vs. No Treatment
  misc_feature: MA Experiment ID: 108534 Result: Up-regulated in Transcription
  misc_feature: MA Experiment 108534 PARAMETER Experiment Name: Zm_4deg_Cold_P Parameter: Age (hr) Value: 8
  misc_feature: MA Experiment 108534 PARAMETER Experiment Name: Zm_4deg_Cold_P Parameter: Organism Value: Zea mays
  misc_feature: MA Experiment 108534 PARAMETER Experiment Name: Zm_4deg_Cold_P Parameter: Plant Line Value: 35A19
  misc_feature: MA Experiment 108534 PARAMETER Experiment Name: Zm_4deg_Cold_P Parameter: Temperature (deg C) Value: 4 vs. 22
  misc_feature: MA Experiment 108534 PARAMETER Experiment Name: Zm_4deg_Cold_P Parameter: Timepoint (hr) Value: 6
  misc_feature: MA Experiment 108534 PARAMETER Experiment Name: Zm_4deg_Cold_P Parameter: Tissue Value: Aerial
  misc_feature: MA Experiment ID: 108536 Result: Down-regulated in Transcription
  misc_feature: MA Experiment 108536 PARAMETER Experiment Name: Zm_Meristem_P Parameter: Age (day) Value: 8
  misc_feature: MA Experiment 108536 PARAMETER Experiment Name: Zm_Meristem_P Parameter: Organism Value: Zea mays
  misc_feature: MA Experiment 108536 PARAMETER Experiment Name: Zm_Meristem_P Parameter: Plant Line Value: 35A19
  misc_feature: MA Experiment 108536 PARAMETER Experiment Name: Zm_Meristem_P Parameter: Tissue Value: Shoot Meristem vs. Above Shoot Meristem
  misc_feature: MA Experiment ID: 108543 Result: Down-regulated in Transcription
  misc_feature: MA Experiment ID: 108559 Result: Up-regulated in Transcription
  misc_feature: MA Experiment 108559 PARAMETER Experiment Name: Zm_5mM_NO_P Parameter: Age (day) Value: 8
  misc_feature: MA Experiment 108559 PARAMETER Experiment Name: Zm_5mM_NO_P Parameter: Organism Value: Zea mays
  misc_feature: MA Experiment 108559 PARAMETER Experiment Name: Zm_5mM_NO_P Parameter: Plant Line Value: 35A19
  misc_feature: MA Experiment 108559 PARAMETER Experiment Name: Zm_5mM_NO_P Parameter: Timepoint (hr) Value: 12
  misc_feature: MA Experiment 108559 PARAMETER Experiment Name: Zm_5mM_NO_P Parameter: Tissue Value: Aerial
  misc_feature: MA Experiment 108559 PARAMETER Experiment Name: Zm_5mM_NO_P Parameter: Treatment Value: 5mM NO vs. No Treatment
  misc_feature: MA Experiment ID: 108688 Result: Down-regulated in Transcription
  misc_feature: MA Experiment 108688 PARAMETER Experiment Name: Zm_Embryos-Flowers__P Parameter: Tissue Value: Immature Flowers vs. Aerial+
  misc_feature: MA Experiment ID: 20000477 Result: Up-regulated in Transcription
  misc_feature: MA Experiment 20000477 PARAMETER Experiment Name: Zm_5mM_SA_P Parameter: Age (day) Value: 10
  misc_feature: MA Experiment 20000477 PARAMETER Experiment Name: Zm_5mM_SA_P Parameter: Organism Value: Zea mays
  misc_feature: MA Experiment 20000477 PARAMETER Experiment Name: Zm_5mM_SA_P Parameter: Plant Line Value: 35A19
  misc_feature: MA Experiment 20000477 PARAMETER Experiment Name: Zm_5mM_SA_P Parameter: Timepoint (hr) Value: 48
  misc_feature: MA Experiment 20000477 PARAMETER Experiment Name: Zm_5mM_SA_P Parameter: Tissue Value: Aerial
  misc_feature: MA Experiment 20000477 PARAMETER Experiment Name: Zm_5mM_SA_P Parameter: Treatment Value: 5mM SA vs. No Treatment
  misc_feature: MA Experiment ID: 20000478 Result: Up-regulated in Transcription
  misc_feature: MA Experiment 20000478 PARAMETER Experiment Name: Zm_5mM_SA_P Parameter: Age (day) Value: 11
  misc_feature: MA Experiment 20000478 PARAMETER Experiment Name: Zm_5mM_SA_P Parameter: Organism Value: Zea mays
  misc_feature: MA Experiment 20000478 PARAMETER Experiment Name: Zm_5mM_SA_P Parameter: Plant Line Value: 35A19
  misc_feature: MA Experiment 20000478 PARAMETER Experiment Name: Zm_5mM_SA_P Parameter: Timepoint (hr) Value: 72
  misc_feature: MA Experiment 20000478 PARAMETER Experiment Name: Zm_5mM_SA_P Parameter: Tissue Value: Aerial
  misc_feature: MA Experiment 20000478 PARAMETER Experiment Name: Zm_5mM_SA_P Parameter: Treatment Value: 5mM SA vs. No Treatment
  misc_feature: MA Experiment ID: 20000535 Result: Down-regulated in Transcription
  misc_feature: MA Experiment 20000535 PARAMETER Experiment Name: Zm_Hybrid_Seed_Dev_P Parameter: DAP Value: 30 vs. 12
  misc_feature: MA Experiment 20000535 PARAMETER Experiment Name: Zm_Hybrid_Seed_Dev_P Parameter: Organism Value: Zea mays
  misc_feature: MA Experiment 20000535 PARAMETER Experiment Name: Zm_Hybrid_Seed_Dev_P Parameter: Plant Line Value: 35A19
  misc_feature: MA Experiment 20000535 PARAMETER Experiment Name: Zm_Hybrid_Seed_Dev_P Parameter: Tissue Value: Embryo vs. Unfert Floret
  misc_feature: MA Experiment ID: 20000626 Result: Up-regulated in Transcription
  misc_feature: MA Experiment 20000626 PARAMETER Experiment Name: Zm_Herbicide-Treatments_P Parameter: Timepoint (hr) Value: 12
  misc_feature: MA Experiment 20000626 PARAMETER Experiment Name: Zm_Herbicide-Treatments_P Parameter: Tissue Value: Aerial
  misc_feature: MA Experiment 20000626 PARAMETER Experiment Name: Zm_Herbicide-Treatments_P Parameter: Treatment Value: Roundup vs. No Treatment
  misc_feature: MA Experiment ID: 20001610 Result: Down-regulated in Transcription
  misc_feature: MA Experiment 20001610 PARAMETER Experiment Name: Zm_50ppm_KNO3_L-to-H_P Parameter: Age (day) Value: 19
  misc_feature: MA Experiment 20001610 PARAMETER Experiment Name: Zm_50ppm_KNO3_L-to-H_P Parameter: Organism Value: Zea mays
  misc_feature: MA Experiment 20001610 PARAMETER Experiment Name: Zm_50ppm_KNO3_L-to-H_P Parameter: Plant Line Value: 35A19
  misc_feature: MA Experiment 20001610 PARAMETER Experiment Name: Zm_50ppm_KNO3_L-to-H_P Parameter: Timepoint (hr) Value: 2
  misc_feature: MA Experiment 20001610 PARAMETER Experiment Name: Zm_50ppm_KNO3_L-to-H_P Parameter: Tissue Value: Roots
  misc_feature: MA Experiment 20001610 PARAMETER Experiment Name: Zm_50ppm_KNO3_L-to-H_P Parameter: Treatment Value: 50ppm KNO3 vs. 50ppm KCl
cagatcttatcccttccagttccaggcagcatccccagcctgacgaaggaattgaggacgctcgagctcgagctacgtcaggatccaacaccaccatggttacgggaacaagaggacgttcgtgctctacccgtcgctgggcgtgggccacctgatcccgatggtggagctggccaagcacctcttgcgccacggccacggcgcgctcatcgccgtggtcaacccgcccgacaccgacgccgtgtcggccgccgcggtggagcgcctcgcggcggccaacccggccatcgcgttccgcctcctgccggtcccggccagcccggacgccggcgcggactgggtgaagcgcgacctggacacgctccggctcgccaaccccgtgctccgggacttcctgctccggtcccagcccgcagccgacgccgacgcgctcatcctcgacatgttctgcgtcgacgcgctcgacgtcgcggcggagctcggcgtcccggcctacttcttcttcgcctccgcggcgggggacctcgccatgttcctcaacctgccgtacctctaccccaccctgccgtcgttcagggacatgggcgaggcgccggtgcgctgccccggcatgccgccggtccgggcgatggacatgccgctgacggtgcaggacagggacagcgaccggaccaaggtccggatgtaccagttccgccgcatcccggaggggaggggcgtgctggtcaacagcttcgcctggctggagcccagggcactgagagcgctcggcgacggcgtctgcgtgcccggccgcccgacgccgagggtcttctgcgtcgggccactggtcaacgacggcagcagcacggcggggggcggggggaggcacgagtgcctggcgtggctggacgcgcagcctaagcggagcgtcgtgttcctctgcttcggcagcaagggctccttccccgccgcgcagttacaggagatcgcccacgggctggagagctccggccaccggttcctgtgggccgtgaggagcccgccggaagaaccggacacggacctggggaagctgcttcccgaagggttcctggacaggaacagagacagaggcatggtggtgaaggactgggtgccacaggcagaggtggtgcggcacgaggcggtccgcgcgttcgtcacgcactgcggctggaactccacgctcgaggccatcatgtctggcctgcccatgatatgctggccgctgtacgcggagcaggggctcaacaaggtgttcatggtggaggagtggaggatcggggtggagctgcgcgggtacgaaaagttcgtcaaggcggaggagctggaagcgaaggtcagactggtgatggaggctgaggaagggaggatcctccgggagaggctcgcggtggcgagggagaaggcgttgggggctactaaggaaggcgggtcttctgaagtggcattcgcggagttctttggagatttggacaagagcagctctccgtcggtaaacggagaatgcgattgaattgatcactggtgtgctggtgtggcagatggactgcgaacgtatatatactttaggattcaatatcacttagtattttgacagtacgagactaaaatattgcatctgtggtatgggaataaaattggattcaagcagagcgccacttgcgttgcgtgct

SEQ ID NO: 3169 - protein, 451 aa, Zea mays subsp. mays
  peptide (1)..(451): Ceres Seq. ID no. 12357284
  misc_feature (1)..(438): Pfam Name: UDP-glucoronosyl and UDP-glucosyl transferase Pfam Description: UDP-glucoronosyl and UDP-glucosyl transferase
  misc_feature (1)..(430): Homolog of NCBI NO: 18401158 NR Description: putative glucosyltransferase
  misc_feature (1)..(443): Homolog of NCBI NO: 34394683 NR Description: putative flavonol 3-O-glucosyltransferase
  misc_feature (1)..(430): Homolog of NCBI NO: 21593785 NR Description: putative glucosyltransferase [Arabidopsis
  misc_feature (1)..(432): Homolog of NCBI NO: 22535568 NR Description: putative glucosyltransferase
  misc_feature (1)..(438): Homolog of NCBI NO: 34908644 NR Description: putative flavonol 3-O-glucosyltransferase
  misc_feature (1)..(439): Homolog of NCBI NO: 34910206 NR Description: putative flavonol glucosyltransferase
  misc_feature (1)..(438): Homolog of NCBI NO: 34910218 NR Description: putative flavonol glucosyltransferase
  misc_feature (1)..(438): Homolog of NCBI NO: 34910204 NR Description: putative flavonol glucosyltransferase
  misc_feature (1)..(438): Homolog of NCBI NO: 34910228 NR Description: putative flavonol glucosyltransferase
  misc_feature (1)..(445): Homolog of NCBI NO: 34910222 NR Description: putative flavonol glucosyltransferase
MVELAKHLLRHGHGALIAVVNPPDTDAVSAAAVERLAAANPAIAFRLLPVPASPDAGADWVKRDLDTLRLANPVLRDFLLRSQPAADADALILDMFCVDALDVAAELGVPAYFFFASAAGDLAMFLNLPYLYPTLPSFRDMGEAPVRCPGMPPVRAMDMPLTVQDRDSDRTKVRMYQFRRIPEGRGVLVNSFAWLEPRALRALGDGVCVPGRPTPRVFCVGPLVNDGSSTAGGGGRHECLAWLDAQPKRSVVFLCFGSKGSFPAAQLQEIAHGLESSGHRFLWAVRSPPEEPDTDLGKLLPEGFLDRNRDRGMVVKDWVPQAEVVRHEAVRAFVTHCGWNSTLEAIMSGLPMICWPLYAEQGLNKVFMVEEWRIGVELRGYEKFVKAEELEAKVRLVMEAEEGRILRERLAVAREKALGATKEGGSSEVAFAEFFGDLDKSSSPSVNGECD

SEQ ID NO: 3170 - protein, 357 aa, Zea mays subsp. mays
  peptide (1)..(357): Ceres Seq. ID no. 12357285
  misc_feature (1)..(344): Pfam Name: UDP-glucoronosyl and UDP-glucosyl transferase Pfam Description: UDP-glucoronosyl and UDP-glucosyl transferase
  misc_feature (1)..(336): Homolog of NCBI NO: 18401158 NR Description: putative glucosyltransferase
  misc_feature (1)..(349): Homolog of NCBI NO: 34394683 NR Description: putative flavonol 3-O-glucosyltransferase
  misc_feature (1)..(336): Homolog of NCBI NO: 21593785 NR Description: putative glucosyltransferase [Arabidopsis
  misc_feature (1)..(338): Homolog of NCBI NO: 22535568 NR Description: putative glucosyltransferase
  misc_feature (1)..(344): Homolog of NCBI NO: 34908644 NR Description: putative flavonol 3-O-glucosyltransferase
  misc_feature (1)..(345): Homolog of NCBI NO: 34910206 NR Description: putative flavonol glucosyltransferase
  misc_feature (1)..(344): Homolog of NCBI NO: 34910218 NR Description: putative flavonol glucosyltransferase
  misc_feature (1)..(344): Homolog of NCBI NO: 34910204 NR Description: putative flavonol glucosyltransferase
  misc_feature (1)..(344): Homolog of NCBI NO: 34910228 NR Description: putative flavonol glucosyltransferase
  misc_feature (1)..(351): Homolog of NCBI NO: 34910222 NR Description: putative flavonol glucosyltransferase
MFCVDALDVAAELGVPAYFFFASAAGDLAMFLNLPYLYPTLPSFRDMGEAPVRCPGMPPVRAMDMPLTVQDRDSDRTKVRMYQFRRIPEGRGVLVNSFAWLEPRALRALGDGVCVPGRPTPRVFCVGPLVNDGSSTAGGGGRHECLAWLDAQPKRSVVFLCFGSKGSFPAAQLQEIAHGLESSGHRFLWAVRSPPEEPDTDLGKLLPEGFLDRNRDRGMVVKDWVPQAEVVRHEAVRAFVTHCGWNSTLEAIMSGLPMICWPLYAEQGLNKVFMVEEWRIGVELRGYEKFVKAEELEAKVRLVMEAEEGRILRERLAVAREKALGATKEGGSSEVAFAEFFGDLDKSSSPSVNGECD

SEQ ID NO: 3171 - protein, 328 aa, Zea mays subsp. mays
  peptide (1)..(328): Ceres Seq. ID no. 12357286
  misc_feature (1)..(315): Pfam Name: UDP-glucoronosyl and UDP-glucosyl transferase Pfam Description: UDP-glucoronosyl and UDP-glucosyl transferase
  misc_feature (1)..(315): Homolog of NCBI NO: 34910204 NR Description: putative flavonol glucosyltransferase
  misc_feature (1)..(315): Homolog of NCBI NO: 34910228 NR Description: putative flavonol glucosyltransferase
  misc_feature (1)..(320): Homolog of NCBI NO: 34394683 NR Description: putative flavonol 3-O-glucosyltransferase
  misc_feature (1)..(309): Homolog of NCBI NO: 22535568 NR Description: putative glucosyltransferase
  misc_feature (1)..(316): Homolog of NCBI NO: 34910206 NR Description: putative flavonol glucosyltransferase
  misc_feature (1)..(315): Homolog of NCBI NO: 34910218 NR Description: putative flavonol glucosyltransferase
  misc_feature (1)..(315): Homolog of NCBI NO: 34908644 NR Description: putative flavonol 3-O-glucosyltransferase
  misc_feature (1)..(307): Homolog of NCBI NO: 21593785 NR Description: putative glucosyltransferase [Arabidopsis
  misc_feature (1)..(307): Homolog of NCBI NO: 18401158 NR Description: putative glucosyltransferase
  misc_feature (1)..(322): Homolog of NCBI NO: 34910222 NR Description: putative flavonol glucosyltransferase
MFLNLPYLYPTLPSFRDMGEAPVRCPGMPPVRAMDMPLTVQDRDSDRTKVRMYQFRRIPEGRGVLVNSFAWLEPRALRALGDGVCVPGRPTPRVFCVGPLVNDGSSTAGGGGRHECLAWLDAQPKRSVVFLCFGSKGSFPAAQLQEIAHGLESSGHRFLWAVRSPPEEPDTDLGKLLPEGFLDRNRDRGMVVKDWVPQAEVVRHEAVRAFVTHCGWNSTLEAIMSGLPMICWPLYAEQGLNKVFMVEEWRIGVELRGYEKFVKAEELEAKVRLVMEAEEGRILRERLAVAREKALGATKEGGSSEVAFAEFFGDLDKSSSPSVNGECD

SEQ ID NO: 3172 - DNA, 914 bp, Zea mays subsp. mays
  misc_feature (1)..(914): Ceres Seq. ID no. 12352193
  misc_feature: MA Experiment ID: 108522 Result: Down-regulated in Transcription
  misc_feature: MA Experiment 108522 PARAMETER Experiment Name: Zm_42deg_Heat_P Parameter: Age (day) Value: 8
  misc_feature: MA Experiment 108522 PARAMETER Experiment Name: Zm_42deg_Heat_P Parameter: Organism Value: Zea mays
  misc_feature: MA Experiment 108522 PARAMETER Experiment Name: Zm_42deg_Heat_P Parameter: Plant Line Value: 35A19
  misc_feature: MA Experiment 108522 PARAMETER Experiment Name: Zm_42deg_Heat_P Parameter: Temperature (deg C) Value: 42 vs. 22
  misc_feature: MA Experiment 108522 PARAMETER Experiment Name: Zm_42deg_Heat_P Parameter: Timepoint (hr) Value: 1
  misc_feature: MA Experiment 108522 PARAMETER Experiment Name: Zm_42deg_Heat_P Parameter: Tissue Value: Aerial
atcccggggcacgaaaccctaactgaacccatggcgctctccgccgctcgccggctctccaccaccgcgtcctcctcctccgtcgccgaagcgccgccaaagctctcttcgctgttccagaacccgaagcctcgaccgctgcctgtccgcggcgtcgaggagccgcggcggggggccaggcccaggccgaggcagccctgggaggaggaggcgggggcgctgctgctgcggctccacaaggggaggtacctcccgggccccgacctctcgtcggcgccgcacgctgtctcacccgacgccgtcaagaccgccgccgagtggttcgggcatgaccaccagcccgtcgccaaatggctgtcagggagtgatttgaagaagcttgccttgtttgggtgtcccactgttgagcgaagaacggtttttgcatcaaaaagattaagagccttcttcaacatccaggaagacaaaatatgcggttcctgtaaactgagaagttcgtgcaagtttgtgaaccaggaagtggccaggcataatagagtgattctatcagatacgatgagaattatctccttgtttgtactggacgcttgcccacaagagctcgagattaccgctgagttaaaagccagtgtctgcaagctgctaaaggacgccataaatctcagcagttaactgctgagcattacggagcagaagtttgctagttttcttgtccttgtagttctaatagcgtgctgtcagcatttatctggacttatggaggaaattgccgaggcccatgtttgacgttgcgctcgcaatcgctccctgtgaaggttggagtggtgaaccccagcgacttccttctgatccgtgttttcttttgtgcaactaatatgaagatgaagtacagagtatgtaaaaacttaagatgc

SEQ ID NO: 3173 - protein, 223 aa, Zea mays subsp. mays
  peptide (1)..(223): Ceres Seq. ID no. 12352194
  misc_feature (100)..(223): Homolog of NCBI NO: 18405190 NR Description: expressed protein
  misc_feature (100)..(223): Homolog of NCBI NO: 15293147 NR Description: unknown protein [Arabidopsis thaliana]
  misc_feature (101)..(196): Homolog of NCBI NO: 15221905 NR Description: hypothetical protein
  misc_feature (50)..(219): Homolog of NCBI NO: 18409643 NR Description: expressed protein
  misc_feature (50)..(219): Homolog of NCBI NO: 25372841 NR Description: hypothetical protein F5A18.17 [imported] -
  misc_feature (48)..(219): Homolog of NCBI NO: 21593408 NR Description: unknown [Arabidopsis thaliana]
  misc_feature (12)..(220): Homolog of NCBI NO: 13324787 NR Description: hypothetical protein [Oryza sativa]
  misc_feature (78)..(222): Homolog of NCBI NO: 21536664 NR Description: unknown [Arabidopsis thaliana]
  misc_feature (78)..(222): Homolog of NCBI NO: 18404478 NR Description: expressed protein
  misc_feature (11)..(202): Homolog of NCBI NO: 34903722 NR Description: P0489A05.27 [Oryza sativa (japonica
IPGHETLTEPMALSAARRLSTTASSSSVAEAPPKLSSLFQNPKPRPLPVRGVEEPRRGARPRPRQPWEEEAGALLLRLHKGRYLPGPDLSSAPHAVSPDAVKTAAEWFGHDHQPVAKWLSGSDLKKLALFGCPTVERRTVFASKRLRAFFNIQEDKICGSCKLRSSCKFVNQEVARHNRVILSDTMRIISLFVLDACPQELEITAELKASVCKLLKDAINLSS

SEQ ID NO: 3174 - protein, 213 aa, Zea mays subsp. mays
  peptide (1)..(213): Ceres Seq. ID no. 12352195
  misc_feature (90)..(213): Homolog of NCBI NO: 18405190 NR Description: expressed protein
  misc_feature (90)..(213): Homolog of NCBI NO: 15293147 NR Description: unknown protein [Arabidopsis thaliana]
  misc_feature (91)..(186): Homolog of NCBI NO: 15221905 NR Description: hypothetical protein
  misc_feature (40)..(209): Homolog of NCBI NO: 18409643 NR Description: expressed protein
  misc_feature (40)..(209): Homolog of NCBI NO: 25372841 NR Description: hypothetical protein F5A18.17 [imported] -
  misc_feature (38)..(209): Homolog of NCBI NO: 21593408 NR Description: unknown [Arabidopsis thaliana]
  misc_feature (2)..(210): Homolog of NCBI NO: 13324787 NR Description: hypothetical protein [Oryza sativa]
  misc_feature (68)..(212): Homolog of NCBI NO: 21536664 NR Description: unknown [Arabidopsis thaliana]
  misc_feature (68)..(212): Homolog of NCBI NO: 18404478 NR Description: expressed protein
  misc_feature (1)..(192): Homolog of NCBI NO: 34903722 NR Description: P0489A05.27 [Oryza sativa (japonica
MALSAARRLSTTASSSSVAEAPPKLSSLFQNPKPRPLPVRGVEEPRRGARPRPRQPWEEEAGALLLRLHKGRYLPGPDLSSAPHAVSPDAVKTAAEWFGHDHQPVAKWLSGSDLKKLALFGCPTVERRTVFASKRLRAFFNIQEDKICGSCKLRSSCKFVNQEVARHNRVILSDTMRIISLFVLDACPQELEITAELKASVCKLLKDAINLSS

SEQ ID NO: 3175 - DNA, 1474 bp, Zea mays subsp. mays
  misc_feature (1)..(1474): Ceres Seq. ID no. 12410376
  misc_feature: MA Experiment ID: 108528 Result: Up-regulated in Transcription
  misc_feature: MA Experiment 108528 PARAMETER Experiment Name: Zm_Imbibed_Seeds_P Parameter: Age (day) Value: 5 vs. 2
  misc_feature: MA Experiment 108528 PARAMETER Experiment Name: Zm_Imbibed_Seeds_P Parameter: Organism Value: Zea mays
  misc_feature: MA Experiment 108528 PARAMETER Experiment Name: Zm_Imbibed_Seeds_P Parameter: Plant Line Value: 35A19
  misc_feature: MA Experiment 108528 PARAMETER Experiment Name: Zm_Imbibed_Seeds_P Parameter: Tissue Value: Aerial vs. Embryo
  misc_feature: MA Experiment ID: 108529 Result: Down-regulated in Transcription
  misc_feature: MA Experiment 108529 PARAMETER Experiment Name: Zm_Imbibed_Seeds_P Parameter: Age (day) Value: 5 vs. 2
  misc_feature: MA Experiment 108529 PARAMETER Experiment Name: Zm_Imbibed_Seeds_P Parameter: Organism Value: Zea mays
  misc_feature: MA Experiment 108529 PARAMETER Experiment Name: Zm_Imbibed_Seeds_P Parameter: Plant Line Value: 35A19
  misc_feature: MA Experiment 108529 PARAMETER Experiment Name: Zm_Imbibed_Seeds_P Parameter: Tissue Value: Roots vs. Embryo
  misc_feature: MA Experiment ID: 108530 Result: Up-regulated in Transcription
  misc_feature: MA Experiment 108530 PARAMETER Experiment Name: Zm_Imbibed_Seeds_P Parameter: Age (day) Value: 6 vs. 2
  misc_feature: MA Experiment 108530 PARAMETER Experiment Name: Zm_Imbibed_Seeds_P Parameter: Organism Value: Zea mays
  misc_feature: MA Experiment 108530 PARAMETER Experiment Name: Zm_Imbibed_Seeds_P Parameter: Plant Line Value: 35A19
  misc_feature: MA Experiment 108530 PARAMETER Experiment Name: Zm_Imbibed_Seeds_P Parameter: Tissue Value: Aerial vs. Embryo
  misc_feature: MA Experiment ID: 108534 Result: Down-regulated in Transcription
  misc_feature: MA Experiment 108534 PARAMETER Experiment Name: Zm_4deg_Cold_P Parameter: Age (hr) Value: 8
  misc_feature: MA Experiment 108534 PARAMETER Experiment Name: Zm_4deg_Cold_P Parameter: Organism Value: Zea mays
  misc_feature: MA Experiment 108534 PARAMETER Experiment Name: Zm_4deg_Cold_P Parameter: Plant Line Value: 35A19
  misc_feature: MA Experiment 108534 PARAMETER Experiment Name: Zm_4deg_Cold_P Parameter: Temperature (deg C) Value: 4 vs. 22
  misc_feature: MA Experiment 108534 PARAMETER Experiment Name: Zm_4deg_Cold_P Parameter: Timepoint (hr) Value: 6
  misc_feature: MA Experiment 108534 PARAMETER Experiment Name: Zm_4deg_Cold_P Parameter: Tissue Value: Aerial
  misc_feature: MA Experiment ID: 108536 Result: Down-regulated in Transcription
  misc_feature: MA Experiment 108536 PARAMETER Experiment Name: Zm_Meristem_P Parameter: Age (day) Value: 8
  misc_feature: MA Experiment 108536 PARAMETER Experiment Name: Zm_Meristem_P Parameter: Organism Value: Zea mays
  misc_feature: MA Experiment 108536 PARAMETER Experiment Name: Zm_Meristem_P Parameter: Plant Line Value: 35A19
  misc_feature: MA Experiment 108536 PARAMETER Experiment Name: Zm_Meristem_P Parameter: Tissue Value: Shoot Meristem vs. Above Shoot Meristem
  misc_feature: MA Experiment ID: 108543 Result: Up-regulated in Transcription
  misc_feature: MA Experiment ID: 108544 Result: Down-regulated in Transcription
  misc_feature: MA Experiment ID: 108545 Result: Up-regulated in Transcription
  misc_feature: MA Experiment 108545 PARAMETER Experiment Name: Zm_Imbibed_Seeds_P Parameter: Age (day) Value: 3 vs. 2
  misc_feature: MA Experiment 108545 PARAMETER Experiment Name: Zm_Imbibed_Seeds_P Parameter: Organism Value: Zea mays
  misc_feature: MA Experiment 108545 PARAMETER Experiment Name: Zm_Imbibed_Seeds_P Parameter: Plant Line Value: 35A19
  misc_feature: MA Experiment 108545 PARAMETER Experiment Name: Zm_Imbibed_Seeds_P Parameter: Tissue Value: Aerial vs. Embryo
  misc_feature: MA Experiment ID: 108546 Result: Down-regulated in Transcription
  misc_feature: MA Experiment 108546 PARAMETER Experiment Name: Zm_Imbibed_Seeds_P Parameter: Age (day) Value: 3 vs. 2
  misc_feature: MA Experiment 108546 PARAMETER Experiment Name: Zm_Imbibed_Seeds_P Parameter: Organism Value: Zea mays
  misc_feature: MA Experiment 108546 PARAMETER Experiment Name: Zm_Imbibed_Seeds_P Parameter: Plant Line Value: 35A19
  misc_feature: MA Experiment 108546 PARAMETER Experiment Name: Zm_Imbibed_Seeds_P Parameter: Tissue Value: Roots vs. Embryo
  misc_feature: MA Experiment ID: 108547 Result: Up-regulated in Transcription
  misc_feature: MA Experiment 108547 PARAMETER Experiment Name: Zm_Imbibed_Seeds_P Parameter: Age (day) Value: 4 vs. 2
  misc_feature: MA Experiment 108547 PARAMETER Experiment Name: Zm_Imbibed_Seeds_P Parameter: Organism Value: Zea mays
  misc_feature: MA Experiment 108547 PARAMETER Experiment Name: Zm_Imbibed_Seeds_P Parameter: Plant Line Value: 35A19
  misc_feature: MA Experiment 108547 PARAMETER Experiment Name: Zm_Imbibed_Seeds_P Parameter: Tissue Value: Aerial vs. Embryo
  misc_feature: MA Experiment ID: 108687 Result: Down-regulated in Transcription
  misc_feature: MA Experiment 108687 PARAMETER Experiment Name: Zm_Embryos-Flowers__P Parameter: Tissue Value: Embryo vs. Aerial+
  misc_feature: MA Experiment ID: 108689 Result: Down-regulated in Transcription
  misc_feature: MA Experiment 108689 PARAMETER Experiment Name: Zm_Drought_Roots_P Parameter: Age (day) Value: 9
  misc_feature: MA Experiment 108689 PARAMETER Experiment Name: Zm_Drought_Roots_P Parameter: Organism Value: Zea mays
  misc_feature: MA Experiment 108689 PARAMETER Experiment Name: Zm_Drought_Roots_P Parameter: Plant Line Value: 35A19
  misc_feature: MA Experiment 108689 PARAMETER Experiment Name: Zm_Drought_Roots_P Parameter: Timepoint (hr) Value: 24
  misc_feature: MA Experiment 108689 PARAMETER Experiment Name: Zm_Drought_Roots_P Parameter: Tissue Value: Roots
  misc_feature: MA Experiment 108689 PARAMETER Experiment Name: Zm_Drought_Roots_P Parameter: Treatment Value: Drought vs. No Drought
  misc_feature: MA Experiment ID: 20000477 Result: Down-regulated in Transcription
  misc_feature: MA Experiment 20000477 PARAMETER Experiment Name: Zm_5mM_SA_P Parameter: Age (day) Value: 10
  misc_feature: MA Experiment 20000477 PARAMETER Experiment Name: Zm_5mM_SA_P Parameter: Organism Value: Zea mays
  misc_feature: MA Experiment 20000477 PARAMETER Experiment Name: Zm_5mM_SA_P Parameter: Plant Line Value: 35A19
  misc_feature: MA Experiment 20000477 PARAMETER Experiment Name: Zm_5mM_SA_P Parameter: Timepoint (hr) Value: 48
  misc_feature: MA Experiment 20000477 PARAMETER Experiment Name: Zm_5mM_SA_P Parameter: Tissue Value: Aerial
  misc_feature: MA Experiment 20000477 PARAMETER Experiment Name: Zm_5mM_SA_P Parameter: Treatment Value: 5mM SA vs. No Treatment
  misc_feature: MA Experiment ID: 20000488 Result: Up-regulated in Transcription
  misc_feature: MA Experiment 20000488 PARAMETER Experiment Name: Zm_50mM_NH4NO3_L_to_H_P Parameter: Organism Value: Zea mays
  misc_feature: MA Experiment 20000488 PARAMETER Experiment Name: Zm_50mM_NH4NO3_L_to_H_P Parameter: Timepoint (hr) Value: 8
  misc_feature: MA Experiment 20000488 PARAMETER Experiment Name: Zm_50mM_NH4NO3_L_to_H_P Parameter: Tissue Value: Leaves
  misc_feature: MA Experiment 20000488 PARAMETER Experiment Name: Zm_50mM_NH4NO3_L_to_H_P Parameter: Treatment Value: 50mM NH4NO3 vs. 100mM Mannitol
  misc_feature: MA Experiment ID: 20000492 Result: Down-regulated in Transcription
  misc_feature: MA Experiment 20000492 PARAMETER Experiment Name: Zm_Hybrid_Seed_Dev_P Parameter: DAP Value: 12
  misc_feature: MA Experiment 20000492 PARAMETER Experiment Name: Zm_Hybrid_Seed_Dev_P Parameter: Organism Value: Zea mays
  misc_feature: MA Experiment 20000492 PARAMETER Experiment Name: Zm_Hybrid_Seed_Dev_P Parameter: Plant Line Value: 35A19
  misc_feature: MA Experiment 20000492 PARAMETER Experiment Name: Zm_Hybrid_Seed_Dev_P Parameter: Tissue Value: Fert Kernel vs. Unfert Floret
  misc_feature: MA Experiment ID: 20000535 Result: Down-regulated in Transcription
  misc_feature: MA Experiment 20000535 PARAMETER Experiment Name: Zm_Hybrid_Seed_Dev_P Parameter: DAP Value: 30 vs. 12
  misc_feature: MA Experiment 20000535 PARAMETER Experiment Name: Zm_Hybrid_Seed_Dev_P Parameter: Organism Value: Zea mays
  misc_feature: MA Experiment 20000535 PARAMETER Experiment Name: Zm_Hybrid_Seed_Dev_P Parameter: Plant Line Value: 35A19
  misc_feature: MA Experiment 20000535 PARAMETER Experiment Name: Zm_Hybrid_Seed_Dev_P Parameter: Tissue Value: Embryo vs. Unfert Floret
  misc_feature: MA Experiment ID: 20000626 Result: Down-regulated in Transcription
  misc_feature: MA Experiment 20000626 PARAMETER Experiment Name: Zm_Herbicide-Treatments_P Parameter: Timepoint (hr) Value: 12
  misc_feature: MA Experiment 20000626 PARAMETER Experiment Name: Zm_Herbicide-Treatments_P Parameter: Tissue Value: Aerial
  misc_feature: MA Experiment 20000626 PARAMETER Experiment Name: Zm_Herbicide-Treatments_P Parameter: Treatment Value: Roundup vs. No Treatment
  misc_feature: MA Experiment ID: 20001606 Result: Up-regulated in Transcription
  misc_feature: MA Experiment 20001606 PARAMETER Experiment Name: Zm_50ppm_KNO3_L-to-H_P Parameter: Age (day) Value: 19
  misc_feature: MA Experiment 20001606 PARAMETER Experiment Name: Zm_50ppm_KNO3_L-to-H_P Parameter: Organism Value: Zea mays
  misc_feature: MA Experiment 20001606 PARAMETER Experiment Name: Zm_50ppm_KNO3_L-to-H_P Parameter: Plant Line Value: 35A19
  misc_feature: MA Experiment 20001606 PARAMETER Experiment Name: Zm_50ppm_KNO3_L-to-H_P Parameter: Timepoint (hr) Value: 8
  misc_feature: MA Experiment 20001606 PARAMETER Experiment Name: Zm_50ppm_KNO3_L-to-H_P Parameter: Tissue Value: Shoots
  misc_feature: MA Experiment 20001606 PARAMETER Experiment Name: Zm_50ppm_KNO3_L-to-H_P Parameter: Treatment Value: 50ppm KNO3 vs. 50ppm KCl
  misc_feature: MA Experiment ID: 20001608 Result: Up-regulated in Transcription
  misc_feature: MA Experiment 20001608 PARAMETER Experiment Name: Zm_50ppm_KNO3_L-to-H_P Parameter: Age (day) Value: 21
  misc_feature: MA Experiment 20001608 PARAMETER Experiment Name: Zm_50ppm_KNO3_L-to-H_P Parameter: Organism Value: Zea mays
  misc_feature: MA Experiment 20001608 PARAMETER Experiment Name: Zm_50ppm_KNO3_L-to-H_P Parameter: Plant Line Value: 35A19
  misc_feature: MA Experiment 20001608 PARAMETER Experiment Name: Zm_50ppm_KNO3_L-to-H_P Parameter: Timepoint (hr) Value: 48
  misc_feature: MA Experiment 20001608 PARAMETER Experiment Name: Zm_50ppm_KNO3_L-to-H_P Parameter: Tissue Value: Shoots
  misc_feature: MA Experiment 20001608 PARAMETER Experiment Name: Zm_50ppm_KNO3_L-to-H_P Parameter: Treatment Value: 50ppm KNO3 vs. 50ppm KCl
agtcgaacacagagtcacttcgccacgaacaaaagcgcatcgatctcgctgtcgtcactcctcgtcacccagccacgaacagaggcaccacccagcatggccctgcaggcggcgctcctcccatccaccctctcatccgtccccaagaagtgcagcatcgccgtcgcggcgaaggacacggcattccttagcgtatcccagaagaaggtgcaggcggcgtcgctgtcggtgagaacgcgggtggcgacgacggcgcctgtggccacgccggggtccagcacggcggccaaggatgggaagaagaccgtgcggcagggcgtggtggtgatcacgggcgcgtcgtcggggttgggcctggcggcggccaaggcgctggcggagaccggcaagtggcacgtggtgatggcctgccgcgacttcctcaaggcggccaaggcggccaagggcgccggcatggcggacggcagctacaccatcatgcacctggacctggcctccctcgacagcgtgcggcagttcgtggacagcttccggcgcgccggcatgccgctcgactcgctcgtctgcaacgccgccatctaccggcccacggcaaggacgccgacgttcacggcggacggatacgagatgagcgtcggcgtcaaccacctgggccacttcctcctggcgcgcctgctcctggacgacatgcagaagtccgactacccgtcccgccgcctcatcatcctcggctccatcaccggcaacaccaacacgctggccgggaacatcccgcccaaggccgggctgggcgacctccgcggcctcgcggcggggctgcgcggccagaacggctctgccatgatcgacggctccgagagcttcgacggcgccaaggcgtacaaggacagcaagatctgcaacatgctcaccatgcaggagctgcaccggcggtaccacgaggagacgggcatcacgttcgcgtcgctctacccggggtgcatcgccaccacgggggctgttccgcgagcacatcccgctgttccgcctgctcttcccgcctttccagaagttcgtcaccaagggcttcgtgtcggaggcggagtccggcaagaggctggcgcatgtggtcagcgaccccagcctcaccaagtcgggggtgtactggagctggaacaaggactcggcgtcgttcgagaaccagctgtcgcaggaggccagcgatccggagaaggccaagaagctctgggagatcagcgagaagctcgtggggcttgcctgagctcgccggcacggcgacggcgacatgatgactctgtcgagcagaggagctttcgcttcgttgtattatgtgtaccattagcatccattttgtttgtttctagaagttggtaatgaccgtcggagaagagcctgtaattgttcgatcatgtattattgcttacaaaatttttttcaaaaaccgatgaaataaaacaacaggcttaacatctct

SEQ ID NO: 3176 - protein, 457 aa, Zea mays subsp. mays
  peptide (1)..(457): Ceres Seq. ID no. 12410377
  misc_feature (33)..(355): Homolog of NCBI NO: 10720236 NR Description: Protochlorophyllide reductase B, chloroplast
  misc_feature (33)..(355): Homolog of NCBI NO: 10720220 NR Description: Protochlorophyllide reductase, chloroplast
  misc_feature (33)..(355): Homolog of NCBI NO: 21068893 NR Description: NADPH:protochlorophyllide oxidoreductase
  misc_feature (33)..(355): Homolog of NCBI NO: 9587209 NR Description: NADPH-protochlorophyllide oxidoreductase [Vigna
  misc_feature (33)..(355): Homolog of NCBI NO: 81946 NR Description: protochlorophyllide reductase (EC 1.3.1.33)
  misc_feature (33)..(355): Homolog of NCBI NO: 266742 NR Description: Protochlorophyllide reductase, chloroplast
  misc_feature (33)..(355): Homolog of NCBI NO: 10720233 NR Description: Protochlorophyllide reductase, chloroplast
  misc_feature (107)..(355): Homolog of NCBI NO: 129707 NR Description: Protochlorophyllide reductase (PCR)
  misc_feature (33)..(355): Homolog of NCBI NO: 10720235 NR Description: Protochlorophyllide reductase A, chloroplast
  misc_feature (33)..(355): Homolog of NCBI NO: 129708 NR Description: Protochlorophyllide reductase A, chloroplast
SRTQSHFATNKSASISLSSLLVTQPRTEAPPSMALQAALLPSTLSSVPKKCSIAVAAKDTAFLSVSQKKVQAASLSVRTRVATTAPVATPGSSTAAKDGKKTVRQGVVVITGASSGLGLAAAKALAETGKWHVVMACRDFLKAAKAAKGAGMADGSYTIMHLDLASLDSVRQFVDSFRRAGMPLDSLVCNAAIYRPTARTPTFTADGYEMSVGVNHLGHFLLARLLLDDMQKSDYPSRRLIILGSITGNTNTLAGNIPPKAGLGDLRGLAAGLRGQNGSAMIDGSESFDGAKAYKDSKICNMLTMQELHRRYHEETGITFASLYPGCIATTGAVPRAHPAVPPALPAFPEVRHQGLRVGGGVRQEAGACGQRPQPHQVGGVLELEQGLGVVREPAVAGGQRSGEGQEALGDQREARGACLSSPARRRRHDDSVEQRSFRFVVLCVPLASILFVSRSW

SEQ ID NO: 3177 - protein, 425 aa, Zea mays subsp. mays
  peptide (1)..(425): Ceres Seq. ID no. 12410378
  misc_feature (1)..(323): Homolog of NCBI NO: 10720236 NR Description: Protochlorophyllide reductase B, chloroplast
  misc_feature (1)..(323): Homolog of NCBI NO: 10720220 NR Description: Protochlorophyllide reductase, chloroplast
  misc_feature (1)..(323): Homolog of NCBI NO: 21068893 NR Description: NADPH:protochlorophyllide oxidoreductase
  misc_feature (1)..(323): Homolog of NCBI NO: 9587209 NR Description: NADPH-protochlorophyllide oxidoreductase [Vigna
  misc_feature (1)..(323): Homolog of NCBI NO: 81946 NR Description: protochlorophyllide reductase (EC 1.3.1.33)
  misc_feature (1)..(323): Homolog of NCBI NO: 266742 NR Description: Protochlorophyllide reductase, chloroplast
  misc_feature (1)..(323): Homolog of NCBI NO: 10720233 NR Description: Protochlorophyllide reductase, chloroplast
  misc_feature (75)..(323): Homolog of NCBI NO: 129707 NR Description: Protochlorophyllide reductase (PCR)
  misc_feature (1)..(323): Homolog of NCBI NO: 10720235 NR Description: Protochlorophyllide reductase A, chloroplast
  misc_feature (1)..(323): Homolog of NCBI NO: 129708 NR Description: Protochlorophyllide reductase A, chloroplast
MALQAALLPSTLSSVPKKCSIAVAAKDTAFLSVSQKKVQAASLSVRTRVATTAPVATPGSSTAAKDGKKTVRQGVVVITGASSGLGLAAAKALAETGKWHVVMACRDFLKAAKAAKGAGMADGSYTIMHLDLASLDSVRQFVDSFRRAGMPLDSLVCNAAIYRPTARTPTFTADGYEMSVGVNHLGHFLLARLLLDDMQKSDYPSRRLIILGSITGNTNTLAGNIPPKAGLGDLRGLAAGLRGQNGSAMIDGSESFDGAKAYKDSKICNMLTMQELHRRYHEETGITFASLYPGCIATTGAVPRAHPAVPPALPAFPEVRHQGLRVGGGVRQEAGACGQRPQPHQVGGVLELEQGLGVVREPAVAGGQRSGEGQEALGDQREARGACLSSPARRRRHDDSVEQRSFRFVVLCVPLASILFVSRSW

SEQ ID NO: 3178 - protein, 323 aa, Zea mays subsp. mays
  peptide (1)..(323): Ceres Seq. ID no. 12410379
  misc_feature (1)..(221): Homolog of NCBI NO: 10720236 NR Description: Protochlorophyllide reductase B, chloroplast
  misc_feature (1)..(221): Homolog of NCBI NO: 10720220 NR Description: Protochlorophyllide reductase, chloroplast
  misc_feature (1)..(221): Homolog of NCBI NO: 21068893 NR Description: NADPH:protochlorophyllide oxidoreductase
  misc_feature (1)..(221): Homolog of NCBI NO: 9587209 NR Description: NADPH-protochlorophyllide oxidoreductase [Vigna
  misc_feature (1)..(221): Homolog of NCBI NO: 81946 NR Description: protochlorophyllide reductase (EC 1.3.1.33)
  misc_feature (1)..(221): Homolog of NCBI NO: 266742 NR Description: Protochlorophyllide reductase, chloroplast
  misc_feature (1)..(221): Homolog of NCBI NO: 10720233 NR Description: Protochlorophyllide reductase, chloroplast
  misc_feature (1)..(221): Homolog of NCBI NO: 129707 NR Description: Protochlorophyllide reductase (PCR)
  misc_feature (1)..(221): Homolog of NCBI NO: 10720235 NR Description: Protochlorophyllide reductase A, chloroplast
  misc_feature (1)..(221): Homolog of NCBI NO: 129708 NR Description: Protochlorophyllide reductase A, chloroplast
MACRDFLKAAKAAKGAGMADGSYTIMHLDLASLDSVRQFVDSFRRAGMPLDSLVCNAAIYRPTARTPTFTADGYEMSVGVNHLGHFLLARLLLDDMQKSDYPSRRLIILGSITGNTNTLAGNIPPKAGLGDLRGLAAGLRGQNGSAMIDGSESFDGAKAYKDSKICNMLTMQELHRRYHEETGITFASLYPGCIATTGAVPRAHPAVPPALPAFPEVRHQGLRVGGGVRQEAGACGQRPQPHQVGGVLELEQGLGVVREPAVAGGQRSGEGQEALGDQREARGACLSSPARRRRHDDSVEQRSFRFVVLCVPLASILFVSRSW

SEQ ID NO: 3179 - DNA, 669 bp, Zea mays subsp. mays
  misc_feature (1)..(669): Ceres Seq. ID no. 12367126
  misc_feature: MA Experiment ID: 108528 Result: Up-regulated in Transcription
  misc_feature: MA Experiment 108528 PARAMETER Experiment Name: Zm_Imbibed_Seeds_P Parameter: Age (day) Value: 5 vs. 2
  misc_feature: MA Experiment 108528 PARAMETER Experiment Name: Zm_Imbibed_Seeds_P Parameter: Organism Value: Zea mays
  misc_feature: MA Experiment 108528 PARAMETER Experiment Name: Zm_Imbibed_Seeds_P Parameter: Plant Line Value: 35A19
  misc_feature: MA Experiment 108528 PARAMETER Experiment Name: Zm_Imbibed_Seeds_P Parameter: Tissue Value: Aerial vs. Embryo
  misc_feature: MA Experiment ID: 108530 Result: Up-regulated in Transcription
  misc_feature: MA Experiment 108530 PARAMETER Experiment Name: Zm_Imbibed_Seeds_P Parameter: Age (day) Value: 6 vs. 2
  misc_feature: MA Experiment 108530 PARAMETER Experiment Name: Zm_Imbibed_Seeds_P Parameter: Organism Value: Zea mays
  misc_feature: MA Experiment 108530 PARAMETER Experiment Name: Zm_Imbibed_Seeds_P Parameter: Plant Line Value: 35A19
  misc_feature: MA Experiment 108530 PARAMETER Experiment Name: Zm_Imbibed_Seeds_P Parameter: Tissue Value: Aerial vs. Embryo
  misc_feature: MA Experiment ID: 108536 Result: Down-regulated in Transcription
  misc_feature: MA Experiment 108536 PARAMETER Experiment Name: Zm_Meristem_P Parameter: Age (day) Value: 8
  misc_feature: MA Experiment 108536 PARAMETER Experiment Name: Zm_Meristem_P Parameter: Organism Value: Zea mays
  misc_feature: MA Experiment 108536 PARAMETER Experiment Name: Zm_Meristem_P Parameter: Plant Line Value: 35A19
  misc_feature: MA Experiment 108536 PARAMETER Experiment Name: Zm_Meristem_P Parameter: Tissue Value: Shoot Meristem vs. Above Shoot Meristem
  misc_feature: MA Experiment ID: 108543 Result: Up-regulated in Transcription
  misc_feature: MA Experiment ID: 108545 Result: Up-regulated in Transcription
  misc_feature: MA Experiment 108545 PARAMETER Experiment Name: Zm_Imbibed_Seeds_P Parameter: Age (day) Value: 3 vs. 2
  misc_feature: MA Experiment 108545 PARAMETER Experiment Name: Zm_Imbibed_Seeds_P Parameter: Organism Value: Zea mays
  misc_feature: MA Experiment 108545 PARAMETER Experiment Name: Zm_Imbibed_Seeds_P Parameter: Plant Line Value: 35A19
  misc_feature: MA Experiment 108545 PARAMETER Experiment Name: Zm_Imbibed_Seeds_P Parameter: Tissue Value: Aerial vs. Embryo
  misc_feature: MA Experiment ID: 108546 Result: Down-regulated in Transcription
  misc_feature: MA Experiment 108546 PARAMETER Experiment Name: Zm_Imbibed_Seeds_P Parameter: Age (day) Value: 3 vs. 2
  misc_feature: MA Experiment 108546 PARAMETER Experiment Name: Zm_Imbibed_Seeds_P Parameter: Organism Value: Zea mays
  misc_feature: MA Experiment 108546 PARAMETER Experiment Name: Zm_Imbibed_Seeds_P Parameter: Plant Line Value: 35A19
  misc_feature: MA Experiment 108546 PARAMETER Experiment Name: Zm_Imbibed_Seeds_P Parameter: Tissue Value: Roots vs. Embryo
  misc_feature: MA Experiment ID: 108547 Result: Up-regulated in Transcription
  misc_feature: MA Experiment 108547 PARAMETER Experiment Name: Zm_Imbibed_Seeds_P Parameter: Age (day) Value: 4 vs. 2
  misc_feature: MA Experiment 108547 PARAMETER Experiment Name: Zm_Imbibed_Seeds_P Parameter: Organism Value: Zea mays
  misc_feature: MA Experiment 108547 PARAMETER Experiment Name: Zm_Imbibed_Seeds_P Parameter: Plant Line Value: 35A19
  misc_feature: MA Experiment 108547 PARAMETER Experiment Name: Zm_Imbibed_Seeds_P Parameter: Tissue Value: Aerial vs. Embryo
  misc_feature: MA Experiment ID: 20000492 Result: Down-regulated in Transcription
  misc_feature: MA Experiment 20000492 PARAMETER Experiment Name: Zm_Hybrid_Seed_Dev_P Parameter: DAP Value: 12
  misc_feature: MA Experiment 20000492 PARAMETER Experiment Name: Zm_Hybrid_Seed_Dev_P Parameter: Organism Value: Zea mays
  misc_feature: MA Experiment 20000492 PARAMETER Experiment Name: Zm_Hybrid_Seed_Dev_P Parameter: Plant Line Value: 35A19
  misc_feature: MA Experiment 20000492 PARAMETER Experiment Name: Zm_Hybrid_Seed_Dev_P Parameter: Tissue Value: Fert Kernel vs. Unfert Floret
  misc_feature: MA Experiment ID: 20000535 Result: Down-regulated in Transcription
  misc_feature: MA Experiment 20000535 PARAMETER Experiment Name: Zm_Hybrid_Seed_Dev_P Parameter: DAP Value: 30 vs. 12
  misc_feature: MA Experiment 20000535 PARAMETER Experiment Name: Zm_Hybrid_Seed_Dev_P Parameter: Organism Value: Zea mays
  misc_feature: MA Experiment 20000535 PARAMETER Experiment Name: Zm_Hybrid_Seed_Dev_P Parameter: Plant Line Value: 35A19
  misc_feature: MA Experiment 20000535 PARAMETER Experiment Name: Zm_Hybrid_Seed_Dev_P Parameter: Tissue Value: Embryo vs. Unfert Floret
agtacttactcactctccccccacccgcgccaggccagacagactaactgagcacccgctgcaaggagtccgcgcccatggcgagcaccaacatggcgtcggccacctcgcggttcatgctggccgcgggcgtgcccaccggcagcagcggcggccgcgtcaacttcgcctcggcgcccaaccggcttggcaggaggctcgtggcccgggccgacaacgaggccgccgcagctgaggcggcggaaggggagggtgccgtggccaccaagcccaaggccgagaagccgccgccgatcgggcccaataggggcgccaaggtgaagatccttaggagggagtcctactggtacaacgggatcggcaacgtcgtcaccgtcgatcaggatcccaacacccgctacccggtggttgtgcggttcaacaaggtgaactacgccggcgtgtccaccaacaactacgccttggacgaggtcttagaggtgaaatgagtggggccggccggctcaagggctccgcgctagctaccgtgtgattgatttgtagtagttgtgaaatgaggctgtgaagctgcatgctgtgctggctagcgtcacaacatcgatcctatgtgtaatagcataatccacataatcatatcatgtaattgcttgctttattcaccgtgtactc

SEQ ID NO: 3180 - protein, 136 aa, Zea mays subsp. mays
  peptide (1)..(136): Ceres Seq. ID no. 12367127
  misc_feature (75)..(135): Pfam Name: Photosystem I reaction centre subunit IV / PsaE Pfam Description: Photosystem I reaction centre subunit IV / PsaE
  misc_feature (6)..(136): Homolog of NCBI NO: 15225331 NR Description: putative photosystem I reaction center subunit IV
  misc_feature (29)..(135): Homolog of NCBI NO: 131178 NR Description: Photosystem I reaction center subunit IV,
  misc_feature (6)..(135): Homolog of NCBI NO: 30688100 NR Description: photosystem I subunit PSI-E - like protein
  misc_feature (6)..(135): Homolog of NCBI NO: 24030202 NR Description: putative photosystem I subunit PSI-E protein
  misc_feature (1)..(136): Homolog of NCBI NO: 7443145 NR Description: photosystem I chain IV - wood tobacco
  misc_feature (1)..(136): Homolog of NCBI NO: 2499966 NR Description: Photosystem I reaction center subunit IV A,
  misc_feature (1)..(136): Homolog of NCBI NO: 26986114 NR Description: putative photosystem I reaction centre subunit IV
  misc_feature (1)..(136): Homolog of NCBI NO: 2499967 NR Description: Photosystem I reaction center subunit IV B,
  misc_feature (1)..(136): Homolog of NCBI NO: 34394725 NR Description: putative Photosystem I reaction center subunit IV
  misc_feature (1)..(135): Homolog of NCBI NO: 131176 NR Description: Photosystem I reaction center subunit IV,
MASTNMASATSRFMLAAGVPTGSSGGRVNFASAPNRLGRRLVARADNEAAAAEAAEGEGAVATKPKAEKPPPIGPNRGAKVKILRRESYWYNGIGNVVTVDQDPNTRYPVVVRFNKVNYAGVSTNNYALDEVLEVK

SEQ ID NO: 3181 - protein, 131 aa, Zea mays subsp. mays
  peptide (1)..(131): Ceres Seq. ID no. 12367128
  misc_feature (70)..(130): Pfam Name: Photosystem I reaction centre subunit IV / PsaE Pfam Description: Photosystem I reaction centre subunit IV / PsaE
  misc_feature (24)..(130): Homolog of NCBI NO: 131178 NR Description: Photosystem I reaction center subunit IV,
  misc_feature (1)..(130): Homolog of NCBI NO: 30688100 NR Description: photosystem I subunit PSI-E - like protein
  misc_feature (1)..(130): Homolog of NCBI NO: 24030202 NR Description: putative photosystem I subunit PSI-E protein
  misc_feature (1)..(131): Homolog of NCBI NO: 7443145 NR Description: photosystem I chain IV - wood tobacco
  misc_feature (1)..(131): Homolog of NCBI NO: 2499966 NR Description: Photosystem I reaction center subunit IV A,
  misc_feature (1)..(131): Homolog of NCBI NO: 15225331 NR Description: putative photosystem I reaction center subunit IV
  misc_feature (1)..(131): Homolog of NCBI NO: 26986114 NR Description: putative photosystem I reaction centre subunit IV
  misc_feature (1)..(131): Homolog of NCBI NO: 2499967 NR Description: Photosystem I reaction center subunit IV B,
  misc_feature (1)..(131): Homolog of NCBI NO: 34394725 NR Description: putative Photosystem I reaction center subunit IV
  misc_feature (1)..(130): Homolog of NCBI NO: 131176 NR Description: Photosystem I reaction center subunit IV,
MASATSRFMLAAGVPTGSSGGRVNFASAPNRLGRRLVARADNEAAAAEAAEGEGAVATKPKAEKPPPIGPNRGAKVKILRRESYWYNGIGNVVTVDQDPNTRYPVVVRFNKVNYAGVSTNNYALDEVLEVK

SEQ ID NO: 3182 - protein, 123 aa, Zea mays subsp. mays
  peptide (1)..(123): Ceres Seq. ID no. 12367129
  misc_feature (62)..(122): Pfam Name: Photosystem I reaction centre subunit IV / PsaE Pfam Description: Photosystem I reaction centre subunit IV / PsaE
  misc_feature (1)..(123): Homolog of NCBI NO: 15225331 NR Description: putative photosystem I reaction center subunit IV
  misc_feature (16)..(122): Homolog of NCBI NO: 131178 NR Description: Photosystem I reaction center subunit IV,
  misc_feature (1)..(122): Homolog of NCBI NO: 30688100 NR Description: photosystem I subunit PSI-E - like protein
  misc_feature (1)..(122): Homolog of NCBI NO: 24030202 NR Description: putative photosystem I subunit PSI-E protein
  misc_feature (1)..(123): Homolog of NCBI NO: 7443145 NR Description: photosystem I chain IV - wood tobacco
  misc_feature (1)..(123): Homolog of NCBI NO: 2499966 NR Description: Photosystem I reaction center subunit IV A,
  misc_feature (1)..(123): Homolog of NCBI NO: 26986114 NR Description: putative photosystem I reaction centre subunit IV
  misc_feature (1)..(123): Homolog of NCBI NO: 2499967 NR Description: Photosystem I reaction center subunit IV B,
  misc_feature (1)..(123): Homolog of NCBI NO: 34394725 NR Description: putative Photosystem I reaction center subunit IV
  misc_feature (1)..(122): Homolog of NCBI NO: 131176 NR Description: Photosystem I reaction center subunit IV,
MLAAGVPTGSSGGRVNFASAPNRLGRRLVARADNEAAAAEAAEGEGAVATKPKAEKPPPIGPNRGAKVKILRRESYWYNGIGNVVTVDQDPNTRYPVVVRFNKVNYAGVSTNNYALDEVLEVK

SEQ ID NO: 3183 - DNA, 1377 bp, Zea mays subsp. mays
  misc_feature (1)..(1377): Ceres Seq. ID no. 12345470
  misc_feature: MA Experiment ID: 108522 Result: Up-regulated in Transcription
  misc_feature: MA Experiment 108522 PARAMETER Experiment Name: Zm_42deg_Heat_P Parameter: Age (day) Value: 8
  misc_feature: MA Experiment 108522 PARAMETER Experiment Name: Zm_42deg_Heat_P Parameter: Organism Value: Zea mays
  misc_feature: MA Experiment 108522 PARAMETER Experiment Name: Zm_42deg_Heat_P Parameter: Plant Line Value: 35A19
  misc_feature: MA Experiment 108522 PARAMETER Experiment Name: Zm_42deg_Heat_P Parameter: Temperature (deg C) Value: 42 vs. 22
  misc_feature: MA Experiment 108522 PARAMETER Experiment Name: Zm_42deg_Heat_P Parameter: Timepoint (hr) Value: 1
  misc_feature: MA Experiment 108522 PARAMETER Experiment Name: Zm_42deg_Heat_P Parameter: Tissue Value: Aerial
  misc_feature: MA Experiment ID: 108529 Result: Up-regulated in Transcription
  misc_feature: MA Experiment 108529 PARAMETER Experiment Name: Zm_Imbibed_Seeds_P Parameter: Age (day) Value: 5 vs. 2
  misc_feature: MA Experiment 108529 PARAMETER Experiment Name: Zm_Imbibed_Seeds_P Parameter: Organism Value: Zea mays
  misc_feature: MA Experiment 108529 PARAMETER Experiment Name: Zm_Imbibed_Seeds_P Parameter: Plant Line Value: 35A19
  misc_feature: MA Experiment 108529 PARAMETER Experiment Name: Zm_Imbibed_Seeds_P Parameter: Tissue Value: Roots vs. Embryo
  misc_feature: MA Experiment ID: 108535 Result: Down-regulated in Transcription
  misc_feature: MA Experiment 108535 PARAMETER Experiment Name: Zm_Meristem_P Parameter: Age (day) Value: 8
  misc_feature: MA Experiment 108535 PARAMETER Experiment Name: Zm_Meristem_P Parameter: Organism Value: Zea mays
  misc_feature: MA Experiment 108535 PARAMETER Experiment Name: Zm_Meristem_P Parameter: Plant Line Value: 35A19
  misc_feature: MA Experiment 108535 PARAMETER Experiment Name: Zm_Meristem_P Parameter: Tissue Value: Root Meristem vs. Above Root Meristem
aaaacaaagcttttgttgtctctcacctactattcttcttgcctcctccctccaccagcatccctgagtctgccatgggcaactgctggggaaccaagattagctctgacaccgccgcctccccttccacatcaccgttccctcgcagcgagggtgagattctccggtgtgccaatgtcaggagcttcaccttgacggagctgatgacctccacccggaacttccggcccgacagcgtcctcggcgagggaggcttcggctccgtcttcaaggggtggatcgacgagaccaccttcgccccggccaggcccggcacagggatggtcatcgctgtcaagaagctcaaccagcagggattgcaggggcacagggagtggctggctgaagtcaactacctgggccagttgtctcaccccagtctcgtaaggctcgtagggtactgcctccaagacgagcagcgccttctcgtctacgagttcatgccgcgaggaagcttggagaaccatcttttcaggacctcacgtttccagccgctctcctggaacctacgaatcaaagtttgccctgggagcagccaagggccttgcgttcttgcacagcgacaaggccagagttatctaccgagatttcaagacatccaacgtgctcctggattcgacttttgtgtgtgttttcagaactacaacgccaagctgtctgacttcggtttggcaaaggacgggccaaccggcgaccagagccacgtgtccaccagagtcatgggcacctacggatatgctgctccggaatatctcgcaacaggtcatctcacgccgaagagcgacgtctacagcttcggcgtcgtgctgctggagatgctgtcgggccgccgcgccatggacaagaaccgcccggccaccgagcacaacctcgtcgactgggcgcgcccctacctcagcagcaagcgccgcgtctcccgcatcctggacgaccgcctggccggccactacccgctgccggccgtccaaagggcggcagcgctggcgctgcagtgcctctccgaggactccaggaagaggccaaccatggaccaggtcgtcgcgtcgctgcagcaactcacagccgcccaggaccacgacgatgcccaccggtcgtcgcgcaggtacccaaaagatcaccgtcaggctgcggcgctcaacaaccggaatctgaacgctcatcgccgcctgtccgccttgcctctacccgagtgaactaccatattcatattcgatcatcttttgtatcttcacaaaagtagtatgtaaatccgtggtgaagacctgggtaattagtgataaaacacaacttgattgttgattagatgtaaatggtggcttcaacttaaccggtttatgg

SEQ ID NO: 3184 - protein, 409 aa, Zea mays subsp. mays
  peptide (1)..(409): Ceres Seq. ID no. 12345471
  misc_feature (29)..(406): Homolog of NCBI NO: 15225520 NR Description: putative protein kinase
  misc_feature (267)..(380): Homolog of NCBI NO: 8778537 NR Description: F22G5.5 [Arabidopsis thaliana]
  misc_feature (38)..(267): Homolog of NCBI NO: 8778537 NR Description: F22G5.5 [Arabidopsis thaliana]
  misc_feature (38)..(380): Homolog of NCBI NO: 15222437 NR Description: protein kinase APK1A; protein id: At1g07570.1
  misc_feature (14)..(365): Homolog of NCBI NO: 15227001 NR Description: putative protein kinase; protein id: At2g28930.1
  misc_feature (14)..(380): Homolog of NCBI NO: 34897424 NR Description: putative protein kinase [Oryza sativa (japonica
  misc_feature (17)..(365): Homolog of NCBI NO: 15241749 NR Description: serine/threonine-specific protein kinase NAK
  misc_feature (17)..(365): Homolog of NCBI NO: 166809 NR Description: protein kinase
  misc_feature (17)..(392): Homolog of NCBI NO: 14719339 NR Description: putative protein kinase [Oryza sativa]
  misc_feature (30)..(408): Homolog of NCBI NO: 34906046 NR Description: putative serine/threonine-specific protein kinase
NKAFVVSHLLFFLPPPSTSIPESAMGNCWGTKISSDTAASPSTSPFPRSEGEILRCANVRSFTLTELMTSTRNFRPDSVLGEGGFGSVFKGWIDETTFAPARPGTGMVIAVKKLNQQGLQGHREWLAEVNYLGQLSHPSLVRLVGYCLQDEQRLLVYEFMPRGSLENHLFRTSRFQPLSWNLRIKVCPGSSQGPCVLAQRQGQSYLPRFQDIQRAPGFDFCVCFQNYNAKLSDFGLAKDGPTGDQSHVSTRVMGTYGYAAPEYLATGHLTPKSDVYSFGVVLLEMLSGRRAMDKNRPATEHNLVDWARPYLSSKRRVSRILDDRLAGHYPLPAVQRAAALALQCLSEDSRKRPTMDQVVASLQQLTAAQDHDDAHRSSRRYPKDHRQAAALNNRNLNAHRRLSALPLPE

SEQ ID NO: 3185 - protein, 385 aa, Zea mays subsp. mays
  peptide (1)..(385): Ceres Seq. ID no. 12345472
  misc_feature (5)..(382): Homolog of NCBI NO: 15225520 NR Description: putative protein kinase
  misc_feature (243)..(356): Homolog of NCBI NO: 8778537 NR Description: F22G5.5 [Arabidopsis thaliana]
  misc_feature (14)..(243): Homolog of NCBI NO: 8778537 NR Description: F22G5.5 [Arabidopsis thaliana]
  misc_feature (14)..(356): Homolog of NCBI NO: 15222437 NR Description: protein kinase APK1A; protein id: At1g07570.1
  misc_feature (1)..(341): Homolog of NCBI NO: 15227001 NR Description: putative protein kinase; protein id: At2g28930.1
  misc_feature (1)..(356): Homolog of NCBI NO: 34897424 NR Description: putative protein kinase [Oryza sativa (japonica
  misc_feature (1)..(341): Homolog of NCBI NO: 15241749 NR Description: serine/threonine-specific protein kinase NAK
  misc_feature (1)..(341): Homolog of NCBI NO: 166809 NR Description: protein kinase
  misc_feature (1)..(368): Homolog of NCBI NO: 14719339 NR Description: putative protein kinase [Oryza sativa]
  misc_feature (6)..(384): Homolog of NCBI NO: 34906046 NR Description: putative serine/threonine-specific protein kinase
MGNCWGTKISSDTAASPSTSPFPRSEGEILRCANVRSFTLTELMTSTRNFRPDSVLGEGGFGSVFKGWIDETTFAPARPGTGMVIAVKKLNQQGLQGHREWLAEVNYLGQLSHPSLVRLVGYCLQDEQRLLVYEFMPRGSLENHLFRTSRFQPLSWNLRIKVCPGSSQGPCVLAQRQGQSYLPRFQDIQRAPGFDFCVCFQNYNAKLSDFGLAKDGPTGDQSHVSTRVMGTYGYAAPEYLATGHLTPKSDVYSFGVVLLEMLSGRRAMDKNRPATEHNLVDWARPYLSSKRRVSRILDDRLAGHYPLPAVQRAAALALQCLSEDSRKRPTMDQVVASLQQLTAAQDHDDAHRSSRRYPKDHRQAAALNNRNLNAHRRLSALPLPE

SEQ ID NO: 3186 - protein, 342 aa, Zea mays subsp. mays
  peptide (1)..(342): Ceres Seq. ID no. 12345473
  misc_feature (1)..(339): Homolog of NCBI NO: 15225520 NR Description: putative protein kinase
  misc_feature (200)..(313): Homolog of NCBI NO: 8778537 NR Description: F22G5.5 [Arabidopsis thaliana]
  misc_feature (1)..(200): Homolog of NCBI NO: 8778537 NR Description: F22G5.5 [Arabidopsis thaliana]
  misc_feature (1)..(313): Homolog of NCBI NO: 15222437 NR Description: protein kinase APK1A; protein id: At1g07570.1
  misc_feature (1)..(298): Homolog of NCBI NO: 15227001 NR Description: putative protein kinase; protein id: At2g28930.1
  misc_feature (1)..(313): Homolog of NCBI NO: 34897424 NR Description: putative protein kinase [Oryza sativa (japonica
  misc_feature (1)..(298): Homolog of NCBI NO: 15241749 NR Description: serine/threonine-specific protein kinase NAK
  misc_feature (1)..(298): Homolog of NCBI NO: 166809 NR Description: protein kinase
  misc_feature (1)..(325): Homolog of NCBI NO: 14719339 NR Description: putative protein kinase [Oryza sativa]
  misc_feature (1)..(341): Homolog of NCBI NO: 34906046 NR Description: putative serine/threonine-specific protein kinase
MTSTRNFRPDSVLGEGGFGSVFKGWIDETTFAPARPGTGMVIAVKKLNQQGLQGHREWLAEVNYLGQLSHPSLVRLVGYCLQDEQRLLVYEFMPRGSLENHLFRTSRFQPLSWNLRIKVCPGSSQGPCVLAQRQGQSYLPRFQDIQRAPGFDFCVCFQNYNAKLSDFGLAKDGPTGDQSHVSTRVMGTYGYAAPEYLATGHLTPKSDVYSFGVVLLEMLSGRRAMDKNRPATEHNLVDWARPYLSSKRRVSRILDDRLAGHYPLPAVQRAAALALQCLSEDSRKRPTMDQVVASLQQLTAAQDHDDAHRSSRRYPKDHRQAAALNNRNLNAHRRLSALPLPE

SEQ ID NO: 3187 - DNA, 1221 bp, Zea mays subsp. mays
  misc_feature (1)..(1221): Ceres Seq. ID no. 12367375
  misc_feature: MA Experiment ID: 108535 Result: Down-regulated in Transcription
  misc_feature: MA Experiment 108535 PARAMETER Experiment Name: Zm_Meristem_P Parameter: Age (day) Value: 8
  misc_feature: MA Experiment 108535 PARAMETER Experiment Name: Zm_Meristem_P Parameter: Organism Value: Zea mays
  misc_feature: MA Experiment 108535 PARAMETER Experiment Name: Zm_Meristem_P Parameter: Plant Line Value: 35A19
  misc_feature: MA Experiment 108535 PARAMETER Experiment Name: Zm_Meristem_P Parameter: Tissue Value: Root Meristem vs. Above Root Meristem
cgcctgggccggctgcatctttctcctcccaccatcacctcctcctctttatccatctgccagggcgcacgaggagaacggcggcgtctgagatcgcgaggccgaggcttgtcccgtcctcgctcggctccgctcctctcacccacggtttctggaggacaattctttgctatctagccttcctcaaaagtaaaaagggtaaatgggatcagaaggaccttcagttgtgactgtccatgttactggatttaagaagttccatggggttgctgagaacccaactgagaaaattgtgaccaatcttaaatctttcttggaaaagcgagggttgccaaaaaatcttgtcctcggaagctgcacagttctcgaaacagcaggggaaggggcacttgccacattatataaggttttagagtctgctgttgcagacagaggaactgggtcctcggcacagggacaagtaatttggatccactttggggtcaacagtggcgcaataaggtttgcccttgagaaccaagctgttaatgaggctaccttccggtgtccagatgagctaggatggaaaccacagagggtccctattgtgccctctgatggaagcatctcacggacgagagagactaccctgccagtcaatgaattaaccaagtcactccggaagataggctacgacgtggtgccctccggcgacgccggtcggtttgtatgcaactacgtgtactaccactctcttcggttcgcggagcaacacggcatcaaatccctgttcgtgcatgttcccctcttcttgacgatcgacgaggaggtccagatgcacttcgtcgcttccctccttgaagtcatcgctttctcctccaactaggaacagcagttggaagatcagcgtctgaattcctatctcaaggatggatgtaaagctggaatgctgcatgtaggctgaataaggtggtgtggtcattggcgatagatgttaatcttgctccagagggtgtgtttgggaatcgggagagaaaaaaagagaggtcattggcgatagatgttgatcttgctccagagggtgtgtttgggaattgggagggggaaaaaagaggaaattgctgcatagagtcagacggtgtatcagcttgtacgccatcaatcaagtgctgtaaacatgcctgggaaataattggggacctggatttgaataagatttgagttgttgggggcggacgcgct

SEQ ID NO: 3188 - protein, 220 aa, Zea mays subsp. mays
  peptide (1)..(220): Ceres Seq. ID no. 12367376
  misc_feature (11)..(213): Pfam Name: Pyroglutamyl peptidase Pfam Description: Pyroglutamyl peptidase
  misc_feature (88)..(194): Homolog of NCBI NO: 18977671 NR Description: pyroglutamyl-peptidase i [Pyrococcus furiosus DSM
  misc_feature (1)..(89): Homolog of NCBI NO: 15220751 NR Description: hypothetical protein; protein id: At1g23430.1
  misc_feature (1)..(89): Homolog of NCBI NO: 9295697 NR Description: F26F24.31 [Arabidopsis thaliana]
  misc_feature (72)..(216): Homolog of NCBI NO: 15220753 NR Description: hypothetical protein; protein id: At1g23440.1
  misc_feature (1)..(89): Homolog of NCBI NO: 8778575 NR Description: F28C11.8 [Arabidopsis thaliana]
  misc_feature (90)..(216): Homolog of NCBI NO: 8778575 NR Description: F28C11.8 [Arabidopsis thaliana]
  misc_feature (1)..(216): Homolog of NCBI NO: 13430708 NR Description: unknown protein [Arabidopsis thaliana]
  misc_feature (1)..(216): Homolog of NCBI NO: 18405940 NR Description: expressed protein
  misc_feature (1)..(220): Homolog of NCBI NO: 12039349 NR Description: putative pyrrolidone carboxyl peptidase [Oryza
  misc_feature (1)..(216): Homolog of NCBI NO: 38175741 NR Description: pyrrolidone carboxyl peptidase-like protein
MGSEGPSVVTVHVTGFKKFHGVAENPTEKIVTNLKSFLEKRGLPKNLVLGSCTVLETAGEGALATLYKVLESAVADRGTGSSAQGQVIWIHFGVNSGAIRFALENQAVNEATFRCPDELGWKPQRVPIVPSDGSISRTRETTLPVNELTKSLRKIGYDVVPSGDAGRFVCNYVYYHSLRFAEQHGIKSLFVHVPLFLTIDEEVQMHFVASLLEVIAFSSN

SEQ ID NO: 3189 - DNA, 1711 bp, Zea mays subsp. mays
  misc_feature (1)..(1711): Ceres Seq. ID no. 12342793
  misc_feature: MA Experiment ID: 108527 Result: Up-regulated in Transcription
  misc_feature: MA Experiment 108527 PARAMETER Experiment Name: Zm_5mM_NO_P Parameter: Age (day) Value: 8
  misc_feature: MA Experiment 108527 PARAMETER Experiment Name: Zm_5mM_NO_P Parameter: Organism Value: Zea mays
  misc_feature: MA Experiment 108527 PARAMETER Experiment Name: Zm_5mM_NO_P Parameter: Plant Line Value: 35A19
  misc_feature: MA Experiment 108527 PARAMETER Experiment Name: Zm_5mM_NO_P Parameter: Timepoint (hr) Value: 6
  misc_feature: MA Experiment 108527 PARAMETER Experiment Name: Zm_5mM_NO_P Parameter: Tissue Value: Aerial
  misc_feature: MA Experiment 108527 PARAMETER Experiment Name: Zm_5mM_NO_P Parameter: Treatment Value: 5mM NO vs. No Treatment
  misc_feature: MA Experiment ID: 108534 Result: Up-regulated in Transcription
  misc_feature: MA Experiment 108534 PARAMETER Experiment Name: Zm_4deg_Cold_P Parameter: Age (hr) Value: 8
  misc_feature: MA Experiment 108534 PARAMETER Experiment Name: Zm_4deg_Cold_P Parameter: Organism Value: Zea mays
  misc_feature: MA Experiment 108534 PARAMETER Experiment Name: Zm_4deg_Cold_P Parameter: Plant Line Value: 35A19
  misc_feature: MA Experiment 108534 PARAMETER Experiment Name: Zm_4deg_Cold_P Parameter: Temperature (deg C) Value: 4 vs. 22
  misc_feature: MA Experiment 108534 PARAMETER Experiment Name: Zm_4deg_Cold_P Parameter: Timepoint (hr) Value: 6
  misc_feature: MA Experiment 108534 PARAMETER Experiment Name: Zm_4deg_Cold_P Parameter: Tissue Value: Aerial
  misc_feature: MA Experiment ID: 108543 Result: Up-regulated in Transcription
  misc_feature: MA Experiment ID: 108688 Result: Down-regulated in Transcription
  misc_feature: MA Experiment 108688 PARAMETER Experiment Name: Zm_Embryos-Flowers__P Parameter: Tissue Value: Immature Flowers vs. Aerial+
  misc_feature: MA Experiment ID: 20000535 Result: Down-regulated in Transcription
  misc_feature: MA Experiment 20000535 PARAMETER Experiment Name: Zm_Hybrid_Seed_Dev_P Parameter: DAP Value: 30 vs. 12
  misc_feature: MA Experiment 20000535 PARAMETER Experiment Name: Zm_Hybrid_Seed_Dev_P Parameter: Organism Value: Zea mays
  misc_feature: MA Experiment 20000535 PARAMETER Experiment Name: Zm_Hybrid_Seed_Dev_P Parameter: Plant Line Value: 35A19
  misc_feature: MA Experiment 20000535 PARAMETER Experiment Name: Zm_Hybrid_Seed_Dev_P Parameter: Tissue Value: Embryo vs. Unfert Floret
agaaacgtactgactgtccaccactccgctaaccaaagtccaaagccaacgcaagcaatccttcggacttcggtgggggaaatggaggccgccgcagccgccgagacggggctcgcccagaaaccggttgtgctgtacccttcgccggggatgggccacctggtctccatgatcgagcttggcaagatcctcggcgcgcggggactgtccgtaataattgtcgtcgtcgagcctcccttcaacacgggcgctacggcgcctttcctcgccggcgtctccgcggccaacccgtccatctccttccaccgcctgcccaaagtcgagcgcctcccgcccgtcaagacgaagcaccaggaggcgctcaccttcgaggtcacccgcgtctccaatccgcacctccgcgagttcctggccgccgcgtccccagccgtgctcgtcgtcgacttcttctgcagcatcgccctggacgtggcggaggagctccgcgtgcccgcctacttcttcttcacctcgggcgccgaggtcctggccttcttcctgcacctcccggcgatccacgagcggaccgccgcgagcttccaggacatggggaaggagctcgtgcacgtgccgggcatcccgtcattcccggcgacgcactccatcctgcccaccatggagcgcgacgacgtggcctacgacggcttcctaaagggctgcaccgacctctgccgctcccagggcatcatggtcaacacgttccgctcgctggagcagcgcgccgtcgagaccgtggccgcgggccactgcacgccccccggcctcccgaccccgcccatctactgcatcgggccgctcatcaagtccgaggaggtgctgggcaagggcggcgaggagtgcctggcgtggctggacgcgcagcccagggccagcgtggtgttcctctgcttcggcagcatcggccggttcagcgtggagcagatcagggaggtggcggccggcctggaagccagcgggcagcggttcttgtgggtggtccgagccccgcccagcgacgacccggccaagaagttcgagaggccgccggagccggacctggatgcgctcctcccggaggggttcctagcccggaccaaggataggggtctcgtggtcaggtcgtgggcgccgcagcgggacgtgctggcgcacgcgtccgtgggcggcttcgtgacgcactgcggctggaactcggtcctggaggcggtgatggcgggcgtgccgatggtggcgtggccgctctacgcggagcagcggctcaaccgggtgtttctggagaaggagatgcagctggccgtggccgtggaagggtacgacagcgacgagggcctcgtggcggccgaggaggttgctgccaaggtgcgatggctcatggagtccgatggcgggaggatgctccggaagcgcacgctggcggccatgcggcaggccaaggacgcgctgcgtgagggcggtgagtcggaggccacactgaccggattggtggacgagtggaaacgcatttgacgcggtatgtggggattgggaacgtgtgacgttacgcgacggatgaagtgccggtcatcatttttttaaataaaatatatattagtaatatattcatgtatttttcaataaaagatacaatttattgcattatactcgtgcgtgcggcgtgccaacaataataagatatctactctttattagattg

SEQ ID NO: 3190 - protein, 507 aa, Zea mays subsp. mays
  peptide (1)..(507): Ceres Seq. ID no. 12342794
  misc_feature (42)..(484): Pfam Name: UDP-glucoronosyl and UDP-glucosyl transferase Pfam Description: UDP-glucoronosyl and UDP-glucosyl transferase
  misc_feature (38)..(494): Homolog of NCBI NO: 34910222 NR Description: putative flavonol glucosyltransferase
  misc_feature (38)..(489): Homolog of NCBI NO: 30684106 NR Description: glycosyltransferase family [Arabidopsis thaliana]
  misc_feature (38)..(489): Homolog of NCBI NO: 18401155 NR Description: putative glucosyltransferase; protein id:
  misc_feature (40)..(503): Homolog of NCBI NO: 34910206 NR Description: putative flavonol glucosyltransferase
  misc_feature (38)..(504): Homolog of NCBI NO: 21593785 NR Description: putative glucosyltransferase [Arabidopsis
  misc_feature (38)..(504): Homolog of NCBI NO: 18401158 NR Description: putative glucosyltransferase
  misc_feature (40)..(507): Homolog of NCBI NO: 34910204 NR Description: putative flavonol glucosyltransferase
  misc_feature (43)..(502): Homolog of NCBI NO: 34910228 NR Description: putative flavonol glucosyltransferase
  misc_feature (40)..(505): Homolog of NCBI NO: 34910208 NR Description: putative flavonol glucosyltransferase
  misc_feature (28)..(505): Homolog of NCBI NO: 22535568 NR Description: putative glucosyltransferase
RNVLTVHHSANQSPKPTQAILRTSVGEMEAAAAAETGLAQKPVVLYPSPGMGHLVSMIELGKILGARGLSVIIVVVEPPFNTGATAPFLAGVSAANPSISFHRLPKVERLPPVKTKHQEALTFEVTRVSNPHLREFLAAASPAVLVVDFFCSIALDVAEELRVPAYFFFTSGAEVLAFFLHLPAIHERTAASFQDMGKELVHVPGIPSFPATHSILPTMERDDVAYDGFLKGCTDLCRSQGIMVNTFRSLEQRAVETVAAGHCTPPGLPTPPIYCIGPLIKSEEVLGKGGEECLAWLDAQPRASVVFLCFGSIGRFSVEQIREVAAGLEASGQRFLWVVRAPPSDDPAKKFERPPEPDLDALLPEGFLARTKDRGLVVRSWAPQRDVLAHASVGGFVTHCGWNSVLEAVMAGVPMVAWPLYAEQRLNRVFLEKEMQLAVAVEGYDSDEGLVAAEEVAAKVRWLMESDGGRMLRKRTLAAMRQAKDALREGGESEATLTGLVDEWKRI

SEQ ID NO: 3191 - protein, 480 aa, Zea mays subsp. mays
  peptide (1)..(480): Ceres Seq. ID no. 12342795
  misc_feature (15)..(457): Pfam Name: UDP-glucoronosyl and UDP-glucosyl transferase Pfam Description: UDP-glucoronosyl and UDP-glucosyl transferase
  misc_feature (11)..(467): Homolog of NCBI NO: 34910222 NR Description: putative flavonol glucosyltransferase
  misc_feature (11)..(462): Homolog of NCBI NO: 30684106 NR Description: glycosyltransferase family [Arabidopsis thaliana]
  misc_feature (11)..(462): Homolog of NCBI NO: 18401155 NR Description: putative glucosyltransferase; protein id:
  misc_feature (13)..(476): Homolog of NCBI NO: 34910206 NR Description: putative flavonol glucosyltransferase
  misc_feature (11)..(477): Homolog of NCBI NO: 21593785 NR Description: putative glucosyltransferase [Arabidopsis
  misc_feature (11)..(477): Homolog of NCBI NO: 18401158 NR Description: putative glucosyltransferase
  misc_feature (13)..(480): Homolog of NCBI NO: 34910204 NR Description: putative flavonol glucosyltransferase
  misc_feature (16)..(475): Homolog of NCBI NO: 34910228 NR Description: putative flavonol glucosyltransferase
  misc_feature (13)..(478): Homolog of NCBI NO: 34910208 NR Description: putative flavonol glucosyltransferase
  misc_feature (1)..(478): Homolog of NCBI NO: 22535568 NR Description: putative glucosyltransferase
MEAAAAAETGLAQKPVVLYPSPGMGHLVSMIELGKILGARGLSVIIVVVEPPFNTGATAPFLAGVSAANPSISFHRLPKVERLPPVKTKHQEALTFEVTRVSNPHLREFLAAASPAVLVVDFFCSIALDVAEELRVPAYFFFTSGAEVLAFFLHLPAIHERTAASFQDMGKELVHVPGIPSFPATHSILPTMERDDVAYDGFLKGCTDLCRSQGIMVNTFRSLEQRAVETVAAGHCTPPGLPTPPIYCIGPLIKSEEVLGKGGEECLAWLDAQPRASVVFLCFGSIGRFSVEQIREVAAGLEASGQRFLWVVRAPPSDDPAKKFERPPEPDLDALLPEGFLARTKDRGLVVRSWAPQRDVLAHASVGGFVTHCGWNSVLEAVMAGVPMVAWPLYAEQRLNRVFLEKEMQLAVAVEGYDSDEGLVAAEEVAAKVRWLMESDGGRMLRKRTLAAMRQAKDALREGGESEATLTGLVDEWKRI

SEQ ID NO: 3192 - protein, 457 aa, Zea mays subsp. mays
  peptide (1)..(457): Ceres Seq. ID no. 12342796
  misc_feature (1)..(434): Pfam Name: UDP-glucoronosyl and UDP-glucosyl transferase Pfam Description: UDP-glucoronosyl and UDP-glucosyl transferase
  misc_feature (1)..(453): Homolog of NCBI NO: 34910206 NR Description: putative flavonol glucosyltransferase
  misc_feature (1)..(454): Homolog of NCBI NO: 21593785 NR Description: putative glucosyltransferase [Arabidopsis
  misc_feature (1)..(454): Homolog of NCBI NO: 18401158 NR Description: putative glucosyltransferase
  misc_feature (1)..(457): Homolog of NCBI NO: 34910204 NR Description: putative flavonol glucosyltransferase
  misc_feature (1)..(439): Homolog of NCBI NO: 30684106 NR Description: glycosyltransferase family [Arabidopsis thaliana]
  misc_feature (1)..(439): Homolog of NCBI NO: 18401155 NR Description: putative glucosyltransferase; protein id:
  misc_feature (1)..(444): Homolog of NCBI NO: 34910222 NR Description: putative flavonol glucosyltransferase
  misc_feature (1)..(452): Homolog of NCBI NO: 34910228 NR Description: putative flavonol glucosyltransferase
  misc_feature (1)..(455): Homolog of NCBI NO: 34910208 NR Description: putative flavonol glucosyltransferase
  misc_feature (1)..(455): Homolog of NCBI NO: 22535568 NR Description: putative glucosyltransferase
MGHLVSMIELGKILGARGLSVIIVVVEPPFNTGATAPFLAGVSAANPSISFHRLPKVERLPPVKTKHQEALTFEVTRVSNPHLREFLAAASPAVLVVDFFCSIALDVAEELRVPAYFFFTSGAEVLAFFLHLPAIHERTAASFQDMGKELVHVPGIPSFPATHSILPTMERDDVAYDGFLKGCTDLCRSQGIMVNTFRSLEQRAVETVAAGHCTPPGLPTPPIYCIGPLIKSEEVLGKGGEECLAWLDAQPRASVVFLCFGSIGRFSVEQIREVAAGLEASGQRFLWVVRAPPSDDPAKKFERPPEPDLDALLPEGFLARTKDRGLVVRSWAPQRDVLAHASVGGFVTHCGWNSVLEAVMAGVPMVAWPLYAEQRLNRVFLEKEMQLAVAVEGYDSDEGLVAAEEVAAKVRWLMESDGGRMLRKRTLAAMRQAKDALREGGESEATLTGLVDEWKRI

SEQ ID NO: 3193 - DNA, 2047 bp, Zea mays subsp. mays
  misc_feature (1)..(2047): Ceres Seq. ID no. 12356085
  misc_feature: MA Experiment ID: 108527 Result: Up-regulated in Transcription
  misc_feature: MA Experiment 108527 PARAMETER Experiment Name: Zm_5mM_NO_P Parameter: Age (day) Value: 8
  misc_feature: MA Experiment 108527 PARAMETER Experiment Name: Zm_5mM_NO_P Parameter: Organism Value: Zea mays
  misc_feature: MA Experiment 108527 PARAMETER Experiment Name: Zm_5mM_NO_P Parameter: Plant Line Value: 35A19
  misc_feature: MA Experiment 108527 PARAMETER Experiment Name: Zm_5mM_NO_P Parameter: Timepoint (hr) Value: 6
  misc_feature: MA Experiment 108527 PARAMETER Experiment Name: Zm_5mM_NO_P Parameter: Tissue Value: Aerial
  misc_feature: MA Experiment 108527 PARAMETER Experiment Name: Zm_5mM_NO_P Parameter: Treatment Value: 5mM NO vs. No Treatment
acaaacttccctgaattcctgttcgctaccttcgcttccgctccaaaaaccaaataaaaaacgcacctttccttcccttctcctccccttcgctttcccccgtcctcccttccctcgatcccctcgccggaaaagatcccattccatccacctccacgtcccggcgcaatcagagtttccggcggcaaagcaggaaggcggaagcgaaaggaatgttgcacctttaagtagcgcggcgacctggtgtttcttcctggccggcgatgggctgcttcccgtgcttcgactccccggcagatgagcagcttaaccccaaattcggtggcgccggtgggtacggcggcacgtcctctgccgtcgcggcgtacggaaacggcacaggcgccggcgtcagcatcggccggcacggggacagggggtacccggacctgcagcaggcgcccatggcggctccgcgcgtcgagaagctctcagcagcggctgagaaagcaagagtaaagagcaatgggctcaccaaagaggctttggtgccaaaggatgccaatggcaatgccatctcagcgcaaactttcaccttccgtgagcttgctaccgccaccaggaacttcaggcccgagtgcttcctgggagagggaggttttggacgtgtttacaagggccgccttgagagcacaggccaggttgttgctataaagcagcttaacagggatgggcttcaaggaaacagagaatttctagtagaagttctcatgctcagcttactacatcatcaaaacctggttaatttgattggttattgtgctgatggagaccagagacttcttgtttatgaatatatgccttctggatcacttgaagatcatttgcacgatctacctcttgataaagaggccttggactggaacaccaggatgaaaattgcagcaggtgctgccaaaggactggagtaccttcatgacaaagctaatccaccagttatttatagggatttcaagtcatcgaacattctgttggatgaaagtttccacccgaagctgtctgattttggacttgctaagttgggtccagttggcgacaaatcacatgtctcaacacgtgtaatgggtacatatggttattgtgcaccagaatatgctatgacagggcagctgacagtgaagtctgacgtgtatagttttggggttgtcttgctagagttgattactggccgtagggctattgacagcaccagaccacatggagaacaaaatcttgtctcatgggcacgtcctctgtttaacgacagaagaaagctccctaagatggctgacccgaggctggaagggcgataccccatgcgtgggctttaccaagcccttgcagtggcttcgatgtgcattcagtcggaggctgcttcacgcccactgattgcagatgtcgtgactgctctgtcctacttggcatcccagccatatgatcccaacgcagctcttgcttcaaggaagccaggcggcgatcagcgaagcaagcctggcgagaacggcagggcagtttccaggaatgatgaaactggaagctccggccacaaaacacctgccaaggaccgagaggactcacctagggacctcccagcgatcctgaacaaggaccttgaccgggagcgcatggtggccgaggcgaagatgtggggcgaccgggagcgcatggtggccgaggctaagatgtggggcgaccgagagcgcatggtggctgaggcgaagatgtggggtgaaaattggcgtgacaagcggcgtgcagagattgggcaggggagcctggattcggttactgggaacagctagggggcaattaagcgaacagaaacgtgacatccacccatgcatttcgtttgtttatttccaggtccattttcgttctggcggcggtcggcaggccccagggttgtacatttctaggtcagggaagagtgggaaagcggcagcgttgtactggacagtgaatgcatgtggttgtacatgtaaattctcagaaaagttttgtgagaatgaaaggacatatttgagttccg

SEQ ID NO: 3194 - protein, 518 aa, Zea mays subsp. mays
  peptide (1)..(518): Ceres Seq. ID no. 12356086
  misc_feature (46)..(404): Homolog of NCBI NO: 34395193 NR Description: putative protein serine/threonine kinase
  misc_feature (85)..(401): Homolog of NCBI NO: 34394036 NR Description: putative protein serine/threonine kinase BNK1
  misc_feature (73)..(513): Homolog of NCBI NO: 34907210 NR Description: putative serine/threonine kinase PBS1 protein
  misc_feature (483)..(513): Homolog of NCBI NO: 15238886 NR Description: protein kinase -like protein; protein id:
  misc_feature (85)..(482): Homolog of NCBI NO: 15238886 NR Description: protein kinase -like protein; protein id:
  misc_feature (334)..(517): Homolog of NCBI NO: 21740745 NR Description: OSJNBa0072K14.10 [Oryza sativa (japonica
  misc_feature (35)..(333): Homolog of NCBI NO: 21740745 NR Description: OSJNBa0072K14.10 [Oryza sativa (japonica
  misc_feature (1)..(17): Homolog of NCBI NO: 15240038 NR Description: protein kinase-like
  misc_feature (483)..(513): Homolog of NCBI NO: 15240038 NR Description: protein kinase-like
  misc_feature (57)..(473): Homolog of NCBI NO: 15240038 NR Description: protein kinase-like
MGCFPCFDSPADEQLNPKFGGAGGYGGTSSAVAAYGNGTGAGVSIGRHGDRGYPDLQQAPMAAPRVEKLSAAAEKARVKSNGLTKEALVPKDANGNAISAQTFTFRELATATRNFRPECFLGEGGFGRVYKGRLESTGQVVAIKQLNRDGLQGNREFLVEVLMLSLLHHQNLVNLIGYCADGDQRLLVYEYMPSGSLEDHLHDLPLDKEALDWNTRMKIAAGAAKGLEYLHDKANPPVIYRDFKSSNILLDESFHPKLSDFGLAKLGPVGDKSHVSTRVMGTYGYCAPEYAMTGQLTVKSDVYSFGVVLLELITGRRAIDSTRPHGEQNLVSWARPLFNDRRKLPKMADPRLEGRYPMRGLYQALAVASMCIQSEAASRPLIADVVTALSYLASQPYDPNAALASRKPGGDQRSKPGENGRAVSRNDETGSSGHKTPAKDREDSPRDLPAILNKDLDRERMVAEAKMWGDRERMVAEAKMWGDRERMVAEAKMWGENWRDKRRAEIGQGSLDSVTGNS

SEQ ID NO: 3195 - protein, 458 aa, Zea mays subsp. mays
  peptide (1)..(458): Ceres Seq. ID no. 12356087
  misc_feature (11)..(355): Homolog of NCBI NO: 11259782 NR Description: protein kinase-like - Arabidopsis thaliana
  misc_feature (1)..(344): Homolog of NCBI NO: 34395193 NR Description: putative protein serine/threonine kinase
  misc_feature (25)..(341): Homolog of NCBI NO: 34394036 NR Description: putative protein serine/threonine kinase BNK1
  misc_feature (13)..(453): Homolog of NCBI NO: 34907210 NR Description: putative serine/threonine kinase PBS1 protein
  misc_feature (423)..(453): Homolog of NCBI NO: 15238886 NR Description: protein kinase -like protein; protein id:
  misc_feature (25)..(422): Homolog of NCBI NO: 15238886 NR Description: protein kinase -like protein; protein id:
  misc_feature (274)..(457): Homolog of NCBI NO: 21740745 NR Description: OSJNBa0072K14.10 [Oryza sativa (japonica
  misc_feature (1)..(273): Homolog of NCBI NO: 21740745 NR Description: OSJNBa0072K14.10 [Oryza sativa (japonica
  misc_feature (423)..(453): Homolog of NCBI NO: 15240038 NR Description: protein kinase-like
  misc_feature (1)..(413): Homolog of NCBI NO: 15240038 NR Description: protein kinase-like
MAAPRVEKLSAAAEKARVKSNGLTKEALVPKDANGNAISAQTFTFRELATATRNFRPECFLGEGGFGRVYKGRLESTGQVVAIKQLNRDGLQGNREFLVEVLMLSLLHHQNLVNLIGYCADGDQRLLVYEYMPSGSLEDHLHDLPLDKEALDWNTRMKIAAGAAKGLEYLHDKANPPVIYRDFKSSNILLDESFHPKLSDFGLAKLGPVGDKSHVSTRVMGTYGYCAPEYAMTGQLTVKSDVYSFGVVLLELITGRRAIDSTRPHGEQNLVSWARPLFNDRRKLPKMADPRLEGRYPMRGLYQALAVASMCIQSEAASRPLIADVVTALSYLASQPYDPNAALASRKPGGDQRSKPGENGRAVSRNDETGSSGHKTPAKDREDSPRDLPAILNKDLDRERMVAEAKMWGDRERMVAEAKMWGDRERMVAEAKMWGENWRDKRRAEIGQGSLDSVTGNS

SEQ ID NO: 3196 - protein, 356 aa, Zea mays subsp. mays
  peptide (1)..(356): Ceres Seq. ID no. 12356088
  misc_feature (1)..(253): Homolog of NCBI NO: 11259782 NR Description: protein kinase-like - Arabidopsis thaliana
  misc_feature (1)..(242): Homolog of NCBI NO: 34395193 NR Description: putative protein serine/threonine kinase
  misc_feature (1)..(239): Homolog of NCBI NO: 34394036 NR Description: putative protein serine/threonine kinase BNK1
  misc_feature (1)..(351): Homolog of NCBI NO: 34907210 NR Description: putative serine/threonine kinase PBS1 protein
  misc_feature (321)..(351): Homolog of NCBI NO: 15238886 NR Description: protein kinase -like protein; protein id:
  misc_feature (1)..(320): Homolog of NCBI NO: 15238886 NR Description: protein kinase -like protein; protein id:
  misc_feature (172)..(355): Homolog of NCBI NO: 21740745 NR Description: OSJNBa0072K14.10 [Oryza sativa (japonica
  misc_feature (1)..(171): Homolog of NCBI NO: 21740745 NR Description: OSJNBa0072K14.10 [Oryza sativa (japonica
  misc_feature (321)..(351): Homolog of NCBI NO: 15240038 NR Description: protein kinase-like
  misc_feature (1)..(311): Homolog of NCBI NO: 15240038 NR Description: protein kinase-like
MLSLLHHQNLVNLIGYCADGDQRLLVYEYMPSGSLEDHLHDLPLDKEALDWNTRMKIAAGAAKGLEYLHDKANPPVIYRDFKSSNILLDESFHPKLSDFGLAKLGPVGDKSHVSTRVMGTYGYCAPEYAMTGQLTVKSDVYSFGVVLLELITGRRAIDSTRPHGEQNLVSWARPLFNDRRKLPKMADPRLEGRYPMRGLYQALAVASMCIQSEAASRPLIADVVTALSYLASQPYDPNAALASRKPGGDQRSKPGENGRAVSRNDETGSSGHKTPAKDREDSPRDLPAILNKDLDRERMVAEAKMWGDRERMVAEAKMWGDRERMVAEAKMWGENWRDKRRAEIGQGSLDSVTGNS

SEQ ID NO: 3197 - DNA, 1313 bp, Zea mays subsp. mays
  misc_feature (1)..(1313): Ceres Seq. ID no. 13564341
  misc_feature: MA Experiment ID: 20000534 Result: Down-regulated in Transcription
  misc_feature: MA Experiment 20000534 PARAMETER Experiment Name: Zm_Hybrid_Pollen_P Parameter: Age (day) Value: 8
  misc_feature: MA Experiment 20000534 PARAMETER Experiment Name: Zm_Hybrid_Pollen_P Parameter: Organism Value: Zea mays
  misc_feature: MA Experiment 20000534 PARAMETER Experiment Name: Zm_Hybrid_Pollen_P Parameter: Plant Line Value: 35A19
  misc_feature: MA Experiment 20000534 PARAMETER Experiment Name: Zm_Hybrid_Pollen_P Parameter: Tissue Value: Pollen vs. Aerial
atcgcccgctgctcctctatccctttactgctgctgctactaccttaagctatcactatcatggccttgatgctgctagcgcgcaacctgcgctcccgccgccgcccaccgctcgccgccgccgcggcgttctcgtcggccgcggcggaggcggagagggcgatacgggacgggccgcggaacgactggagccggcccgagatccaggccgtctacgactcaccgctcctcgacctcctctttcacggggctcaggtccacagaaatgtccataaattcagagaagtgcagcaatgcacacttctttcaatcaagactggtggatgcagtgaagattgttcttactgtcctcagtcatcaagatacaacactggattgaaggcccaaaaattgatgaacaaagatgctgtcttggaagcagcaaaaaaggcaaaagagtctgggagcacccgtttttgcatgggagctgcatggagagaaaccattggcaggaaatcaaacttcaaccagattcttgaatatgtcaaggaaataaggggtatggacatggaggtctgttgcacactaggcatgatagagaaacaacaagctgaagaactcaagaaggctggacttacagcatataatcataacctagatacatcaagagagtattatcccaacattattaccacaagatcatatgatgatagactgcagactcttgagcatgtccgtgaagctggaataagcatctgctcaggtggaatcattggtcttggtgaagcagaggaggaccgggtagggttgttgcataccctagctaccttgcctacacacccagagagcgttcctattaatgcattggttgctgtaaaaggcacacctcttgaggaccagaagcctgtagagatctgggaaatgatccgcatgatcgccactgctcggatcacgatgccaaaggcaatggtgaggctttcagcaggccgagtacggttctcgatgccagaacaagcgctgtgcttcctcgctggggccaactccatctttgccggcgagaaacttctcacaaccgcaaacaacgactttgatgcggaccaggcgatgttcaagatccttggcctgatccccaaggctccaagctttggcgaggaagaggcgtctgcggcggctcccacagaatccgagaggtctgagcaagctgcttcgatgtagaatatatacatatcattaccgattatccgtatcacggttggggcgaaactagaactaccgttgtagctagagcattggattgtagaaaccacaacatttcattattttgtaattgcttg

SEQ ID NO: 3198 - protein, 377 aa, Zea mays subsp. mays
  peptide (1)..(377): Ceres Seq. ID no. 13564342
  misc_feature (83)..(247): Pfam Name: Radical SAM superfamily Pfam Description: Radical SAM superfamily
  misc_feature (83)..(247): Pfam Name: Radical SAM superfamily Pfam Description: Radical SAM superfamily
  misc_feature (39)..(350): Homolog of NCBI NO: 11596107 NR Description: biotin synthase long form [Pichia jadinii]
  misc_feature (40)..(354): Homolog of NCBI NO: 17229413 NR Description: biotin synthase [Nostoc sp. PCC 7120]
  misc_feature (38)..(364): Homolog of NCBI NO: 23127772 NR Description: hypothetical protein [Nostoc punctiforme]
  misc_feature (40)..(348): Homolog of NCBI NO: 2961328 NR Description: Biotin synthase [Schizosaccharomyces pombe]
  misc_feature (40)..(348): Homolog of NCBI NO: 19075228 NR Description: biotin synthase (EC 2.8.1.6) [Schizosaccharomyces
  misc_feature (39)..(350): Homolog of NCBI NO: 11596107 NR Description: biotin synthase long form [Pichia jadinii]
  misc_feature (38)..(364): Homolog of NCBI NO: 23127772 NR Description: hypothetical protein [Nostoc punctiforme]
  misc_feature (40)..(348): Homolog of NCBI NO: 19075228 NR Description: biotin synthase (EC 2.8.1.6) [Schizosaccharomyces
  misc_feature (3)..(377): Homolog of NCBI NO: 38175566 NR Description: putative biotin synthase [Oryza sativa (japonica
  misc_feature (4)..(376): Homolog of NCBI NO: 15224273 NR Description: biotin synthase (BioB) (BIO2) [Arabidopsis
  misc_feature (4)..(376): Homolog of NCBI NO: 28392925 NR Description: putative biotin synthase (Bio B) [Arabidopsis
  misc_feature (40)..(360): Homolog of NCBI NO: 23135112 NR Description: hypothetical protein [Cytophaga hutchinsonii]
  misc_feature (17)..(367): Homolog of NCBI NO: 40738982 NR Description: hypothetical protein AN6643.2 [Aspergillus
  misc_feature (40)..(348): Homolog of NCBI NO: 2961328 NR Description: Biotin synthase [Schizosaccharomyces pombe]
  misc_feature (40)..(354): Homolog of NCBI NO: 17229413 NR Description: biotin synthase [Nostoc sp. PCC 7120]
  misc_feature (17)..(367): Homolog of NCBI NO: 40738982 NR Description: hypothetical protein AN6643.2 [Aspergillus
  misc_feature (40)..(360): Homolog of NCBI NO: 23135112 NR Description: hypothetical protein [Cytophaga hutchinsonii]
  misc_feature (4)..(376): Homolog of NCBI NO: 28392925 NR Description: putative biotin synthase (Bio B) [Arabidopsis
  misc_feature (4)..(376): Homolog of NCBI NO: 15224273 NR Description: biotin synthase (BioB) (BIO2) [Arabidopsis
  misc_feature (3)..(377): Homolog of NCBI NO: 38175566 NR Description: putative biotin synthase [Oryza sativa (japonica
MALMLLARNLRSRRRPPLAAAAAFSSAAAEAERAIRDGPRNDWSRPEIQAVYDSPLLDLLFHGAQVHRNVHKFREVQQCTLLSIKTGGCSEDCSYCPQSSRYNTGLKAQKLMNKDAVLEAAKKAKESGSTRFCMGAAWRETIGRKSNFNQILEYVKEIRGMDMEVCCTLGMIEKQQAEELKKAGLTAYNHNLDTSREYYPNIITTRSYDDRLQTLEHVREAGISICSGGIIGLGEAEEDRVGLLHTLATLPTHPESVPINALVAVKGTPLEDQKPVEIWEMIRMIATARITMPKAMVRLSAGRVRFSMPEQALCFLAGANSIFAGEKLLTTANNDFDADQAMFKILGLIPKAPSFGEEEASAAAPTESERSEQAASM

SEQ ID NO: 3199 - protein, 374 aa, Zea mays subsp. mays
  peptide (1)..(374): Ceres Seq. ID no. 13564343
  misc_feature (80)..(244): Pfam Name: Radical SAM superfamily Pfam Description: Radical SAM superfamily
  misc_feature (80)..(244): Pfam Name: Radical SAM superfamily Pfam Description: Radical SAM superfamily
  misc_feature (36)..(347): Homolog of NCBI NO: 11596107 NR Description: biotin synthase long form [Pichia jadinii]
  misc_feature (37)..(351): Homolog of NCBI NO: 17229413 NR Description: biotin synthase [Nostoc sp. PCC 7120]
  misc_feature (35)..(361): Homolog of NCBI NO: 23127772 NR Description: hypothetical protein [Nostoc punctiforme]
  misc_feature (37)..(345): Homolog of NCBI NO: 2961328 NR Description: Biotin synthase [Schizosaccharomyces pombe]
  misc_feature (37)..(345): Homolog of NCBI NO: 19075228 NR Description: biotin synthase (EC 2.8.1.6) [Schizosaccharomyces
  misc_feature (14)..(364): Homolog of NCBI NO: 40738982 NR Description: hypothetical protein AN6643.2 [Aspergillus
  misc_feature (1)..(373): Homolog of NCBI NO: 28392925 NR Description: putative biotin synthase (Bio B) [Arabidopsis
  misc_feature (1)..(374): Homolog of NCBI NO: 38175566 NR Description: putative biotin synthase [Oryza sativa (japonica
  misc_feature (37)..(345): Homolog of NCBI NO: 19075228 NR Description: biotin synthase (EC 2.8.1.6) [Schizosaccharomyces
  misc_feature (37)..(345): Homolog of NCBI NO: 2961328 NR Description: Biotin synthase [Schizosaccharomyces pombe]
  misc_feature (35)..(361): Homolog of NCBI NO: 23127772 NR Description: hypothetical protein [Nostoc punctiforme]
  misc_feature (37)..(351): Homolog of NCBI NO: 17229413 NR Description: biotin synthase [Nostoc sp. PCC 7120]
  misc_feature (36)..(347): Homolog of NCBI NO: 11596107 NR Description: biotin synthase long form [Pichia jadinii]
  misc_feature (1)..(373): Homolog of NCBI NO: 15224273 NR Description: biotin synthase (BioB) (BIO2) [Arabidopsis
  misc_feature (37)..(357): Homolog of NCBI NO: 23135112 NR Description: hypothetical protein [Cytophaga hutchinsonii]
  misc_feature (14)..(364): Homolog of NCBI NO: 40738982 NR Description: hypothetical protein AN6643.2 [Aspergillus
  misc_feature (37)..(357): Homolog of NCBI NO: 23135112 NR Description: hypothetical protein [Cytophaga hutchinsonii]
  misc_feature (1)..(373): Homolog of NCBI NO: 28392925 NR Description: putative biotin synthase (Bio B) [Arabidopsis
  misc_feature (1)..(373): Homolog of NCBI NO: 15224273 NR Description: biotin synthase (BioB) (BIO2) [Arabidopsis
  misc_feature (1)..(374): Homolog of NCBI NO: 38175566 NR Description: putative biotin synthase [Oryza sativa (japonica
MLLARNLRSRRRPPLAAAAAFSSAAAEAERAIRDGPRNDWSRPEIQAVYDSPLLDLLFHGAQVHRNVHKFREVQQCTLLSIKTGGCSEDCSYCPQSSRYNTGLKAQKLMNKDAVLEAAKKAKESGSTRFCMGAAWRETIGRKSNFNQILEYVKEIRGMDMEVCCTLGMIEKQQAEELKKAGLTAYNHNLDTSREYYPNIITTRSYDDRLQTLEHVREAGISICSGGIIGLGEAEEDRVGLLHTLATLPTHPESVPINALVAVKGTPLEDQKPVEIWEMIRMIATARITMPKAMVRLSAGRVRFSMPEQALCFLAGANSIFAGEKLLTTANNDFDADQAMFKILGLIPKAPSFGEEEASAAAPTESERSEQAASM

SEQ ID NO: 3200 - protein, 266 aa, Zea mays subsp. mays
  peptide (1)..(266): Ceres Seq. ID no. 13564344
  misc_feature (1)..(136): Pfam Name: Radical SAM superfamily Pfam Description: Radical SAM superfamily
  misc_feature (1)..(136): Pfam Name: Radical SAM superfamily Pfam Description: Radical SAM superfamily
  misc_feature (1)..(239): Homolog of NCBI NO: 11596107 NR Description: biotin synthase long form [Pichia jadinii]
  misc_feature (1)..(243): Homolog of NCBI NO: 17229413 NR Description: biotin synthase [Nostoc sp. PCC 7120]
  misc_feature (1)..(253): Homolog of NCBI NO: 23127772 NR Description: hypothetical protein [Nostoc punctiforme]
  misc_feature (1)..(237): Homolog of NCBI NO: 2961328 NR Description: Biotin synthase [Schizosaccharomyces pombe]
  misc_feature (1)..(237): Homolog of NCBI NO: 19075228 NR Description: biotin synthase (EC 2.8.1.6) [Schizosaccharomyces
  misc_feature (1)..(239): Homolog of NCBI NO: 11596107 NR Description: biotin synthase long form [Pichia jadinii]
  misc_feature (1)..(253): Homolog of NCBI NO: 23127772 NR Description: hypothetical protein [Nostoc punctiforme]
  misc_feature (1)..(237): Homolog of NCBI NO: 19075228 NR Description: biotin synthase (EC 2.8.1.6) [Schizosaccharomyces
  misc_feature (1)..(266): Homolog of NCBI NO: 38175566 NR Description: putative biotin synthase [Oryza sativa (japonica
  misc_feature (1)..(265): Homolog of NCBI NO: 15224273 NR Description: biotin synthase (BioB) (BIO2) [Arabidopsis
  misc_feature (1)..(265): Homolog of NCBI NO: 28392925 NR Description: putative biotin synthase (Bio B) [Arabidopsis
  misc_feature (1)..(249): Homolog of NCBI NO: 23135112 NR Description: hypothetical protein [Cytophaga hutchinsonii]
  misc_feature (1)..(256): Homolog of NCBI NO: 40738982 NR Description: hypothetical protein AN6643.2 [Aspergillus
  misc_feature (1)..(237): Homolog of NCBI NO: 2961328 NR Description: Biotin synthase [Schizosaccharomyces pombe]
  misc_feature (1)..(243): Homolog of NCBI NO: 17229413 NR Description: biotin synthase [Nostoc sp. PCC 7120]
  misc_feature (1)..(256): Homolog of NCBI NO: 40738982 NR Description: hypothetical protein AN6643.2 [Aspergillus
  misc_feature (1)..(249): Homolog of NCBI NO: 23135112 NR Description: hypothetical protein [Cytophaga hutchinsonii]
  misc_feature (1)..(265): Homolog of NCBI NO: 28392925 NR Description: putative biotin synthase (Bio B) [Arabidopsis
  misc_feature (1)..(265): Homolog of NCBI NO: 15224273 NR Description: biotin synthase (BioB) (BIO2) [Arabidopsis
  misc_feature (1)..(266): Homolog of NCBI NO: 38175566 NR Description: putative biotin synthase [Oryza sativa (japonica
MNKDAVLEAAKKAKESGSTRFCMGAAWRETIGRKSNFNQILEYVKEIRGMDMEVCCTLGMIEKQQAEELKKAGLTAYNHNLDTSREYYPNIITTRSYDDRLQTLEHVREAGISICSGGIIGLGEAEEDRVGLLHTLATLPTHPESVPINALVAVKGTPLEDQKPVEIWEMIRMIATARITMPKAMVRLSAGRVRFSMPEQALCFLAGANSIFAGEKLLTTANNDFDADQAMFKILGLIPKAPSFGEEEASAAAPTESERSEQAASM

SEQ ID NO: 3201 - DNA, 1382 bp, Zea mays subsp. mays
  misc_feature (1)..(1382): Ceres Seq. ID no. 12356032
  misc_feature: MA Experiment ID: 108543 Result: Down-regulated in Transcription
  misc_feature: MA Experiment ID: 108544 Result: Down-regulated in Transcription
  misc_feature: MA Experiment ID: 20000535 Result: Up-regulated in Transcription
  misc_feature: MA Experiment 20000535 PARAMETER Experiment Name: Zm_Hybrid_Seed_Dev_P Parameter: DAP Value: 30 vs. 12
  misc_feature: MA Experiment 20000535 PARAMETER Experiment Name: Zm_Hybrid_Seed_Dev_P Parameter: Organism Value: Zea mays
  misc_feature: MA Experiment 20000535 PARAMETER Experiment Name: Zm_Hybrid_Seed_Dev_P Parameter: Plant Line Value: 35A19
  misc_feature: MA Experiment 20000535 PARAMETER Experiment Name: Zm_Hybrid_Seed_Dev_P Parameter: Tissue Value: Embryo vs. Unfert Floret
atcccaccccgaagggcgtcgccgagctagccattgccgcctcccggctcgcgactcgcgagtcacaggcgcagccgagcgttccttggggacgaggctacatcgcgatgtggtggagggcggtgaggcgccggtgggtcgcgacggcgcggcccgcgtcctccgcggcggcgggggcggagaagagctgccgcgccgtggtggtgccgcgtttcggtgggccggaggtgctcgaggtcaggcagggcatgcctgtgcccgatctgaagccgcaggaggtgctcgtgcgcgcacgcgctgtctctatcaaccccctggaccttcgaatgcgatgtggctatgggcgctccatattcgaaccactcctacctctgatcattggtcgggacattagcggtgaagttgcggccaccggaactttggcatcgtctttttctattggccaagaagtgtttggttcgttgcatccaactgctctcagagggacatatgctgattatgctatcctgtcactggacgagcttactctcaaaccatctacactcagtcatgtggaggctagtgcaatcccgtttgctgctttgactgcatggcgcgctttacatggtacggctcgtatttctgaaggacaaagagttcttgtgattggtggaggaggagcggttggattagctgctgttcaacttgcggtggctgctgggtgtgtggtttctgctacctgtggaacacaaagtattgagcgagttatgggagttggtgctgaacaagctattgactacactgctgaggatactgaagcagcaattaaaggaaagtttgatgctgttttagacaccataggagtacctgagacagaaagaattggcatcaatgttcttaggagaggtggacactatatgacccttcagggagaagcagctgccctagcagataggtatggattggctgtagggcttcctgctgctactgctgttttactaaagaaacagatgcagtatcgttattctcatggaatagagtattggtggacatacatgagagctgacgccgaaggccttcacgagatccaaaggctatctggagctgggaaactacagatacctgtggagaagacctttcccatcagccatgtaagagaagctcatgcggccaaggagaaaaagttggctcctggcaaggtggttctggaattcgattaatgttattaagattttgtccattgggacctgaagggctgtgcgtttgcaaatcatgatagttttttttgtaaaaaaataaatctgaatctctctgccgacttcaggttccattttatcgttccgtttcagtagaaatacggtaaataatcatatcagctatggcctatgggcacgattttcctg

SEQ ID NO: 3202 - protein, 398 aa, Zea mays subsp. mays
  peptide (1)..(398): Ceres Seq. ID no. 12356033
  misc_feature (65)..(395): Homolog of NCBI NO: 17887352 NR Description: NOGO-interacting mitochondrial protein [Homo
  misc_feature (348)..(395): Homolog of NCBI NO: 13472500 NR Description: probable oxidoreductase [Mesorhizobium loti]
  misc_feature (64)..(301): Homolog of NCBI NO: 13472500 NR Description: probable oxidoreductase [Mesorhizobium loti]
  misc_feature (65)..(395): Homolog of NCBI NO: 14249346 NR Description: reticulon 4 interacting protein 1
  misc_feature (347)..(398): Homolog of NCBI NO: 21219303 NR Description: putative zinc-binding oxidoreductase
  misc_feature (64)..(296): Homolog of NCBI NO: 21219303 NR Description: putative zinc-binding oxidoreductase
  misc_feature (63)..(397): Homolog of NCBI NO: 21592930 NR Description: zinc-binding dehydrogenase, putative [Arabidopsis
  misc_feature (50)..(397): Homolog of NCBI NO: 15232485 NR Description: zinc-binding dehydrogenase, putative
  misc_feature (36)..(375): Homolog of NCBI NO: 34909604 NR Description: putative oxidoreductase-like protein
  misc_feature (36)..(398): Homolog of NCBI NO: 30351052 NR Description: oxidoreductase [Setaria italica]
PTPKGVAELAIAASRLATRESQAQPSVPWGRGYIAMWWRAVRRRWVATARPASSAAAGAEKSCRAVVVPRFGGPEVLEVRQGMPVPDLKPQEVLVRARAVSINPLDLRMRCGYGRSIFEPLLPLIIGRDISGEVAATGTLASSFSIGQEVFGSLHPTALRGTYADYAILSLDELTLKPSTLSHVEASAIPFAALTAWRALHGTARISEGQRVLVIGGGGAVGLAAVQLAVAAGCVVSATCGTQSIERVMGVGAEQAIDYTAEDTEAAIKGKFDAVLDTIGVPETERIGINVLRRGGHYMTLQGEAAALADRYGLAVGLPAATAVLLKKQMQYRYSHGIEYWWTYMRADAEGLHEIQRLSGAGKLQIPVEKTFPISHVREAHAAKEKKLAPGKVVLEFD

SEQ ID NO: 3203 - protein, 363 aa, Zea mays subsp. mays
  peptide (1)..(363): Ceres Seq. ID no. 12356034
  misc_feature (30)..(360): Homolog of NCBI NO: 17887352 NR Description: NOGO-interacting mitochondrial protein [Homo
  misc_feature (313)..(360): Homolog of NCBI NO: 13472500 NR Description: probable oxidoreductase [Mesorhizobium loti]
  misc_feature (29)..(266): Homolog of NCBI NO: 13472500 NR Description: probable oxidoreductase [Mesorhizobium loti]
  misc_feature (30)..(360): Homolog of NCBI NO: 14249346 NR Description: reticulon 4 interacting protein 1
  misc_feature (312)..(363): Homolog of NCBI NO: 21219303 NR Description: putative zinc-binding oxidoreductase
  misc_feature (29)..(261): Homolog of NCBI NO: 21219303 NR Description: putative zinc-binding oxidoreductase
  misc_feature (28)..(362): Homolog of NCBI NO: 21592930 NR Description: zinc-binding dehydrogenase, putative [Arabidopsis
  misc_feature (15)..(362): Homolog of NCBI NO: 15232485 NR Description: zinc-binding dehydrogenase, putative
  misc_feature (1)..(340): Homolog of NCBI NO: 34909604 NR Description: putative oxidoreductase-like protein
  misc_feature (1)..(363): Homolog of NCBI NO: 30351052 NR Description: oxidoreductase [Setaria italica]
MWWRAVRRRWVATARPASSAAAGAEKSCRAVVVPRFGGPEVLEVRQGMPVPDLKPQEVLVRARAVSINPLDLRMRCGYGRSIFEPLLPLIIGRDISGEVAATGTLASSFSIGQEVFGSLHPTALRGTYADYAILSLDELTLKPSTLSHVEASAIPFAALTAWRALHGTARISEGQRVLVIGGGGAVGLAAVQLAVAAGCVVSATCGTQSIERVMGVGAEQAIDYTAEDTEAAIKGKFDAVLDTIGVPETERIGINVLRRGGHYMTLQGEAAALADRYGLAVGLPAATAVLLKKQMQYRYSHGIEYWWTYMRADAEGLHEIQRLSGAGKLQIPVEKTFPISHVREAHAAKEKKLAPGKVVLEFD

SEQ ID NO: 3204 - protein, 316 aa, Zea mays subsp. mays
  peptide (1)..(316): Ceres Seq. ID no. 12356035
  misc_feature (1)..(214): Homolog of NCBI NO: 21219303 NR Description: putative zinc-binding oxidoreductase
  misc_feature (1)..(315): Homolog of NCBI NO: 21592930 NR Description: zinc-binding dehydrogenase, putative [Arabidopsis
  misc_feature (1)..(315): Homolog of NCBI NO: 15232485 NR Description: zinc-binding dehydrogenase, putative
  misc_feature (1)..(293): Homolog of NCBI NO: 34909604 NR Description: putative oxidoreductase-like protein
  misc_feature (1)..(316): Homolog of NCBI NO: 30351052 NR Description: oxidoreductase [Setaria italica]
  misc_feature (1)..(313): Homolog of NCBI NO: 17887352 NR Description: NOGO-interacting mitochondrial protein [Homo
  misc_feature (266)..(313): Homolog of NCBI NO: 13472500 NR Description: probable oxidoreductase [Mesorhizobium loti]
  misc_feature (1)..(219): Homolog of NCBI NO: 13472500 NR Description: probable oxidoreductase [Mesorhizobium loti]
  misc_feature (1)..(313): Homolog of NCBI NO: 14249346 NR Description: reticulon 4 interacting protein 1
  misc_feature (265)..(316): Homolog of NCBI NO: 21219303 NR Description: putative zinc-binding oxidoreductase
MPVPDLKPQEVLVRARAVSINPLDLRMRCGYGRSIFEPLLPLIIGRDISGEVAATGTLASSFSIGQEVFGSLHPTALRGTYADYAILSLDELTLKPSTLSHVEASAIPFAALTAWRALHGTARISEGQRVLVIGGGGAVGLAAVQLAVAAGCVVSATCGTQSIERVMGVGAEQAIDYTAEDTEAAIKGKFDAVLDTIGVPETERIGINVLRRGGHYMTLQGEAAALADRYGLAVGLPAATAVLLKKQMQYRYSHGIEYWWTYMRADAEGLHEIQRLSGAGKLQIPVEKTFPISHVREAHAAKEKKLAPGKVVLEFD

SEQ ID NO: 3205 - DNA, 1779 bp, Zea mays subsp. mays
  misc_feature (1)..(1779): Ceres Seq. ID no. 12387104
  misc_feature: MA Experiment ID: 108515 Result: Down-regulated in Transcription
  misc_feature: MA Experiment 108515 PARAMETER Experiment Name: Zm_2mM_SA_P Parameter: Age (day) Value: 8
  misc_feature: MA Experiment 108515 PARAMETER Experiment Name: Zm_2mM_SA_P Parameter: Organism Value: Zea mays
  misc_feature: MA Experiment 108515 PARAMETER Experiment Name: Zm_2mM_SA_P Parameter: Plant Line Value: 35A19
  misc_feature: MA Experiment 108515 PARAMETER Experiment Name: Zm_2mM_SA_P Parameter: Timepoint (hr) Value: 12
  misc_feature: MA Experiment 108515 PARAMETER Experiment Name: Zm_2mM_SA_P Parameter: Tissue Value: Aerial
  misc_feature: MA Experiment 108515 PARAMETER Experiment Name: Zm_2mM_SA_P Parameter: Treatment Value: 2mM SA vs. No Treatment
  misc_feature: MA Experiment ID: 108527 Result: Down-regulated in Transcription
  misc_feature: MA Experiment 108527 PARAMETER Experiment Name: Zm_5mM_NO_P Parameter: Age (day) Value: 8
  misc_feature: MA Experiment 108527 PARAMETER Experiment Name: Zm_5mM_NO_P Parameter: Organism Value: Zea mays
  misc_feature: MA Experiment 108527 PARAMETER Experiment Name: Zm_5mM_NO_P Parameter: Plant Line Value: 35A19
  misc_feature: MA Experiment 108527 PARAMETER Experiment Name: Zm_5mM_NO_P Parameter: Timepoint (hr) Value: 6
  misc_feature: MA Experiment 108527 PARAMETER Experiment Name: Zm_5mM_NO_P Parameter: Tissue Value: Aerial
  misc_feature: MA Experiment 108527 PARAMETER Experiment Name: Zm_5mM_NO_P Parameter: Treatment Value: 5mM NO vs. No Treatment
  misc_feature: MA Experiment ID: 108528 Result: Up-regulated in Transcription
  misc_feature: MA Experiment 108528 PARAMETER Experiment Name: Zm_Imbibed_Seeds_P Parameter: Age (day) Value: 5 vs. 2
  misc_feature: MA Experiment 108528 PARAMETER Experiment Name: Zm_Imbibed_Seeds_P Parameter: Organism Value: Zea mays
  misc_feature: MA Experiment 108528 PARAMETER Experiment Name: Zm_Imbibed_Seeds_P Parameter: Plant Line Value: 35A19
  misc_feature: MA Experiment 108528 PARAMETER Experiment Name: Zm_Imbibed_Seeds_P Parameter: Tissue Value: Aerial vs. Embryo
  misc_feature: MA Experiment ID: 108529 Result: Down-regulated in Transcription
  misc_feature: MA Experiment 108529 PARAMETER Experiment Name: Zm_Imbibed_Seeds_P Parameter: Age (day) Value: 5 vs. 2
  misc_feature: MA Experiment 108529 PARAMETER Experiment Name: Zm_Imbibed_Seeds_P Parameter: Organism Value: Zea mays
  misc_feature: MA Experiment 108529 PARAMETER Experiment Name: Zm_Imbibed_Seeds_P Parameter: Plant Line Value: 35A19
  misc_feature: MA Experiment 108529 PARAMETER Experiment Name: Zm_Imbibed_Seeds_P Parameter: Tissue Value: Roots vs. Embryo
  misc_feature: MA Experiment ID: 108530 Result: Up-regulated in Transcription
  misc_feature: MA Experiment 108530 PARAMETER Experiment Name: Zm_Imbibed_Seeds_P Parameter: Age (day) Value: 6 vs. 2
  misc_feature: MA Experiment 108530 PARAMETER Experiment Name: Zm_Imbibed_Seeds_P Parameter: Organism Value: Zea mays
  misc_feature: MA Experiment 108530 PARAMETER Experiment Name: Zm_Imbibed_Seeds_P Parameter: Plant Line Value: 35A19
  misc_feature: MA Experiment 108530 PARAMETER Experiment Name: Zm_Imbibed_Seeds_P Parameter: Tissue Value: Aerial vs. Embryo
  misc_feature: MA Experiment ID: 108536 Result: Down-regulated in Transcription
  misc_feature: MA Experiment 108536 PARAMETER Experiment Name: Zm_Meristem_P Parameter: Age (day) Value: 8
  misc_feature: MA Experiment 108536 PARAMETER Experiment Name: Zm_Meristem_P Parameter: Organism Value: Zea mays
  misc_feature: MA Experiment 108536 PARAMETER Experiment Name: Zm_Meristem_P Parameter: Plant Line Value: 35A19
  misc_feature: MA Experiment 108536 PARAMETER Experiment Name: Zm_Meristem_P Parameter: Tissue Value: Shoot Meristem vs. Above Shoot Meristem
  misc_feature: MA Experiment ID: 108543 Result: Up-regulated in Transcription
  misc_feature: MA Experiment ID: 108545 Result: Up-regulated in Transcription
  misc_feature: MA Experiment 108545 PARAMETER Experiment Name: Zm_Imbibed_Seeds_P Parameter: Age (day) Value: 3 vs. 2
  misc_feature: MA Experiment 108545 PARAMETER Experiment Name: Zm_Imbibed_Seeds_P Parameter: Organism Value: Zea mays
  misc_feature: MA Experiment 108545 PARAMETER Experiment Name: Zm_Imbibed_Seeds_P Parameter: Plant Line Value: 35A19
  misc_feature: MA Experiment 108545 PARAMETER Experiment Name: Zm_Imbibed_Seeds_P Parameter: Tissue Value: Aerial vs. Embryo
  misc_feature: MA Experiment ID: 108546 Result: Down-regulated in Transcription
  misc_feature: MA Experiment 108546 PARAMETER Experiment Name: Zm_Imbibed_Seeds_P Parameter: Age (day) Value: 3 vs. 2
  misc_feature: MA Experiment 108546 PARAMETER Experiment Name: Zm_Imbibed_Seeds_P Parameter: Organism Value: Zea mays
  misc_feature: MA Experiment 108546 PARAMETER Experiment Name: Zm_Imbibed_Seeds_P Parameter: Plant Line Value: 35A19
  misc_feature: MA Experiment 108546 PARAMETER Experiment Name: Zm_Imbibed_Seeds_P Parameter: Tissue Value: Roots vs. Embryo
  misc_feature: MA Experiment ID: 108556 Result: Down-regulated in Transcription
  misc_feature: MA Experiment 108556 PARAMETER Experiment Name: Zm_Drought_P Parameter: Age (day) Value: 9
  misc_feature: MA Experiment 108556 PARAMETER Experiment Name: Zm_Drought_P Parameter: Organism Value: Zea mays
  misc_feature: MA Experiment 108556 PARAMETER Experiment Name: Zm_Drought_P Parameter: Plant Line Value: 35A19
  misc_feature: MA Experiment 108556 PARAMETER Experiment Name: Zm_Drought_P Parameter: Timepoint (hr) Value: 24
  misc_feature: MA Experiment 108556 PARAMETER Experiment Name: Zm_Drought_P Parameter: Tissue Value: Aerial
  misc_feature: MA Experiment 108556 PARAMETER Experiment Name: Zm_Drought_P Parameter: Treatment Value: Drought vs. No Drought
  misc_feature: MA Experiment ID: 108559 Result: Down-regulated in Transcription
  misc_feature: MA Experiment 108559 PARAMETER Experiment Name: Zm_5mM_NO_P Parameter: Age (day) Value: 8
  misc_feature: MA Experiment 108559 PARAMETER Experiment Name: Zm_5mM_NO_P Parameter: Organism Value: Zea mays
  misc_feature: MA Experiment 108559 PARAMETER Experiment Name: Zm_5mM_NO_P Parameter: Plant Line Value: 35A19
  misc_feature: MA Experiment 108559 PARAMETER Experiment Name: Zm_5mM_NO_P Parameter: Timepoint (hr) Value: 12
  misc_feature: MA Experiment 108559 PARAMETER Experiment Name: Zm_5mM_NO_P Parameter: Tissue Value: Aerial
  misc_feature: MA Experiment 108559 PARAMETER Experiment Name: Zm_5mM_NO_P Parameter: Treatment Value: 5mM NO vs. No Treatment
  misc_feature: MA Experiment ID: 108597 Result: Down-regulated in Transcription
  misc_feature: MA Experiment 108597 PARAMETER Experiment Name: Zm_100uM_ABA_P Parameter: Age (day) Value: 9
  misc_feature: MA Experiment 108597 PARAMETER Experiment Name: Zm_100uM_ABA_P Parameter: Organism Value: Zea mays
  misc_feature: MA Experiment 108597 PARAMETER Experiment Name: Zm_100uM_ABA_P Parameter: Plant Line Value: 35A19
  misc_feature: MA Experiment 108597 PARAMETER Experiment Name: Zm_100uM_ABA_P Parameter: Timepoint (hr) Value: 24
  misc_feature: MA Experiment 108597 PARAMETER Experiment Name: Zm_100uM_ABA_P Parameter: Tissue Value: Aerial
  misc_feature: MA Experiment 108597 PARAMETER Experiment Name: Zm_100uM_ABA_P Parameter: Treatment Value: 100uM ABA vs. No Treatment
  misc_feature: MA Experiment ID: 108687 Result: Down-regulated in Transcription
  misc_feature: MA Experiment 108687 PARAMETER Experiment Name: Zm_Embryos-Flowers__P Parameter: Tissue Value: Embryo vs. Aerial+
  misc_feature: MA Experiment ID: 20000478 Result: Down-regulated in Transcription
  misc_feature: MA Experiment 20000478 PARAMETER Experiment Name: Zm_5mM_SA_P Parameter: Age (day) Value: 11
  misc_feature: MA Experiment 20000478 PARAMETER Experiment Name: Zm_5mM_SA_P Parameter: Organism Value: Zea mays
  misc_feature: MA Experiment 20000478 PARAMETER Experiment Name: Zm_5mM_SA_P Parameter: Plant Line Value: 35A19
  misc_feature: MA Experiment 20000478 PARAMETER Experiment Name: Zm_5mM_SA_P Parameter: Timepoint (hr) Value: 72
  misc_feature: MA Experiment 20000478 PARAMETER Experiment Name: Zm_5mM_SA_P Parameter: Tissue Value: Aerial
  misc_feature: MA Experiment 20000478 PARAMETER Experiment Name: Zm_5mM_SA_P Parameter: Treatment Value: 5mM SA vs. No Treatment
  misc_feature: MA Experiment ID: 20000480 Result: Down-regulated in Transcription
  misc_feature: MA Experiment 20000480 PARAMETER Experiment Name: Zm_Drought_P Parameter: Age (day) Value: 11
  misc_feature: MA Experiment 20000480 PARAMETER Experiment Name: Zm_Drought_P Parameter: Organism Value: Zea mays
  misc_feature: MA Experiment 20000480 PARAMETER Experiment Name: Zm_Drought_P Parameter: Plant Line Value: 35A19
  misc_feature: MA Experiment 20000480 PARAMETER Experiment Name: Zm_Drought_P Parameter: Timepoint (hr) Value: 72
  misc_feature: MA Experiment 20000480 PARAMETER Experiment Name: Zm_Drought_P Parameter: Tissue Value: Aerial
  misc_feature: MA Experiment 20000480 PARAMETER Experiment Name: Zm_Drought_P Parameter: Treatment Value: Drought vs. No Drought
  misc_feature: MA Experiment ID: 20000492 Result: Down-regulated in Transcription
  misc_feature: MA Experiment 20000492 PARAMETER Experiment Name: Zm_Hybrid_Seed_Dev_P Parameter: DAP Value: 12
  misc_feature: MA Experiment 20000492 PARAMETER Experiment Name: Zm_Hybrid_Seed_Dev_P Parameter: Organism Value: Zea mays
  misc_feature: MA Experiment 20000492 PARAMETER Experiment Name: Zm_Hybrid_Seed_Dev_P Parameter: Plant Line Value: 35A19
  misc_feature: MA Experiment 20000492 PARAMETER Experiment Name: Zm_Hybrid_Seed_Dev_P Parameter: Tissue Value: Fert Kernel vs. Unfert Floret
  misc_feature: MA Experiment ID: 20000535 Result: Down-regulated in Transcription
  misc_feature: MA Experiment 20000535 PARAMETER Experiment Name: Zm_Hybrid_Seed_Dev_P Parameter: DAP Value: 30 vs. 12
  misc_feature: MA Experiment 20000535 PARAMETER Experiment Name: Zm_Hybrid_Seed_Dev_P Parameter: Organism Value: Zea mays
  misc_feature: MA Experiment 20000535 PARAMETER Experiment Name: Zm_Hybrid_Seed_Dev_P Parameter: Plant Line Value: 35A19
  misc_feature: MA Experiment 20000535 PARAMETER Experiment Name: Zm_Hybrid_Seed_Dev_P Parameter: Tissue Value: Embryo vs. Unfert Floret
  misc_feature: MA Experiment ID: 20000626 Result: Down-regulated in Transcription
  misc_feature: MA Experiment 20000626 PARAMETER Experiment Name: Zm_Herbicide-Treatments_P Parameter: Timepoint (hr) Value: 12
  misc_feature: MA Experiment 20000626 PARAMETER Experiment Name: Zm_Herbicide-Treatments_P Parameter: Tissue Value: Aerial
  misc_feature: MA Experiment 20000626 PARAMETER Experiment Name: Zm_Herbicide-Treatments_P Parameter: Treatment Value: Roundup vs. No Treatment
  misc_feature: MA Experiment ID: 20000630 Result: Down-regulated in Transcription
  misc_feature: MA Experiment 20000630 PARAMETER Experiment Name: Zm_Herbicide-Treatments_P Parameter: Timepoint (hr) Value: 4
  misc_feature: MA Experiment 20000630 PARAMETER Experiment Name: Zm_Herbicide-Treatments_P Parameter: Tissue Value: Aerial
  misc_feature: MA Experiment 20000630 PARAMETER Experiment Name: Zm_Herbicide-Treatments_P Parameter: Treatment Value: Roundup vs. No Treatment
agacgcgcgccaggcaagcaacaatggccaagcttctcaagccttggtacgcggccttcgtgaacagattcctcgccgtggtcgcggtggcatctatcgtagccgccgcgctccggcgggcgtggccagcattcagcatggacgatgtcgtcggcagccttggcgccgcgcggccggtccacgtgctcatggcggtcatcctggctgccggcgtggcgaagctgaggcgcctgcgccggccgcgggacgtgtacctggtggagtacggctgcttccgaccgcggccgtgcttccgggcgccgttcgccacgtgcctggagcacgtgcacctcctgccgtacctggtggacgacgagagcgtcagcttcgccatccgcctgctcgagcgctcggggctcggcgacgagacgtgcctgccctactcctaccactacatgcctccggaccgcagcctcgaggcggcccgggaggaggccgagctggtcatcttctccgcagtggacgaggtgttcgccagggcgagcgtgaggcccgaggagatcgacgtgctcatcgtcaactgcagcatcttcacgcccacgccggtcttcgccgacatggtcgtcaacaggtacgggctccgcgccgacgtgcagtgcctgaacctgtccgggatgggctgcggcgcggggctcgtctccatcggcctggccaagaacctcctccaggtggcgccgccaggcacgcgcgtcctgacggtgtccacggagatcctctcgtcgcagtactacgtcgggagcgagcgcgcgatgctgctgcccaactgcctcttccgcatgggggccgccgccacgatcctctccaacagccccgagcgcgcgcggttccggctcggccgcctcgtccgcaccatgaccgccgcgcgggacgccgactaccgctgcatattccaggaggaagacggcgagggcatcctgggcgttcgcctctccaaggacctcaccacaacggccggccatgcgctcaagcggaacatcgcggcgttcggccccctcgtgctgccggtctcggagcagctcctggtggcgatgtcgctgctcaagcgcaagttcatgagcggccggcgcgccagggtgaggctgtaccgcccggacttccgcaaggcgtttgagcacttctgcatccacgccggcggccgcgcggtgatcgacgaggtgcagcgcgggctcggcctgtccgacgaggacgtggaggcgtcgcggatgacgctgcaccggttcgggaacacgtccagcagcctggtgctgtacgagctggcctacatcgaggccaaggcccggatgagggcgggcgatcgggtgtggatgatctccttcggcgccggattcgagtgcagctgtgtggcattggagtgcgtcaagccgccggccgacgccggcgggccctgggccgactgcatcgaccgctacccggtgcagctccccgaagtcgccaaggacaacatctgatcaaccccttcttctggatctggggcatgctgcatcatgctggacatgaacatgcccaaggcttccgtcgtcgtcgatgtcgtcgtccttagtgccgggctgtcggccaccgcccaacatgtcgtgctctgtctatgatcgatctcttggaaataatgtagccctacccctacggtgtccaaaacgcaagtatggcgcgtttgtgtttgttaccactgcacttgtttaccacgctgcactgcgtttgtgtttgttaccactgcacaaagttaattaagcgccagttacgatc

SEQ ID NO: 3206 - protein, 494 aa, Zea mays subsp. mays
  peptide (1)..(494): Ceres Seq. ID no. 12387105
  misc_feature (319)..(466): Pfam Name: Chalcone and stilbene synthases, C-terminal domain Pfam Description: Chalcone and stilbene synthases, C-terminal
  misc_feature (77)..(486): Homolog of NCBI NO: 15226724 NR Description: putative beta-ketoacyl-CoA synthase; protein id:
  misc_feature (61)..(486): Homolog of NCBI NO: 15223556 NR Description: very-long-chain fatty acid condensing enzyme
  misc_feature (8)..(439): Homolog of NCBI NO: 38344109 NR Description: OSJNBb0050O03.6 [Oryza sativa (japonica
  misc_feature (10)..(491): Homolog of NCBI NO: 28393607 NR Description: putative fatty acid condensing enzyme CUT1
  misc_feature (10)..(491): Homolog of NCBI NO: 15222592 NR Description: fatty acid condensing enzyme CUT1, putative
  misc_feature (10)..(491): Homolog of NCBI NO: 21618184 NR Description: fatty acid condensing enzyme CUT1, putative
  misc_feature (10)..(491): Homolog of NCBI NO: 21593111 NR Description: very-long-chain fatty acid condensing enzyme CUT1
  misc_feature (10)..(491): Homolog of NCBI NO: 15221431 NR Description: very-long-chain fatty acid condensing enzyme
  misc_feature (10)..(491): Homolog of NCBI NO: 17979464 NR Description: At1g68530/T26J14_10 [Arabidopsis thaliana]
  misc_feature (11)..(490): Homolog of NCBI NO: 34913436 NR Description: putative fatty acid condensing enzyme CUT1
TRARQATMAKLLKPWYAAFVNRFLAVVAVASIVAAALRRAWPAFSMDDVVGSLGAARPVHVLMAVILAAGVAKLRRLRRPRDVYLVEYGCFRPRPCFRAPFATCLEHVHLLPYLVDDESVSFAIRLLERSGLGDETCLPYSYHYMPPDRSLEAAREEAELVIFSAVDEVFARASVRPEEIDVLIVNCSIFTPTPVFADMVVNRYGLRADVQCLNLSGMGCGAGLVSIGLAKNLLQVAPPGTRVLTVSTEILSSQYYVGSERAMLLPNCLFRMGAAATILSNSPERARFRLGRLVRTMTAARDADYRCIFQEEDGEGILGVRLSKDLTTTAGHALKRNIAAFGPLVLPVSEQLLVAMSLLKRKFMSGRRARVRLYRPDFRKAFEHFCIHAGGRAVIDEVQRGLGLSDEDVEASRMTLHRFGNTSSSLVLYELAYIEAKARMRAGDRVWMISFGAGFECSCVALECVKPPADAGGPWADCIDRYPVQLPEVAKDNI

SEQ ID NO: 3207 - protein, 487 aa, Zea mays subsp. mays
  peptide (1)..(487): Ceres Seq. ID no. 12387106
  misc_feature (312)..(459): Pfam Name: Chalcone and stilbene synthases, C-terminal domain Pfam Description: Chalcone and stilbene synthases, C-terminal
  misc_feature (70)..(479): Homolog of NCBI NO: 15226724 NR Description: putative beta-ketoacyl-CoA synthase; protein id:
  misc_feature (54)..(479): Homolog of NCBI NO: 15223556 NR Description: very-long-chain fatty acid condensing enzyme
  misc_feature (1)..(432): Homolog of NCBI NO: 38344109 NR Description: OSJNBb0050O03.6 [Oryza sativa (japonica
  misc_feature (3)..(484): Homolog of NCBI NO: 28393607 NR Description: putative fatty acid condensing enzyme CUT1
  misc_feature (3)..(484): Homolog of NCBI NO: 15222592 NR Description: fatty acid condensing enzyme CUT1, putative
  misc_feature (3)..(484): Homolog of NCBI NO: 21618184 NR Description: fatty acid condensing enzyme CUT1, putative
  misc_feature (3)..(484): Homolog of NCBI NO: 21593111 NR Description: very-long-chain fatty acid condensing enzyme CUT1
  misc_feature (3)..(484): Homolog of NCBI NO: 15221431 NR Description: very-long-chain fatty acid condensing enzyme
  misc_feature (3)..(484): Homolog of NCBI NO: 17979464 NR Description: At1g68530/T26J14_10 [Arabidopsis thaliana]
  misc_feature (4)..(483): Homolog of NCBI NO: 34913436 NR Description: putative fatty acid condensing enzyme CUT1
MAKLLKPWYAAFVNRFLAVVAVASIVAAALRRAWPAFSMDDVVGSLGAARPVHVLMAVILAAGVAKLRRLRRPRDVYLVEYGCFRPRPCFRAPFATCLEHVHLLPYLVDDESVSFAIRLLERSGLGDETCLPYSYHYMPPDRSLEAAREEAELVIFSAVDEVFARASVRPEEIDVLIVNCSIFTPTPVFADMVVNRYGLRADVQCLNLSGMGCGAGLVSIGLAKNLLQVAPPGTRVLTVSTEILSSQYYVGSERAMLLPNCLFRMGAAATILSNSPERARFRLGRLVRTMTAARDADYRCIFQEEDGEGILGVRLSKDLTTTAGHALKRNIAAFGPLVLPVSEQLLVAMSLLKRKFMSGRRARVRLYRPDFRKAFEHFCIHAGGRAVIDEVQRGLGLSDEDVEASRMTLHRFGNTSSSLVLYELAYIEAKARMRAGDRVWMISFGAGFECSCVALECVKPPADAGGPWADCIDRYPVQLPEVAKDNI

SEQ ID NO: 3208 - protein, 449 aa, Zea mays subsp. mays
  peptide (1)..(449): Ceres Seq. ID no. 12387107
  misc_feature (274)..(421): Pfam Name: Chalcone and stilbene synthases, C-terminal domain Pfam Description: Chalcone and stilbene synthases, C-terminal
  misc_feature (32)..(441): Homolog of NCBI NO: 15226724 NR Description: putative beta-ketoacyl-CoA synthase; protein id:
  misc_feature (16)..(441): Homolog of NCBI NO: 15223556 NR Description: very-long-chain fatty acid condensing enzyme
  misc_feature (1)..(394): Homolog of NCBI NO: 38344109 NR Description: OSJNBb0050O03.6 [Oryza sativa (japonica
  misc_feature (1)..(446): Homolog of NCBI NO: 28393607 NR Description: putative fatty acid condensing enzyme CUT1
  misc_feature (1)..(446): Homolog of NCBI NO: 15222592 NR Description: fatty acid condensing enzyme CUT1, putative
  misc_feature (1)..(446): Homolog of NCBI NO: 21618184 NR Description: fatty acid condensing enzyme CUT1, putative
  misc_feature (1)..(446): Homolog of NCBI NO: 21593111 NR Description: very-long-chain fatty acid condensing enzyme CUT1
  misc_feature (1)..(446): Homolog of NCBI NO: 15221431 NR Description: very-long-chain fatty acid condensing enzyme
  misc_feature (1)..(446): Homolog of NCBI NO: 17979464 NR Description: At1g68530/T26J14_10 [Arabidopsis thaliana]
  misc_feature (1)..(445): Homolog of NCBI NO: 34913436 NR Description: putative fatty acid condensing enzyme CUT1
MDDVVGSLGAARPVHVLMAVILAAGVAKLRRLRRPRDVYLVEYGCFRPRPCFRAPFATCLEHVHLLPYLVDDESVSFAIRLLERSGLGDETCLPYSYHYMPPDRSLEAAREEAELVIFSAVDEVFARASVRPEEIDVLIVNCSIFTPTPVFADMVVNRYGLRADVQCLNLSGMGCGAGLVSIGLAKNLLQVAPPGTRVLTVSTEILSSQYYVGSERAMLLPNCLFRMGAAATILSNSPERARFRLGRLVRTMTAARDADYRCIFQEEDGEGILGVRLSKDLTTTAGHALKRNIAAFGPLVLPVSEQLLVAMSLLKRKFMSGRRARVRLYRPDFRKAFEHFCIHAGGRAVIDEVQRGLGLSDEDVEASRMTLHRFGNTSSSLVLYELAYIEAKARMRAGDRVWMISFGAGFECSCVALECVKPPADAGGPWADCIDRYPVQLPEVAKDNI

SEQ ID NO: 3209 - DNA, 1170 bp, Zea mays subsp. mays
  misc_feature (1)..(1170): Ceres Seq. ID no. 12356036
  misc_feature: MA Experiment ID: 108523 Result: Down-regulated in Transcription
  misc_feature: MA Experiment 108523 PARAMETER Experiment Name: Zm_42deg_Heat_P Parameter: Age (day) Value: 8
  misc_feature: MA Experiment 108523 PARAMETER Experiment Name: Zm_42deg_Heat_P Parameter: Organism Value: Zea mays
  misc_feature: MA Experiment 108523 PARAMETER Experiment Name: Zm_42deg_Heat_P Parameter: Plant Line Value: 35A19
  misc_feature: MA Experiment 108523 PARAMETER Experiment Name: Zm_42deg_Heat_P Parameter: Temperature (deg C) Value: 42 vs. 22
  misc_feature: MA Experiment 108523 PARAMETER Experiment Name: Zm_42deg_Heat_P Parameter: Timepoint (hr) Value: 6
  misc_feature: MA Experiment 108523 PARAMETER Experiment Name: Zm_42deg_Heat_P Parameter: Tissue Value: Aerial
  misc_feature: MA Experiment ID: 108528 Result: Up-regulated in Transcription
  misc_feature: MA Experiment 108528 PARAMETER Experiment Name: Zm_Imbibed_Seeds_P Parameter: Age (day) Value: 5 vs. 2
  misc_feature: MA Experiment 108528 PARAMETER Experiment Name: Zm_Imbibed_Seeds_P Parameter: Organism Value: Zea mays
  misc_feature: MA Experiment 108528 PARAMETER Experiment Name: Zm_Imbibed_Seeds_P Parameter: Plant Line Value: 35A19
  misc_feature: MA Experiment 108528 PARAMETER Experiment Name: Zm_Imbibed_Seeds_P Parameter: Tissue Value: Aerial vs. Embryo
  misc_feature: MA Experiment ID: 108529 Result: Down-regulated in Transcription
  misc_feature: MA Experiment 108529 PARAMETER Experiment Name: Zm_Imbibed_Seeds_P Parameter: Age (day) Value: 5 vs. 2
  misc_feature: MA Experiment 108529 PARAMETER Experiment Name: Zm_Imbibed_Seeds_P Parameter: Organism Value: Zea mays
  misc_feature: MA Experiment 108529 PARAMETER Experiment Name: Zm_Imbibed_Seeds_P Parameter: Plant Line Value: 35A19
  misc_feature: MA Experiment 108529 PARAMETER Experiment Name: Zm_Imbibed_Seeds_P Parameter: Tissue Value: Roots vs. Embryo
  misc_feature: MA Experiment ID: 108530 Result: Up-regulated in Transcription
  misc_feature: MA Experiment 108530 PARAMETER Experiment Name: Zm_Imbibed_Seeds_P Parameter: Age (day) Value: 6 vs. 2
  misc_feature: MA Experiment 108530 PARAMETER Experiment Name: Zm_Imbibed_Seeds_P Parameter: Organism Value: Zea mays
  misc_feature: MA Experiment 108530 PARAMETER Experiment Name: Zm_Imbibed_Seeds_P Parameter: Plant Line Value: 35A19
  misc_feature: MA Experiment 108530 PARAMETER Experiment Name: Zm_Imbibed_Seeds_P Parameter: Tissue Value: Aerial vs. Embryo
  misc_feature: MA Experiment ID: 108543 Result: Up-regulated in Transcription
  misc_feature: MA Experiment ID: 108544 Result: Up-regulated in Transcription
  misc_feature: MA Experiment ID: 108546 Result: Down-regulated in Transcription
  misc_feature: MA Experiment 108546 PARAMETER Experiment Name: Zm_Imbibed_Seeds_P Parameter: Age (day) Value: 3 vs. 2
  misc_feature: MA Experiment 108546 PARAMETER Experiment Name: Zm_Imbibed_Seeds_P Parameter: Organism Value: Zea mays
  misc_feature: MA Experiment 108546 PARAMETER Experiment Name: Zm_Imbibed_Seeds_P Parameter: Plant Line Value: 35A19
  misc_feature: MA Experiment 108546 PARAMETER Experiment Name: Zm_Imbibed_Seeds_P Parameter: Tissue Value: Roots vs. Embryo
  misc_feature: MA Experiment ID: 108687 Result: Down-regulated in Transcription
  misc_feature: MA Experiment 108687 PARAMETER Experiment Name: Zm_Embryos-Flowers__P Parameter: Tissue Value: Embryo vs. Aerial+
  misc_feature: MA Experiment ID: 20000492 Result: Down-regulated in Transcription
  misc_feature: MA Experiment 20000492 PARAMETER Experiment Name: Zm_Hybrid_Seed_Dev_P Parameter: DAP Value: 12
  misc_feature: MA Experiment 20000492 PARAMETER Experiment Name: Zm_Hybrid_Seed_Dev_P Parameter: Organism Value: Zea mays
  misc_feature: MA Experiment 20000492 PARAMETER Experiment Name: Zm_Hybrid_Seed_Dev_P Parameter: Plant Line Value: 35A19
  misc_feature: MA Experiment 20000492 PARAMETER Experiment Name: Zm_Hybrid_Seed_Dev_P Parameter: Tissue Value: Fert Kernel vs. Unfert Floret
  misc_feature: MA Experiment ID: 20000535 Result: Down-regulated in Transcription
  misc_feature: MA Experiment 20000535 PARAMETER Experiment Name: Zm_Hybrid_Seed_Dev_P Parameter: DAP Value: 30 vs. 12
  misc_feature: MA Experiment 20000535 PARAMETER Experiment Name: Zm_Hybrid_Seed_Dev_P Parameter: Organism Value: Zea mays
  misc_feature: MA Experiment 20000535 PARAMETER Experiment Name: Zm_Hybrid_Seed_Dev_P Parameter: Plant Line Value: 35A19
  misc_feature: MA Experiment 20000535 PARAMETER Experiment Name: Zm_Hybrid_Seed_Dev_P Parameter: Tissue Value: Embryo vs. Unfert Floret
gttccctctttcctctcctctttccccatccgtccaatcaaccgggctgctctgctgcctctccggcgccattgacgagcaagagagtgctccgacacctggtccgtcgcgtgccgtgcccacccgctaaggccagggcgccccgactcgagctcaccgcgtcgaactcgaaccgctgctgttcctcggcagggggcagggtcgtcgaggatgccggagcactcagagaacgcggcggcggacctgatgggcaacatcatggagaccatcgcggagaacctcccgaggcagaagtccgtgcggttcgacgacggcgacggctcctccatctccgagcaggccaagaagctgttcagcggcggcgagagcaggaagaagtcggtccaccacgtgctgggcggcggcaaatccgccgacgtgctgctgtggcggaacaagaagatctcgtccagcgtgctgggcgtggcgacgctggtgtgggtgttcttcgagtggctggactaccacttcctcaccatcctctgcttcgtgctcgcgctcggcatggccgtccagttcgcctggtccatcttctcgtccagcgtgcctcgcgtgcagctgccggaggagctgttcgcgagcgccggcgcggccgccggcgcccaggtgaacagggcgctgggcttcctccaggacgtggcctgcggacgcgacctcaagcggctggtcatcgtgatcgccgggttcttcgctgcggcggtcgtcggcagcttctgcaacctcctgacggtcatctacatcgggttcgtgtgcgcgcacaccctgccggtgctgtacgagaggtaccaggaccaggtggacgagttcctgtacaacatgctagggctggtgcagagccagtacagcaagctggacagcaagggcatcctcaaggggggcgtcaagttcaggaagagcgactagctgatttcctcccatctacgactacgatttgattcatcctgggaatcttgatcgatcgacacttgttctgttctgtacagcgagtaacaaccgctgctgctagctacattctttactgtactgtacttgtgtgatgacatcatatcttcgcgtcgcgtgtactgaagaaactacacattgcactaaggttgctttcgtacgtgtacgtgctcatctttcttccttggt

SEQ ID NO: 3210 - protein, 323 aa, Zea mays subsp. mays
  peptide (1)..(323): Ceres Seq. ID no. 12356037
  misc_feature (4)..(317): Homolog of NCBI NO: 11362193 NR Description: hypothetical protein
SLFPLLFPHPSNQPGCSAASPAPLTSKRVLRHLVRRVPCPPAKARAPRLELTASNSNRCCSSAGGRVVEDAGALRERGGGPDGQHHGDHRGEPPEAEVRAVRRRRRLLHLRAGQEAVQRRREQEEVGPPRAGRRQIRRRAAVAEQEDLVQRAGRGDAGVGVLRVAGLPLPHHPLLRARARHGRPVRLVHLLVQRASRAAAGGAVRERRRGRRRPGEQGAGLPPGRGLRTRPQAAGHRDRRVLRCGGRRQLLQPPDGHLHRVRVRAHPAGAVREVPGPGGRVPVQHARAGAEPVQQAGQQGHPQGGRQVQEERLADFLPSTTTI

SEQ ID NO: 3211 - protein, 243 aa, Zea mays subsp. mays
  peptide (1)..(243): Ceres Seq. ID no. 12356038
  misc_feature (15)..(243): Homolog of NCBI NO: 15237093 NR Description: putative protein
  misc_feature (27)..(243): Homolog of NCBI NO: 15236556 NR Description: putative protein
  misc_feature (15)..(234): Homolog of NCBI NO: 18406991 NR Description: expressed protein
  misc_feature (15)..(234): Homolog of NCBI NO: 15222616 NR Description: hypothetical protein
  misc_feature (1)..(212): Homolog of NCBI NO: 34909318 NR Description: OSJNBb0021A09.5 [Oryza sativa (japonica
  misc_feature (32)..(241): Homolog of NCBI NO: 34904202 NR Description: P0492F05.25 [Oryza sativa (japonica
  misc_feature (1)..(233): Homolog of NCBI NO: 30681227 NR Description: expressed protein [Arabidopsis thaliana]
  misc_feature (1)..(233): Homolog of NCBI NO: 18398810 NR Description: expressed protein
  misc_feature (1)..(243): Homolog of NCBI NO: 34897094 NR Description: unknown protein [Oryza sativa (japonica
  misc_feature (1)..(243): Homolog of NCBI NO: 34899590 NR Description: hypothetical protein~similar to Oryza sativa
MPEHSENAAADLMGNIMETIAENLPRQKSVRFDDGDGSSISEQAKKLFSGGESRKKSVHHVLGGGKSADVLLWRNKKISSSVLGVATLVWVFFEWLDYHFLTILCFVLALGMAVQFAWSIFSSSVPRVQLPEELFASAGAAAGAQVNRALGFLQDVACGRDLKRLVIVIAGFFAAAVVGSFCNLLTVIYIGFVCAHTLPVLYERYQDQVDEFLYNMLGLVQSQYSKLDSKGILKGGVKFRKSD

SEQ ID NO: 3212 - protein, 231 aa, Zea mays subsp. mays
  peptide (1)..(231): Ceres Seq. ID no. 12356039
  misc_feature (3)..(231): Homolog of NCBI NO: 15237093 NR Description: putative protein
  misc_feature (15)..(231): Homolog of NCBI NO: 15236556 NR Description: putative protein
  misc_feature (3)..(222): Homolog of NCBI NO: 18406991 NR Description: expressed protein
  misc_feature (3)..(222): Homolog of NCBI NO: 15222616 NR Description: hypothetical protein
  misc_feature (1)..(200): Homolog of NCBI NO: 34909318 NR Description: OSJNBb0021A09.5 [Oryza sativa (japonica
  misc_feature (20)..(229): Homolog of NCBI NO: 34904202 NR Description: P0492F05.25 [Oryza sativa (japonica
  misc_feature (1)..(221): Homolog of NCBI NO: 30681227 NR Description: expressed protein [Arabidopsis thaliana]
  misc_feature (1)..(221): Homolog of NCBI NO: 18398810 NR Description: expressed protein
  misc_feature (1)..(231): Homolog of NCBI NO: 34897094 NR Description: unknown protein [Oryza sativa (japonica
  misc_feature (1)..(231): Homolog of NCBI NO: 34899590 NR Description: hypothetical protein~similar to Oryza sativa
MGNIMETIAENLPRQKSVRFDDGDGSSISEQAKKLFSGGESRKKSVHHVLGGGKSADVLLWRNKKISSSVLGVATLVWVFFEWLDYHFLTILCFVLALGMAVQFAWSIFSSSVPRVQLPEELFASAGAAAGAQVNRALGFLQDVACGRDLKRLVIVIAGFFAAAVVGSFCNLLTVIYIGFVCAHTLPVLYERYQDQVDEFLYNMLGLVQSQYSKLDSKGILKGGVKFRKSD

SEQ ID NO: 3213 - DNA, 1127 bp, Zea mays subsp. mays
  misc_feature (1)..(1127): Ceres Seq. ID no. 12410358
  misc_feature: MA Experiment ID: 108523 Result: Down-regulated in Transcription
  misc_feature: MA Experiment 108523 PARAMETER Experiment Name: Zm_42deg_Heat_P Parameter: Age (day) Value: 8
  misc_feature: MA Experiment 108523 PARAMETER Experiment Name: Zm_42deg_Heat_P Parameter: Organism Value: Zea mays
  misc_feature: MA Experiment 108523 PARAMETER Experiment Name: Zm_42deg_Heat_P Parameter: Plant Line Value: 35A19
  misc_feature: MA Experiment 108523 PARAMETER Experiment Name: Zm_42deg_Heat_P Parameter: Temperature (deg C) Value: 42 vs. 22
  misc_feature: MA Experiment 108523 PARAMETER Experiment Name: Zm_42deg_Heat_P Parameter: Timepoint (hr) Value: 6
  misc_feature: MA Experiment 108523 PARAMETER Experiment Name: Zm_42deg_Heat_P Parameter: Tissue Value: Aerial
  misc_feature: MA Experiment ID: 108528 Result: Down-regulated in Transcription
  misc_feature: MA Experiment 108528 PARAMETER Experiment Name: Zm_Imbibed_Seeds_P Parameter: Age (day) Value: 5 vs. 2
  misc_feature: MA Experiment 108528 PARAMETER Experiment Name: Zm_Imbibed_Seeds_P Parameter: Organism Value: Zea mays
  misc_feature: MA Experiment 108528 PARAMETER Experiment Name: Zm_Imbibed_Seeds_P Parameter: Plant Line Value: 35A19
  misc_feature: MA Experiment 108528 PARAMETER Experiment Name: Zm_Imbibed_Seeds_P Parameter: Tissue Value: Aerial vs. Embryo
  misc_feature: MA Experiment ID: 108529 Result: Down-regulated in Transcription
  misc_feature: MA Experiment 108529 PARAMETER Experiment Name: Zm_Imbibed_Seeds_P Parameter: Age (day) Value: 5 vs. 2
  misc_feature: MA Experiment 108529 PARAMETER Experiment Name: Zm_Imbibed_Seeds_P Parameter: Organism Value: Zea mays
  misc_feature: MA Experiment 108529 PARAMETER Experiment Name: Zm_Imbibed_Seeds_P Parameter: Plant Line Value: 35A19
  misc_feature: MA Experiment 108529 PARAMETER Experiment Name: Zm_Imbibed_Seeds_P Parameter: Tissue Value: Roots vs. Embryo
  misc_feature: MA Experiment ID: 108530 Result: Down-regulated in Transcription
  misc_feature: MA Experiment 108530 PARAMETER Experiment Name: Zm_Imbibed_Seeds_P Parameter: Age (day) Value: 6 vs. 2
  misc_feature: MA Experiment 108530 PARAMETER Experiment Name: Zm_Imbibed_Seeds_P Parameter: Organism Value: Zea mays
  misc_feature: MA Experiment 108530 PARAMETER Experiment Name: Zm_Imbibed_Seeds_P Parameter: Plant Line Value: 35A19
  misc_feature: MA Experiment 108530 PARAMETER Experiment Name: Zm_Imbibed_Seeds_P Parameter: Tissue Value: Aerial vs. Embryo
  misc_feature: MA Experiment ID: 108532 Result: Up-regulated in Transcription
  misc_feature: MA Experiment 108532 PARAMETER Experiment Name: Zm_20uM_KNO3_H-to-L_P Parameter: Age (day) Value: 11
  misc_feature: MA Experiment 108532 PARAMETER Experiment Name: Zm_20uM_KNO3_H-to-L_P Parameter: Organism Value: Zea mays
  misc_feature: MA Experiment 108532 PARAMETER Experiment Name: Zm_20uM_KNO3_H-to-L_P Parameter: Plant Line Value: 35A19
  misc_feature: MA Experiment 108532 PARAMETER Experiment Name: Zm_20uM_KNO3_H-to-L_P Parameter: Timepoint (hr) Value: 16
  misc_feature: MA Experiment 108532 PARAMETER Experiment Name: Zm_20uM_KNO3_H-to-L_P Parameter: Tissue Value: Roots
  misc_feature: MA Experiment 108532 PARAMETER Experiment Name: Zm_20uM_KNO3_H-to-L_P Parameter: Treatment Value: 20uM KNO3 vs. 60mM KNO3
  misc_feature: MA Experiment ID: 108543 Result: Down-regulated in Transcription
  misc_feature: MA Experiment ID: 108544 Result: Up-regulated in Transcription
  misc_feature: MA Experiment ID: 108545 Result: Down-regulated in Transcription
  misc_feature: MA Experiment 108545 PARAMETER Experiment Name: Zm_Imbibed_Seeds_P Parameter: Age (day) Value: 3 vs. 2
  misc_feature: MA Experiment 108545 PARAMETER Experiment Name: Zm_Imbibed_Seeds_P Parameter: Organism Value: Zea mays
  misc_feature: MA Experiment 108545 PARAMETER Experiment Name: Zm_Imbibed_Seeds_P Parameter: Plant Line Value: 35A19
  misc_feature: MA Experiment 108545 PARAMETER Experiment Name: Zm_Imbibed_Seeds_P Parameter: Tissue Value: Aerial vs. Embryo
  misc_feature: MA Experiment ID: 108546 Result: Down-regulated in Transcription
  misc_feature: MA Experiment 108546 PARAMETER Experiment Name: Zm_Imbibed_Seeds_P Parameter: Age (day) Value: 3 vs. 2
  misc_feature: MA Experiment 108546 PARAMETER Experiment Name: Zm_Imbibed_Seeds_P Parameter: Organism Value: Zea mays
  misc_feature: MA Experiment 108546 PARAMETER Experiment Name: Zm_Imbibed_Seeds_P Parameter: Plant Line Value: 35A19
  misc_feature: MA Experiment 108546 PARAMETER Experiment Name: Zm_Imbibed_Seeds_P Parameter: Tissue Value: Roots vs. Embryo
  misc_feature: MA Experiment ID: 108547 Result: Down-regulated in Transcription
  misc_feature: MA Experiment 108547 PARAMETER Experiment Name: Zm_Imbibed_Seeds_P Parameter: Age (day) Value: 4 vs. 2
  misc_feature: MA Experiment 108547 PARAMETER Experiment Name: Zm_Imbibed_Seeds_P Parameter: Organism Value: Zea mays
  misc_feature: MA Experiment 108547 PARAMETER Experiment Name: Zm_Imbibed_Seeds_P Parameter: Plant Line Value: 35A19
  misc_feature: MA Experiment 108547 PARAMETER Experiment Name: Zm_Imbibed_Seeds_P Parameter: Tissue Value: Aerial vs. Embryo
  misc_feature: MA Experiment ID: 108548 Result: Down-regulated in Transcription
  misc_feature: MA Experiment 108548 PARAMETER Experiment Name: Zm_20uM_KNO3_H-to-L_P Parameter: Age (day) Value: 11
  misc_feature: MA Experiment 108548 PARAMETER Experiment Name: Zm_20uM_KNO3_H-to-L_P Parameter: Organism Value: Zea mays
  misc_feature: MA Experiment 108548 PARAMETER Experiment Name: Zm_20uM_KNO3_H-to-L_P Parameter: Plant Line Value: 35A19
  misc_feature: MA Experiment 108548 PARAMETER Experiment Name: Zm_20uM_KNO3_H-to-L_P Parameter: Timepoint (hr) Value: 4
  misc_feature: MA Experiment 108548 PARAMETER Experiment Name: Zm_20uM_KNO3_H-to-L_P Parameter: Tissue Value: Roots
  misc_feature: MA Experiment 108548 PARAMETER Experiment Name: Zm_20uM_KNO3_H-to-L_P Parameter: Treatment Value: 20uM KNO3 vs. 60mM KNO3
  misc_feature: MA Experiment ID: 108556 Result: Up-regulated in Transcription
  misc_feature: MA Experiment 108556 PARAMETER Experiment Name: Zm_Drought_P Parameter: Age (day) Value: 9
  misc_feature: MA Experiment 108556 PARAMETER Experiment Name: Zm_Drought_P Parameter: Organism Value: Zea mays
  misc_feature: MA Experiment 108556 PARAMETER Experiment Name: Zm_Drought_P Parameter: Plant Line Value: 35A19
  misc_feature: MA Experiment 108556 PARAMETER Experiment Name: Zm_Drought_P Parameter: Timepoint (hr) Value: 24
  misc_feature: MA Experiment 108556 PARAMETER Experiment Name: Zm_Drought_P Parameter: Tissue Value: Aerial
  misc_feature: MA Experiment 108556 PARAMETER Experiment Name: Zm_Drought_P Parameter: Treatment Value: Drought vs. No Drought
  misc_feature: MA Experiment ID: 108688 Result: Down-regulated in Transcription
  misc_feature: MA Experiment 108688 PARAMETER Experiment Name: Zm_Embryos-Flowers__P Parameter: Tissue Value: Immature Flowers vs. Aerial+
  misc_feature: MA Experiment ID: 108689 Result: Up-regulated in Transcription
  misc_feature: MA Experiment 108689 PARAMETER Experiment Name: Zm_Drought_Roots_P Parameter: Age (day) Value: 9
  misc_feature: MA Experiment 108689 PARAMETER Experiment Name: Zm_Drought_Roots_P Parameter: Organism Value: Zea mays
  misc_feature: MA Experiment 108689 PARAMETER Experiment Name: Zm_Drought_Roots_P Parameter: Plant Line Value: 35A19
  misc_feature: MA Experiment 108689 PARAMETER Experiment Name: Zm_Drought_Roots_P Parameter: Timepoint (hr) Value: 24
  misc_feature: MA Experiment 108689 PARAMETER Experiment Name: Zm_Drought_Roots_P Parameter: Tissue Value: Roots
  misc_feature: MA Experiment 108689 PARAMETER Experiment Name: Zm_Drought_Roots_P Parameter: Treatment Value: Drought vs. No Drought
  misc_feature: MA Experiment ID: 20000478 Result: Up-regulated in Transcription
  misc_feature: MA Experiment 20000478 PARAMETER Experiment Name: Zm_5mM_SA_P Parameter: Age (day) Value: 11
  misc_feature: MA Experiment 20000478 PARAMETER Experiment Name: Zm_5mM_SA_P Parameter: Organism Value: Zea mays
  misc_feature: MA Experiment 20000478 PARAMETER Experiment Name: Zm_5mM_SA_P Parameter: Plant Line Value: 35A19
  misc_feature: MA Experiment 20000478 PARAMETER Experiment Name: Zm_5mM_SA_P Parameter: Timepoint (hr) Value: 72
  misc_feature: MA Experiment 20000478 PARAMETER Experiment Name: Zm_5mM_SA_P Parameter: Tissue Value: Aerial
  misc_feature: MA Experiment 20000478 PARAMETER Experiment Name: Zm_5mM_SA_P Parameter: Treatment Value: 5mM SA vs. No Treatment
  misc_feature: MA Experiment ID: 20000479 Result: Up-regulated in Transcription
  misc_feature: MA Experiment 20000479 PARAMETER Experiment Name: Zm_Drought_P Parameter: Age (day) Value: 10
  misc_feature: MA Experiment 20000479 PARAMETER Experiment Name: Zm_Drought_P Parameter: Organism Value: Zea mays
  misc_feature: MA Experiment 20000479 PARAMETER Experiment Name: Zm_Drought_P Parameter: Plant Line Value: 35A19
  misc_feature: MA Experiment 20000479 PARAMETER Experiment Name: Zm_Drought_P Parameter: Timepoint (hr) Value: 48
  misc_feature: MA Experiment 20000479 PARAMETER Experiment Name: Zm_Drought_P Parameter: Tissue Value: Aerial
  misc_feature: MA Experiment 20000479 PARAMETER Experiment Name: Zm_Drought_P Parameter: Treatment Value: Drought vs. No Drought
  misc_feature: MA Experiment ID: 20000480 Result: Up-regulated in Transcription
  misc_feature: MA Experiment 20000480 PARAMETER Experiment Name: Zm_Drought_P Parameter: Age (day) Value: 11
  misc_feature: MA Experiment 20000480 PARAMETER Experiment Name: Zm_Drought_P Parameter: Organism Value: Zea mays
  misc_feature: MA Experiment 20000480 PARAMETER Experiment Name: Zm_Drought_P Parameter: Plant Line Value: 35A19
  misc_feature: MA Experiment 20000480 PARAMETER Experiment Name: Zm_Drought_P Parameter: Timepoint (hr) Value: 72
  misc_feature: MA Experiment 20000480 PARAMETER Experiment Name: Zm_Drought_P Parameter: Tissue Value: Aerial
  misc_feature: MA Experiment 20000480 PARAMETER Experiment Name: Zm_Drought_P Parameter: Treatment Value: Drought vs. No Drought
  misc_feature: MA Experiment ID: 20000487 Result: Down-regulated in Transcription
  misc_feature: MA Experiment 20000487 PARAMETER Experiment Name: Zm_50mM_NH4NO3_L_to_H_P Parameter: Organism Value: Zea mays
  misc_feature: MA Experiment 20000487 PARAMETER Experiment Name: Zm_50mM_NH4NO3_L_to_H_P Parameter: Timepoint (hr) Value: 4
  misc_feature: MA Experiment 20000487 PARAMETER Experiment Name: Zm_50mM_NH4NO3_L_to_H_P Parameter: Tissue Value: Leaves
  misc_feature: MA Experiment 20000487 PARAMETER Experiment Name: Zm_50mM_NH4NO3_L_to_H_P Parameter: Treatment Value: 50mM NH4NO3 vs. 100mM Mannitol
  misc_feature: MA Experiment ID: 20000492 Result: Down-regulated in Transcription
  misc_feature: MA Experiment 20000492 PARAMETER Experiment Name: Zm_Hybrid_Seed_Dev_P Parameter: DAP Value: 12
  misc_feature: MA Experiment 20000492 PARAMETER Experiment Name: Zm_Hybrid_Seed_Dev_P Parameter: Organism Value: Zea mays
  misc_feature: MA Experiment 20000492 PARAMETER Experiment Name: Zm_Hybrid_Seed_Dev_P Parameter: Plant Line Value: 35A19
  misc_feature: MA Experiment 20000492 PARAMETER Experiment Name: Zm_Hybrid_Seed_Dev_P Parameter: Tissue Value: Fert Kernel vs. Unfert Floret
  misc_feature: MA Experiment ID: 20000626 Result: Up-regulated in Transcription
  misc_feature: MA Experiment 20000626 PARAMETER Experiment Name: Zm_Herbicide-Treatments_P Parameter: Timepoint (hr) Value: 12
  misc_feature: MA Experiment 20000626 PARAMETER Experiment Name: Zm_Herbicide-Treatments_P Parameter: Tissue Value: Aerial
  misc_feature: MA Experiment 20000626 PARAMETER Experiment Name: Zm_Herbicide-Treatments_P Parameter: Treatment Value: Roundup vs. No Treatment
  misc_feature: MA Experiment ID: 20001610 Result: Down-regulated in Transcription
  misc_feature: MA Experiment 20001610 PARAMETER Experiment Name: Zm_50ppm_KNO3_L-to-H_P Parameter: Age (day) Value: 19
  misc_feature: MA Experiment 20001610 PARAMETER Experiment Name: Zm_50ppm_KNO3_L-to-H_P Parameter: Organism Value: Zea mays
  misc_feature: MA Experiment 20001610 PARAMETER Experiment Name: Zm_50ppm_KNO3_L-to-H_P Parameter: Plant Line Value: 35A19
  misc_feature: MA Experiment 20001610 PARAMETER Experiment Name: Zm_50ppm_KNO3_L-to-H_P Parameter: Timepoint (hr) Value: 2
  misc_feature: MA Experiment 20001610 PARAMETER Experiment Name: Zm_50ppm_KNO3_L-to-H_P Parameter: Tissue Value: Roots
  misc_feature: MA Experiment 20001610 PARAMETER Experiment Name: Zm_50ppm_KNO3_L-to-H_P Parameter: Treatment Value: 50ppm KNO3 vs. 50ppm KCl
  misc_feature: MA Experiment ID: 20001612 Result: Down-regulated in Transcription
  misc_feature: MA Experiment 20001612 PARAMETER Experiment Name: Zm_50ppm_KNO3_L-to-H_P Parameter: Age (day) Value: 19
  misc_feature: MA Experiment 20001612 PARAMETER Experiment Name: Zm_50ppm_KNO3_L-to-H_P Parameter: Organism Value: Zea mays
  misc_feature: MA Experiment 20001612 PARAMETER Experiment Name: Zm_50ppm_KNO3_L-to-H_P Parameter: Plant Line Value: 35A19
  misc_feature: MA Experiment 20001612 PARAMETER Experiment Name: Zm_50ppm_KNO3_L-to-H_P Parameter: Timepoint (hr) Value: 8
  misc_feature: MA Experiment 20001612 PARAMETER Experiment Name: Zm_50ppm_KNO3_L-to-H_P Parameter: Tissue Value: Roots
  misc_feature: MA Experiment 20001612 PARAMETER Experiment Name: Zm_50ppm_KNO3_L-to-H_P Parameter: Treatment Value: 50ppm KNO3 vs. 50ppm KCl
aaatcacctcacacaacaagctgcaccgcagcaacgaacacgaaccttggcagaacgaagctgaagtagttcgctgtgaacccagtatggcaaacgcgccgaggatcctggccctcggcctgctagcgctcctgtgcgctgccgccggcccggccgccgcgcagaactgcggctgccagccaaacttctgctgcagcaagttcggctactgcggcacgaccgacgcctactgcggcgacgggtgccagtcgggcccgtgccgctcggacggcggcggcggcggcggcggcggcggaggcggcggaggcagtggcggtgcgaacgtggctaatgtggtcaccgacgcgttcttcaacggcatcaagaaccaggccgggagcgggtgcgagggcaagaacttctacacccggagcgcgttcctgagcgccgtcaacaagtacccgggcttcgcccatggcgggacggaggtggagggcaagcgcgagatcgccgccttcttcgcgcacgtcacgcacgagaccggacatttctgctacatcagcgagatcaacaagagcaacgcctactgcgacgcgagcaacaggcagtggccgtgcgcggcggggcagaagtactacgggcgcggcccgctgcagatctcgtggaactacaactacgggcccgccgggagggacatcggcttcaacgggctcgccgaccccaacagggtggcgcaggacgccgtgatcgcgttcaagacggcgctctggttctggatgaacaacgtgcaccgtgtgatgccgcagggcttcggcgccaccatcagggccatcaacggcgccctcgagtgcaacgggaacaaccccgcccagatgaacgcgcgcgtcggctactacaagcagtactgccagcagctccgcgtcgacccagggcccaacctcacttgctaggccagcagctcctgctagctcgtccacaataaatgttcggcgtcgcaccctcgcgaaaccaagagtttactgactagtacgagctagctagcatgcagtaataataatcatcgtaataataataataaaacgacggggctgagccactttgttcgacctgtatgaataatgaaacaactgtatgttccctcggtacgc

SEQ ID NO: 3214 - protein, 308 aa, Zea mays subsp. mays
  peptide (1)..(308): Ceres Seq. ID no. 12410359
  misc_feature (111)..(308): Pfam Name: Chitinase class I Pfam Description: Chitinase class I
  misc_feature (35)..(308): Homolog of NCBI NO: 15213850 NR Description: chitinase-B [Sorghum arundinaceum]
  misc_feature (35)..(308): Homolog of NCBI NO: 15529121 NR Description: chitinase-B [Sorghum bicolor]
  misc_feature (35)..(308): Homolog of NCBI NO: 15529117 NR Description: chitinase-B [Sorghum bicolor]
  misc_feature (29)..(308): Homolog of NCBI NO: 15529119 NR Description: chitinase-B1 [Sorghum bicolor]
  misc_feature (35)..(308): Homolog of NCBI NO: 15213852 NR Description: chitinase-B [Sorghum halepense]
  misc_feature (34)..(308): Homolog of NCBI NO: 482985 NR Description: chitinase (EC 3.2.1.14) precursor - maize
  misc_feature (33)..(308): Homolog of NCBI NO: 116333 NR Description: ENDOCHITINASE B PRECURSOR (SEED CHITINASE B)
  misc_feature (35)..(308): Homolog of NCBI NO: 15213848 NR Description: chitinase-B [Saccharum officinarum]
  misc_feature (29)..(308): Homolog of NCBI NO: 116329 NR Description: ENDOCHITINASE A PRECURSOR (SEED CHITINASE A)
  misc_feature (29)..(308): Homolog of NCBI NO: 283037 NR Description: chitinase (EC 3.2.1.14) A - maize
ITSHNKLHRSNEHEPWQNEAEVVRCEPSMANAPRILALGLLALLCAAAGPAAAQNCGCQPNFCCSKFGYCGTTDAYCGDGCQSGPCRSDGGGGGGGGGGGGGSGGANVANVVTDAFFNGIKNQAGSGCEGKNFYTRSAFLSAVNKYPGFAHGGTEVEGKREIAAFFAHVTHETGHFCYISEINKSNAYCDASNRQWPCAAGQKYYGRGPLQISWNYNYGPAGRDIGFNGLADPNRVAQDAVIAFKTALWFWMNNVHRVMPQGFGATIRAINGALECNGNNPAQMNARVGYYKQYCQQLRVDPGPNLTC

SEQ ID NO: 3215 - protein, 280 aa, Zea mays subsp. mays
  peptide (1)..(280): Ceres Seq. ID no. 12410360
  misc_feature (83)..(280): Pfam Name: Chitinase class I Pfam Description: Chitinase class I
  misc_feature (7)..(280): Homolog of NCBI NO: 15213850 NR Description: chitinase-B [Sorghum arundinaceum]
  misc_feature (7)..(280): Homolog of NCBI NO: 15529121 NR Description: chitinase-B [Sorghum bicolor]
  misc_feature (7)..(280): Homolog of NCBI NO: 15529117 NR Description: chitinase-B [Sorghum bicolor]
  misc_feature (1)..(280): Homolog of NCBI NO: 15529119 NR Description: chitinase-B1 [Sorghum bicolor]
  misc_feature (7)..(280): Homolog of NCBI NO: 15213852 NR Description: chitinase-B [Sorghum halepense]
  misc_feature (6)..(280): Homolog of NCBI NO: 482985 NR Description: chitinase (EC 3.2.1.14) precursor - maize
  misc_feature (5)..(280): Homolog of NCBI NO: 116333 NR Description: ENDOCHITINASE B PRECURSOR (SEED CHITINASE B)
  misc_feature (7)..(280): Homolog of NCBI NO: 15213848 NR Description: chitinase-B [Saccharum officinarum]
  misc_feature (1)..(280): Homolog of NCBI NO: 116329 NR Description: ENDOCHITINASE A PRECURSOR (SEED CHITINASE A)
  misc_feature (1)..(280): Homolog of NCBI NO: 283037 NR Description: chitinase (EC 3.2.1.14) A - maize
MANAPRILALGLLALLCAAAGPAAAQNCGCQPNFCCSKFGYCGTTDAYCGDGCQSGPCRSDGGGGGGGGGGGGGSGGANVANVVTDAFFNGIKNQAGSGCEGKNFYTRSAFLSAVNKYPGFAHGGTEVEGKREIAAFFAHVTHETGHFCYISEINKSNAYCDASNRQWPCAAGQKYYGRGPLQISWNYNYGPAGRDIGFNGLADPNRVAQDAVIAFKTALWFWMNNVHRVMPQGFGATIRAINGALECNGNNPAQMNARVGYYKQYCQQLRVDPGPNLTC

SEQ ID NO: 3216 - DNA, 1103 bp, Zea mays subsp. mays
  misc_feature (1)..(1103): Ceres Seq. ID no. 12349943
  misc_feature: MA Experiment ID: 108504 Result: Down-regulated in Transcription
  misc_feature: MA Experiment 108504 PARAMETER Experiment Name: Zm_Drought_P Parameter: Age (day) Value: 8
  misc_feature: MA Experiment 108504 PARAMETER Experiment Name: Zm_Drought_P Parameter: Organism Value: Zea mays
  misc_feature: MA Experiment 108504 PARAMETER Experiment Name: Zm_Drought_P Parameter: Plant Line Value: 35A19
  misc_feature: MA Experiment 108504 PARAMETER Experiment Name: Zm_Drought_P Parameter: Timepoint (hr) Value: 12
  misc_feature: MA Experiment 108504 PARAMETER Experiment Name: Zm_Drought_P Parameter: Tissue Value: Aerial
  misc_feature: MA Experiment 108504 PARAMETER Experiment Name: Zm_Drought_P Parameter: Treatment Value: Drought vs. No Drought
  misc_feature: MA Experiment ID: 108528 Result: Up-regulated in Transcription
  misc_feature: MA Experiment 108528 PARAMETER Experiment Name: Zm_Imbibed_Seeds_P Parameter: Age (day) Value: 5 vs. 2
  misc_feature: MA Experiment 108528 PARAMETER Experiment Name: Zm_Imbibed_Seeds_P Parameter: Organism Value: Zea mays
  misc_feature: MA Experiment 108528 PARAMETER Experiment Name: Zm_Imbibed_Seeds_P Parameter: Plant Line Value: 35A19
  misc_feature: MA Experiment 108528 PARAMETER Experiment Name: Zm_Imbibed_Seeds_P Parameter: Tissue Value: Aerial vs. Embryo
  misc_feature: MA Experiment ID: 108529 Result: Down-regulated in Transcription
  misc_feature: MA Experiment 108529 PARAMETER Experiment Name: Zm_Imbibed_Seeds_P Parameter: Age (day) Value: 5 vs. 2
  misc_feature: MA Experiment 108529 PARAMETER Experiment Name: Zm_Imbibed_Seeds_P Parameter: Organism Value: Zea mays
  misc_feature: MA Experiment 108529 PARAMETER Experiment Name: Zm_Imbibed_Seeds_P Parameter: Plant Line Value: 35A19
  misc_feature: MA Experiment 108529 PARAMETER Experiment Name: Zm_Imbibed_Seeds_P Parameter: Tissue Value: Roots vs. Embryo
  misc_feature: MA Experiment ID: 108530 Result: Up-regulated in Transcription
  misc_feature: MA Experiment 108530 PARAMETER Experiment Name: Zm_Imbibed_Seeds_P Parameter: Age (day) Value: 6 vs. 2
  misc_feature: MA Experiment 108530 PARAMETER Experiment Name: Zm_Imbibed_Seeds_P Parameter: Organism Value: Zea mays
  misc_feature: MA Experiment 108530 PARAMETER Experiment Name: Zm_Imbibed_Seeds_P Parameter: Plant Line Value: 35A19
  misc_feature: MA Experiment 108530 PARAMETER Experiment Name: Zm_Imbibed_Seeds_P Parameter: Tissue Value: Aerial vs. Embryo
  misc_feature: MA Experiment ID: 108536 Result: Down-regulated in Transcription
  misc_feature: MA Experiment 108536 PARAMETER Experiment Name: Zm_Meristem_P Parameter: Age (day) Value: 8
  misc_feature: MA Experiment 108536 PARAMETER Experiment Name: Zm_Meristem_P Parameter: Organism Value: Zea mays
  misc_feature: MA Experiment 108536 PARAMETER Experiment Name: Zm_Meristem_P Parameter: Plant Line Value: 35A19
  misc_feature: MA Experiment 108536 PARAMETER Experiment Name: Zm_Meristem_P Parameter: Tissue Value: Shoot Meristem vs. Above Shoot Meristem
  misc_feature: MA Experiment ID: 108543 Result: Up-regulated in Transcription
  misc_feature: MA Experiment ID: 108544 Result: Down-regulated in Transcription
  misc_feature: MA Experiment ID: 108545 Result: Up-regulated in Transcription
  misc_feature: MA Experiment 108545 PARAMETER Experiment Name: Zm_Imbibed_Seeds_P Parameter: Age (day) Value: 3 vs. 2
  misc_feature: MA Experiment 108545 PARAMETER Experiment Name: Zm_Imbibed_Seeds_P Parameter: Organism Value: Zea mays
  misc_feature: MA Experiment 108545 PARAMETER Experiment Name: Zm_Imbibed_Seeds_P Parameter: Plant Line Value: 35A19
  misc_feature: MA Experiment 108545 PARAMETER Experiment Name: Zm_Imbibed_Seeds_P Parameter: Tissue Value: Aerial vs. Embryo
  misc_feature: MA Experiment ID: 108546 Result: Down-regulated in Transcription
  misc_feature: MA Experiment 108546 PARAMETER Experiment Name: Zm_Imbibed_Seeds_P Parameter: Age (day) Value: 3 vs. 2
  misc_feature: MA Experiment 108546 PARAMETER Experiment Name: Zm_Imbibed_Seeds_P Parameter: Organism Value: Zea mays
  misc_feature: MA Experiment 108546 PARAMETER Experiment Name: Zm_Imbibed_Seeds_P Parameter: Plant Line Value: 35A19
  misc_feature: MA Experiment 108546 PARAMETER Experiment Name: Zm_Imbibed_Seeds_P Parameter: Tissue Value: Roots vs. Embryo
  misc_feature: MA Experiment ID: 108547 Result: Up-regulated in Transcription
  misc_feature: MA Experiment 108547 PARAMETER Experiment Name: Zm_Imbibed_Seeds_P Parameter: Age (day) Value: 4 vs. 2
  misc_feature: MA Experiment 108547 PARAMETER Experiment Name: Zm_Imbibed_Seeds_P Parameter: Organism Value: Zea mays
  misc_feature: MA Experiment 108547 PARAMETER Experiment Name: Zm_Imbibed_Seeds_P Parameter: Plant Line Value: 35A19
  misc_feature: MA Experiment 108547 PARAMETER Experiment Name: Zm_Imbibed_Seeds_P Parameter: Tissue Value: Aerial vs. Embryo
  misc_feature: MA Experiment ID: 108597 Result: Down-regulated in Transcription
  misc_feature: MA Experiment 108597 PARAMETER Experiment Name: Zm_100uM_ABA_P Parameter: Age (day) Value: 9
  misc_feature: MA Experiment 108597 PARAMETER Experiment Name: Zm_100uM_ABA_P Parameter: Organism Value: Zea mays
  misc_feature: MA Experiment 108597 PARAMETER Experiment Name: Zm_100uM_ABA_P Parameter: Plant Line Value: 35A19
  misc_feature: MA Experiment 108597 PARAMETER Experiment Name: Zm_100uM_ABA_P Parameter: Timepoint (hr) Value: 24
  misc_feature: MA Experiment 108597 PARAMETER Experiment Name: Zm_100uM_ABA_P Parameter: Tissue Value: Aerial
  misc_feature: MA Experiment 108597 PARAMETER Experiment Name: Zm_100uM_ABA_P Parameter: Treatment Value: 100uM ABA vs. No Treatment
  misc_feature: MA Experiment ID: 108689 Result: Down-regulated in Transcription
  misc_feature: MA Experiment 108689 PARAMETER Experiment Name: Zm_Drought_Roots_P Parameter: Age (day) Value: 9
  misc_feature: MA Experiment 108689 PARAMETER Experiment Name: Zm_Drought_Roots_P Parameter: Organism Value: Zea mays
  misc_feature: MA Experiment 108689 PARAMETER Experiment Name: Zm_Drought_Roots_P Parameter: Plant Line Value: 35A19
  misc_feature: MA Experiment 108689 PARAMETER Experiment Name: Zm_Drought_Roots_P Parameter: Timepoint (hr) Value: 24
  misc_feature: MA Experiment 108689 PARAMETER Experiment Name: Zm_Drought_Roots_P Parameter: Tissue Value: Roots
  misc_feature: MA Experiment 108689 PARAMETER Experiment Name: Zm_Drought_Roots_P Parameter: Treatment Value: Drought vs. No Drought
  misc_feature: MA Experiment ID: 20000479 Result: Down-regulated in Transcription
  misc_feature: MA Experiment 20000479 PARAMETER Experiment Name: Zm_Drought_P Parameter: Age (day) Value: 10
  misc_feature: MA Experiment 20000479 PARAMETER Experiment Name: Zm_Drought_P Parameter: Organism Value: Zea mays
  misc_feature: MA Experiment 20000479 PARAMETER Experiment Name: Zm_Drought_P Parameter: Plant Line Value: 35A19
  misc_feature: MA Experiment 20000479 PARAMETER Experiment Name: Zm_Drought_P Parameter: Timepoint (hr) Value: 48
  misc_feature: MA Experiment 20000479 PARAMETER Experiment Name: Zm_Drought_P Parameter: Tissue Value: Aerial
  misc_feature: MA Experiment 20000479 PARAMETER Experiment Name: Zm_Drought_P Parameter: Treatment Value: Drought vs. No Drought
  misc_feature: MA Experiment ID: 20000480 Result: Down-regulated in Transcription
  misc_feature: MA Experiment 20000480 PARAMETER Experiment Name: Zm_Drought_P Parameter: Age (day) Value: 11
  misc_feature: MA Experiment 20000480 PARAMETER Experiment Name: Zm_Drought_P Parameter: Organism Value: Zea mays
  misc_feature: MA Experiment 20000480 PARAMETER Experiment Name: Zm_Drought_P Parameter: Plant Line Value: 35A19
  misc_feature: MA Experiment 20000480 PARAMETER Experiment Name: Zm_Drought_P Parameter: Timepoint (hr) Value: 72
  misc_feature: MA Experiment 20000480 PARAMETER Experiment Name: Zm_Drought_P Parameter: Tissue Value: Aerial
  misc_feature: MA Experiment 20000480 PARAMETER Experiment Name: Zm_Drought_P Parameter: Treatment Value: Drought vs. No Drought
  misc_feature: MA Experiment ID: 20000535 Result: Down-regulated in Transcription
  misc_feature: MA Experiment 20000535 PARAMETER Experiment Name: Zm_Hybrid_Seed_Dev_P Parameter: DAP Value: 30 vs. 12
  misc_feature: MA Experiment 20000535 PARAMETER Experiment Name: Zm_Hybrid_Seed_Dev_P Parameter: Organism Value: Zea mays
  misc_feature: MA Experiment 20000535 PARAMETER Experiment Name: Zm_Hybrid_Seed_Dev_P Parameter: Plant Line Value: 35A19
  misc_feature: MA Experiment 20000535 PARAMETER Experiment Name: Zm_Hybrid_Seed_Dev_P Parameter: Tissue Value: Embryo vs. Unfert Floret
aaagccctcctctcctctcccctctccctcgcggcctcgccttatccccttcgtcactcacctcgaccaccgccatggccatggccttggcctccgcgaccgccgccgcactcttccgctccgccctgtccgcgccacacggcgccggcgcgcgcgtccggccgcagcgccggcagccgttcttggctccgctccacgcggcgaagggccccggctcggcgccggtggtgctggagggcaaggccaagggaaagaagaagaaggggcccagctccgggaaccttcccgcagccctcgacgtcgagatcagggaggcgcaggagtacctcgacagcgaccagcaggaacctgttccagaaaactttccatttgaattaatcgacgaagagggtatgagcgtggttattttgagaagggactacaaggacgagaaggtcgaggttactgtcagcatgcctaatttagaaggaggccccgagtttggtgatgaggatggcgagggcgatggtgagagcgctgccaaggacgacggagaagcagaagaagatgacgagagtgccggggagagcagcatctctcttaaggtggtagtttccaaagactctggcccagagctcgagttcacatgcacagccttccgcgaggagatcaccatcgatgatatgctgatagtggagaaaacagacgacgacgacggagaagagaagttcccctacgagggccccgagttcaccgagctccctgtgaatgttcagaaaggcctgttcaagtacctggagcaaagaggggtaacgctgtcggctaccaactatatgcacgattacatggtgactaagcaggctcaggagtacatccggtggatgactaagctgaaggatttcgtggcgcagtgaggaacagcgtcgtgattcggcagcattgtttggttagcctagccttagcatgtgttacagccttacaggaacactacgactacaccgaattggccacactccccaaaaaacaaaaaagggggagcattgtatctgcttcaatgtatctgtatcagctggcaaaacagtagcaagtagatttccagtaatgtttagtggtgggcattaggt

SEQ ID NO: 3217 - protein, 296 aa, Zea mays subsp. mays
  peptide (1)..(296): Ceres Seq. ID no. 12349944
  misc_feature (98)..(294): Pfam Name: Mitochondrial glycoprotein Pfam Description: Mitochondrial glycoprotein
  misc_feature (24)..(296): Homolog of NCBI NO: 34895742 NR Description: P0019D06.29 [Oryza sativa (japonica
  misc_feature (24)..(294): Homolog of NCBI NO: 34895730 NR Description: P0019D06.23 [Oryza sativa (japonica
  misc_feature (90)..(296): Homolog of NCBI NO: 11357566 NR Description: hypothetical protein F1I16.10 - Arabidopsis >gi|7263548|emb|CAB81585.1| putative protein [Arabidopsis
  misc_feature (90)..(296): Homolog of NCBI NO: 18410318 NR Description: Expressed protein; protein id: At3g55605.1, by cDNA: 250217. [Arabidopsis thaliana]
  misc_feature (85)..(294): Homolog of NCBI NO: 15239320 NR Description: putative protein; protein id: At5g05990.1, by cDNA: 18108., supported by cDNA: gi_14517390, supported by gi_15450540 [Arabidopsis thaliana] >gi|10177572|dbj|BAB10804.1|
  misc_feature (48)..(295): Homolog of NCBI NO: 34895740 NR Description: P0019D06.28 [Oryza sativa (japonica
  misc_feature (30)..(294): Homolog of NCBI NO: 15241669 NR Description: putative protein; protein id: At5g02050.1, by cDNA: 22324. [Arabidopsis thaliana] >gi|11358397|pir||T48226
  misc_feature (30)..(294): Homolog of NCBI NO: 21592321 NR Description: unknown [Arabidopsis thaliana]
  misc_feature (171)..(296): Homolog of NCBI NO: 7487698 NR Description: hypothetical protein At2g39790 [imported] -
  misc_feature (90)..(170): Homolog of NCBI NO: 7487698 NR Description: hypothetical protein At2g39790 [imported] -
SPPLLSPLPRGLALSPSSLTSTTAMAMALASATAAALFRSALSAPHGAGARVRPQRRQPFLAPLHAAKGPGSAPVVLEGKAKGKKKKGPSSGNLPAALDVEIREAQEYLDSDQQEPVPENFPFELIDEEGMSVVILRRDYKDEKVEVTVSMPNLEGGPEFGDEDGEGDGESAAKDDGEAEEDDESAGESSISLKVVVSKDSGPELEFTCTAFREEITIDDMLIVEKTDDDDGEEKFPYEGPEFTELPVNVQKGLFKYLEQRGVTLSATNYMHDYMVTKQAQEYIRWMTKLKDFVAQ

SEQ ID NO: 3218 - protein, 272 aa, Zea mays subsp. mays
  peptide (1)..(272): Ceres Seq. ID no. 12349945
  misc_feature (74)..(270): Pfam Name: Mitochondrial glycoprotein Pfam Description: Mitochondrial glycoprotein
  misc_feature (1)..(270): Homolog of NCBI NO: 34895730 NR Description: P0019D06.23 [Oryza sativa (japonica
  misc_feature (66)..(272): Homolog of NCBI NO: 11357566 NR Description: hypothetical protein F1I16.10 - Arabidopsis >gi|7263548|emb|CAB81585.1| putative protein [Arabidopsis
  misc_feature (66)..(272): Homolog of NCBI NO: 18410318 NR Description: Expressed protein; protein id: At3g55605.1, by cDNA: 250217. [Arabidopsis thaliana]
  misc_feature (61)..(270): Homolog of NCBI NO: 15239320 NR Description: putative protein; protein id: At5g05990.1, by cDNA: 18108., supported by cDNA: gi_14517390, supported by gi_15450540 [Arabidopsis thaliana] >gi|10177572|dbj|BAB10804.1|
  misc_feature (24)..(271): Homolog of NCBI NO: 34895740 NR Description: P0019D06.28 [Oryza sativa (japonica
  misc_feature (1)..(272): Homolog of NCBI NO: 34895742 NR Description: P0019D06.29 [Oryza sativa (japonica
  misc_feature (6)..(270): Homolog of NCBI NO: 15241669 NR Description: putative protein; protein id: At5g02050.1, by cDNA: 22324. [Arabidopsis thaliana] >gi|11358397|pir||T48226
  misc_feature (6)..(270): Homolog of NCBI NO: 21592321 NR Description: unknown [Arabidopsis thaliana]
  misc_feature (147)..(272): Homolog of NCBI NO: 7487698 NR Description: hypothetical protein At2g39790 [imported] -
  misc_feature (66)..(146): Homolog of NCBI NO: 7487698 NR Description: hypothetical protein At2g39790 [imported] -
MAMALASATAAALFRSALSAPHGAGARVRPQRRQPFLAPLHAAKGPGSAPVVLEGKAKGKKKKGPSSGNLPAALDVEIREAQEYLDSDQQEPVPENFPFELIDEEGMSVVILRRDYKDEKVEVTVSMPNLEGGPEFGDEDGEGDGESAAKDDGEAEEDDESAGESSISLKVVVSKDSGPELEFTCTAFREEITIDDMLIVEKTDDDDGEEKFPYEGPEFTELPVNVQKGLFKYLEQRGVTLSATNYMHDYMVTKQAQEYIRWMTKLKDFVAQ

SEQ ID NO: 3219 - protein, 270 aa, Zea mays subsp. mays
  peptide (1)..(270): Ceres Seq. ID no. 12349946
  misc_feature (72)..(268): Pfam Name: Mitochondrial glycoprotein Pfam Description: Mitochondrial glycoprotein
  misc_feature (1)..(270): Homolog of NCBI NO: 34895742 NR Description: P0019D06.29 [Oryza sativa (japonica
  misc_feature (1)..(268): Homolog of NCBI NO: 34895730 NR Description: P0019D06.23 [Oryza sativa (japonica
  misc_feature (64)..(270): Homolog of NCBI NO: 11357566 NR Description: hypothetical protein F1I16.10 - Arabidopsis >gi|7263548|emb|CAB81585.1| putative protein [Arabidopsis
  misc_feature (64)..(270): Homolog of NCBI NO: 18410318 NR Description: Expressed protein; protein id: At3g55605.1, by cDNA: 250217. [Arabidopsis thaliana]
  misc_feature (59)..(268): Homolog of NCBI NO: 15239320 NR Description: putative protein; protein id: At5g05990.1, by cDNA: 18108., supported by cDNA: gi_14517390, supported by gi_15450540 [Arabidopsis thaliana] >gi|10177572|dbj|BAB10804.1|
  misc_feature (22)..(269): Homolog of NCBI NO: 34895740 NR Description: P0019D06.28 [Oryza sativa (japonica
  misc_feature (4)..(268): Homolog of NCBI NO: 15241669 NR Description: putative protein; protein id: At5g02050.1, by cDNA: 22324. [Arabidopsis thaliana] >gi|11358397|pir||T48226
  misc_feature (4)..(268): Homolog of NCBI NO: 21592321 NR Description: unknown [Arabidopsis thaliana]
  misc_feature (145)..(270): Homolog of NCBI NO: 7487698 NR Description: hypothetical protein At2g39790 [imported] -
  misc_feature (64)..(144): Homolog of NCBI NO: 7487698 NR Description: hypothetical protein At2g39790 [imported] -
MALASATAAALFRSALSAPHGAGARVRPQRRQPFLAPLHAAKGPGSAPVVLEGKAKGKKKKGPSSGNLPAALDVEIREAQEYLDSDQQEPVPENFPFELIDEEGMSVVILRRDYKDEKVEVTVSMPNLEGGPEFGDEDGEGDGESAAKDDGEAEEDDESAGESSISLKVVVSKDSGPELEFTCTAFREEITIDDMLIVEKTDDDDGEEKFPYEGPEFTELPVNVQKGLFKYLEQRGVTLSATNYMHDYMVTKQAQEYIRWMTKLKDFVAQ

SEQ ID NO: 3220 - DNA, 1055 bp, Zea mays subsp. mays
  misc_feature (1)..(1055): Ceres Seq. ID no. 12356111
  misc_feature: MA Experiment ID: 108504 Result: Down-regulated in Transcription
  misc_feature: MA Experiment 108504 PARAMETER Experiment Name: Zm_Drought_P Parameter: Age (day) Value: 8
  misc_feature: MA Experiment 108504 PARAMETER Experiment Name: Zm_Drought_P Parameter: Organism Value: Zea mays
  misc_feature: MA Experiment 108504 PARAMETER Experiment Name: Zm_Drought_P Parameter: Plant Line Value: 35A19
  misc_feature: MA Experiment 108504 PARAMETER Experiment Name: Zm_Drought_P Parameter: Timepoint (hr) Value: 12
  misc_feature: MA Experiment 108504 PARAMETER Experiment Name: Zm_Drought_P Parameter: Tissue Value: Aerial
  misc_feature: MA Experiment 108504 PARAMETER Experiment Name: Zm_Drought_P Parameter: Treatment Value: Drought vs. No Drought
  misc_feature: MA Experiment ID: 108522 Result: Down-regulated in Transcription
  misc_feature: MA Experiment 108522 PARAMETER Experiment Name: Zm_42deg_Heat_P Parameter: Age (day) Value: 8
  misc_feature: MA Experiment 108522 PARAMETER Experiment Name: Zm_42deg_Heat_P Parameter: Organism Value: Zea mays
  misc_feature: MA Experiment 108522 PARAMETER Experiment Name: Zm_42deg_Heat_P Parameter: Plant Line Value: 35A19
  misc_feature: MA Experiment 108522 PARAMETER Experiment Name: Zm_42deg_Heat_P Parameter: Temperature (deg C) Value: 42 vs. 22
  misc_feature: MA Experiment 108522 PARAMETER Experiment Name: Zm_42deg_Heat_P Parameter: Timepoint (hr) Value: 1
  misc_feature: MA Experiment 108522 PARAMETER Experiment Name: Zm_42deg_Heat_P Parameter: Tissue Value: Aerial
  misc_feature: MA Experiment ID: 108529 Result: Down-regulated in Transcription
  misc_feature: MA Experiment 108529 PARAMETER Experiment Name: Zm_Imbibed_Seeds_P Parameter: Age (day) Value: 5 vs. 2
  misc_feature: MA Experiment 108529 PARAMETER Experiment Name: Zm_Imbibed_Seeds_P Parameter: Organism Value: Zea mays
  misc_feature: MA Experiment 108529 PARAMETER Experiment Name: Zm_Imbibed_Seeds_P Parameter: Plant Line Value: 35A19
  misc_feature: MA Experiment 108529 PARAMETER Experiment Name: Zm_Imbibed_Seeds_P Parameter: Tissue Value: Roots vs. Embryo
  misc_feature: MA Experiment ID: 108530 Result: Up-regulated in Transcription
  misc_feature: MA Experiment 108530 PARAMETER Experiment Name: Zm_Imbibed_Seeds_P Parameter: Age (day) Value: 6 vs. 2
  misc_feature: MA Experiment 108530 PARAMETER Experiment Name: Zm_Imbibed_Seeds_P Parameter: Organism Value: Zea mays
  misc_feature: MA Experiment 108530 PARAMETER Experiment Name: Zm_Imbibed_Seeds_P Parameter: Plant Line Value: 35A19
  misc_feature: MA Experiment 108530 PARAMETER Experiment Name: Zm_Imbibed_Seeds_P Parameter: Tissue Value: Aerial vs. Embryo
  misc_feature: MA Experiment ID: 108543 Result: Down-regulated in Transcription
  misc_feature: MA Experiment ID: 108556 Result: Down-regulated in Transcription
  misc_feature: MA Experiment 108556 PARAMETER Experiment Name: Zm_Drought_P Parameter: Age (day) Value: 9
  misc_feature: MA Experiment 108556 PARAMETER Experiment Name: Zm_Drought_P Parameter: Organism Value: Zea mays
  misc_feature: MA Experiment 108556 PARAMETER Experiment Name: Zm_Drought_P Parameter: Plant Line Value: 35A19
  misc_feature: MA Experiment 108556 PARAMETER Experiment Name: Zm_Drought_P Parameter: Timepoint (hr) Value: 24
  misc_feature: MA Experiment 108556 PARAMETER Experiment Name: Zm_Drought_P Parameter: Tissue Value: Aerial
  misc_feature: MA Experiment 108556 PARAMETER Experiment Name: Zm_Drought_P Parameter: Treatment Value: Drought vs. No Drought
  misc_feature: MA Experiment ID: 108597 Result: Down-regulated in Transcription
  misc_feature: MA Experiment 108597 PARAMETER Experiment Name: Zm_100uM_ABA_P Parameter: Age (day) Value: 9
  misc_feature: MA Experiment 108597 PARAMETER Experiment Name: Zm_100uM_ABA_P Parameter: Organism Value: Zea mays
  misc_feature: MA Experiment 108597 PARAMETER Experiment Name: Zm_100uM_ABA_P Parameter: Plant Line Value: 35A19
  misc_feature: MA Experiment 108597 PARAMETER Experiment Name: Zm_100uM_ABA_P Parameter: Timepoint (hr) Value: 24
  misc_feature: MA Experiment 108597 PARAMETER Experiment Name: Zm_100uM_ABA_P Parameter: Tissue Value: Aerial
  misc_feature: MA Experiment 108597 PARAMETER Experiment Name: Zm_100uM_ABA_P Parameter: Treatment Value: 100uM ABA vs. No Treatment
  misc_feature: MA Experiment ID: 108687 Result: Down-regulated in Transcription
  misc_feature: MA Experiment 108687 PARAMETER Experiment Name: Zm_Embryos-Flowers__P Parameter: Tissue Value: Embryo vs. Aerial+
  misc_feature: MA Experiment ID: 108688 Result: Down-regulated in Transcription
  misc_feature: MA Experiment 108688 PARAMETER Experiment Name: Zm_Embryos-Flowers__P Parameter: Tissue Value: Immature Flowers vs. Aerial+
  misc_feature: MA Experiment ID: 20000492 Result: Down-regulated in Transcription
  misc_feature: MA Experiment 20000492 PARAMETER Experiment Name: Zm_Hybrid_Seed_Dev_P Parameter: DAP Value: 12
  misc_feature: MA Experiment 20000492 PARAMETER Experiment Name: Zm_Hybrid_Seed_Dev_P Parameter: Organism Value: Zea mays
  misc_feature: MA Experiment 20000492 PARAMETER Experiment Name: Zm_Hybrid_Seed_Dev_P Parameter: Plant Line Value: 35A19
  misc_feature: MA Experiment 20000492 PARAMETER Experiment Name: Zm_Hybrid_Seed_Dev_P Parameter: Tissue Value: Fert Kernel vs. Unfert Floret
  misc_feature: MA Experiment ID: 20000535 Result: Down-regulated in Transcription
  misc_feature: MA Experiment 20000535 PARAMETER Experiment Name: Zm_Hybrid_Seed_Dev_P Parameter: DAP Value: 30 vs. 12
  misc_feature: MA Experiment 20000535 PARAMETER Experiment Name: Zm_Hybrid_Seed_Dev_P Parameter: Organism Value: Zea mays
  misc_feature: MA Experiment 20000535 PARAMETER Experiment Name: Zm_Hybrid_Seed_Dev_P Parameter: Plant Line Value: 35A19
  misc_feature: MA Experiment 20000535 PARAMETER Experiment Name: Zm_Hybrid_Seed_Dev_P Parameter: Tissue Value: Embryo vs. Unfert Floret
  misc_feature: MA Experiment ID: 20000626 Result: Up-regulated in Transcription
  misc_feature: MA Experiment 20000626 PARAMETER Experiment Name: Zm_Herbicide-Treatments_P Parameter: Timepoint (hr) Value: 12
  misc_feature: MA Experiment 20000626 PARAMETER Experiment Name: Zm_Herbicide-Treatments_P Parameter: Tissue Value: Aerial
  misc_feature: MA Experiment 20000626 PARAMETER Experiment Name: Zm_Herbicide-Treatments_P Parameter: Treatment Value: Roundup vs. No Treatment
gctctgctttgctcccgttcccatgctgatttttttaggcggctgctggcctgcctgtctccactggaagctccggattacgtagaaaaggggcgggcggcatgaggatccagtgcgacgcgtgcgaggccgcggcggccgcggtggtgtgctgcgccgacgaggcggcgctgtgcgcgcgctgcgacgtggagatccacgccgccaacaagctcgccagcaagcaccagcggctcccgctcggcgacgccgcggcgctccccgccagcctcccgcgctgcgacgtgtgccaggagaggccggccttcatcttctgcgtcgaggacagggcgctcctctgccgccgactgcgacgagcccatccacgtccccggcacgctctccggcaaccaccagcgctacctcgccaccggcatccgcgtcggcttcagctccgtctgcggcgccagcgccgagggcctcccgccggcgccgcccaagggcagctccaagcccgcggccgtcgtcagcgcgccagctgccgggacgaccaccaaaacaaggacggtcaaggacgcgctgccgcaggaggtgccgtcctcgccgttcctgccaccgtccggttgggccgtcgaggacctcctcgagctgtcggactacgaatccagcgacaagaaagactcgtctcttgggctcaaggagctggagtggttcgaggacatcgacctgttccacgcccattcgccagctaaaactgccatggcggagttcttcgcctcgccgcagccagtgagtaacgccgggttctacaaggcgaacggggcgcgcctgttcaagaagtcacggatggaagtgcctgacgacgacgacgaggactacttcatcgttcctgatcttggctgagatgagagatctctgcatgattctccagtcatgtgatgtgtgtatgtatgcaaaatatgtatgtatgccatcatggggtgcactgacgcttacgttggacatatgtaattatccagtcatgtgatgtgtatgtacgcaaaatatgtatgtatgccatcatgggatgcactggc

SEQ ID NO: 3221 - protein, 209 aa, Zea mays subsp. mays
  peptide (1)..(209): Ceres Seq. ID no. 12356112
  misc_feature (1)..(47): Pfam Name: B-box zinc finger Pfam Description: B-box zinc finger
  misc_feature (1)..(81): Homolog of NCBI NO: 7489603 NR Description: zinc-finger protein R2931 [imported] - rice
  misc_feature (1)..(82): Homolog of NCBI NO: 18412037 NR Description: CONSTANS B-box zinc finger family protein
  misc_feature (1)..(82): Homolog of NCBI NO: 17433085 NR Description: Zinc finger protein constans-like 7
  misc_feature (1)..(96): Homolog of NCBI NO: 25408150 NR Description: hypothetical protein At2g31380 [imported] -
  misc_feature (1)..(96): Homolog of NCBI NO: 18402646 NR Description: salt tolerance-like protein
  misc_feature (1)..(81): Homolog of NCBI NO: 30679541 NR Description: salt-tolerance protein [Arabidopsis thaliana]
  misc_feature (1)..(81): Homolog of NCBI NO: 15221367 NR Description: salt-tolerance protein
  misc_feature (1)..(81): Homolog of NCBI NO: 3618314 NR Description: zinc finger protein [Oryza sativa (japonica
  misc_feature (4)..(44): Homolog of NCBI NO: 3618310 NR Description: zinc finger protein [Oryza sativa (japonica
  misc_feature (1)..(81): Homolog of NCBI NO: 3618310 NR Description: zinc finger protein [Oryza sativa (japonica
MRIQCDACEAAAAAVVCCADEAALCARCDVEIHAANKLASKHQRLPLGDAAALPASLPRCDVCQERPAFIFCVEDRALLCRRLRRAHPRPRHALRQPPALPRHRHPRRLQLRLRRQRRGPPAGAAQGQLQARGRRQRASCRDDHQNKDGQGRAAAGGAVLAVPATVRLGRRGPPRAVGLRIQRQERLVSWAQGAGVVRGHRPVPRPFAS

SEQ ID NO: 3222 - DNA, 1250 bp, Zea mays subsp. mays
  misc_feature (1)..(1250): Ceres Seq. ID no. 12402650
  misc_feature: MA Experiment ID: 108529 Result: Up-regulated in Transcription
  misc_feature: MA Experiment 108529 PARAMETER Experiment Name: Zm_Imbibed_Seeds_P Parameter: Age (day) Value: 5 vs. 2
  misc_feature: MA Experiment 108529 PARAMETER Experiment Name: Zm_Imbibed_Seeds_P Parameter: Organism Value: Zea mays
  misc_feature: MA Experiment 108529 PARAMETER Experiment Name: Zm_Imbibed_Seeds_P Parameter: Plant Line Value: 35A19
  misc_feature: MA Experiment 108529 PARAMETER Experiment Name: Zm_Imbibed_Seeds_P Parameter: Tissue Value: Roots vs. Embryo
  misc_feature: MA Experiment ID: 108543 Result: Up-regulated in Transcription
  misc_feature: MA Experiment ID: 108556 Result: Down-regulated in Transcription
  misc_feature: MA Experiment 108556 PARAMETER Experiment Name: Zm_Drought_P Parameter: Age (day) Value: 9
  misc_feature: MA Experiment 108556 PARAMETER Experiment Name: Zm_Drought_P Parameter: Organism Value: Zea mays
  misc_feature: MA Experiment 108556 PARAMETER Experiment Name: Zm_Drought_P Parameter: Plant Line Value: 35A19
  misc_feature: MA Experiment 108556 PARAMETER Experiment Name: Zm_Drought_P Parameter: Timepoint (hr) Value: 24
  misc_feature: MA Experiment 108556 PARAMETER Experiment Name: Zm_Drought_P Parameter: Tissue Value: Aerial
  misc_feature: MA Experiment 108556 PARAMETER Experiment Name: Zm_Drought_P Parameter: Treatment Value: Drought vs. No Drought
  misc_feature: MA Experiment ID: 108689 Result: Down-regulated in Transcription
  misc_feature: MA Experiment 108689 PARAMETER Experiment Name: Zm_Drought_Roots_P Parameter: Age (day) Value: 9
  misc_feature: MA Experiment 108689 PARAMETER Experiment Name: Zm_Drought_Roots_P Parameter: Organism Value: Zea mays
  misc_feature: MA Experiment 108689 PARAMETER Experiment Name: Zm_Drought_Roots_P Parameter: Plant Line Value: 35A19
  misc_feature: MA Experiment 108689 PARAMETER Experiment Name: Zm_Drought_Roots_P Parameter: Timepoint (hr) Value: 24
  misc_feature: MA Experiment 108689 PARAMETER Experiment Name: Zm_Drought_Roots_P Parameter: Tissue Value: Roots
  misc_feature: MA Experiment 108689 PARAMETER Experiment Name: Zm_Drought_Roots_P Parameter: Treatment Value: Drought vs. No Drought
  misc_feature: MA Experiment ID: 20000478 Result: Down-regulated in Transcription
  misc_feature: MA Experiment 20000478 PARAMETER Experiment Name: Zm_5mM_SA_P Parameter: Age (day) Value: 11
  misc_feature: MA Experiment 20000478 PARAMETER Experiment Name: Zm_5mM_SA_P Parameter: Organism Value: Zea mays
  misc_feature: MA Experiment 20000478 PARAMETER Experiment Name: Zm_5mM_SA_P Parameter: Plant Line Value: 35A19
  misc_feature: MA Experiment 20000478 PARAMETER Experiment Name: Zm_5mM_SA_P Parameter: Timepoint (hr) Value: 72
  misc_feature: MA Experiment 20000478 PARAMETER Experiment Name: Zm_5mM_SA_P Parameter: Tissue Value: Aerial
  misc_feature: MA Experiment 20000478 PARAMETER Experiment Name: Zm_5mM_SA_P Parameter: Treatment Value: 5mM SA vs. No Treatment
  misc_feature: MA Experiment ID: 20000480 Result: Down-regulated in Transcription
  misc_feature: MA Experiment 20000480 PARAMETER Experiment Name: Zm_Drought_P Parameter: Age (day) Value: 11
  misc_feature: MA Experiment 20000480 PARAMETER Experiment Name: Zm_Drought_P Parameter: Organism Value: Zea mays
  misc_feature: MA Experiment 20000480 PARAMETER Experiment Name: Zm_Drought_P Parameter: Plant Line Value: 35A19
  misc_feature: MA Experiment 20000480 PARAMETER Experiment Name: Zm_Drought_P Parameter: Timepoint (hr) Value: 72
  misc_feature: MA Experiment 20000480 PARAMETER Experiment Name: Zm_Drought_P Parameter: Tissue Value: Aerial
  misc_feature: MA Experiment 20000480 PARAMETER Experiment Name: Zm_Drought_P Parameter: Treatment Value: Drought vs. No Drought
gtccttgtgcgttccttgtagccatctccgactccgcgcctccgctgcctcccgaaagcattgccagttcctccgcacaacatgacgcgcatccaccgcctccgccccctcttcctcttcgttctcttggcgtcgctgcaatgcggtgcggcgacggcggcggctggatacggaggtggcgccgaggggttctgctcggcggagccgtccagcaagtgctccggggatcagccgctctactggaaggtcacccatcccaccctcgcgcccgcgcacctccaagatttacctggcttcacacgtagtgttttcaaaagggatcatgctttaataacaccagagagtcatgtattcagtcctttgcctgattggatcaatacagtaggagcatatttgatcagtccagctattggtgcacacttcattatgtatctagcaaacatgcaagatggttcaaaatcagccctaccaccgaaagatgttgaaaggtggattcttatggatatcttcctgcaaacacaaagcattctatgatctcagatgaaccaaccactcttgtaatatttgagaggaggtacaatgccattgaggattcccatcctgatctaattgtgggttcaacagataagcaaccccttctcgaaaccccgggagaggtatttcaactaaggaagctgctaccgacttctctgtcctatgactttaatatccatataatggactttcaaccaggcgaatatctcaatgtaaaggaggttcattataatcaacatggacttcttcttttagaggggcaagcaatataccgactgggagagagttggtatcccgtgcaagctggggataccatttggatggcaccgtttgttcctcagtggtatgctgcccttggtaagaccaggacgagatacttgctgtacaaagatgtcaataggaatccattgatatgatcaagaaaccagaacaaggagggaataaatcaaatgtcgagctgtgccaggtataaagaatttcaatgggagatgatcacaggaatgagaaaaggagatcttattgtatgctgaaaaatcttgaaaccaaaaataacgtgggaagttgaatgtgtacttgtgatgtccataactgtcaatctttggtgactagtgcgactggaattgtgatgtaacgtattctggacagcagatgccaagttggatatgctgtgacatttgtgaatggctaatcccatgaatttaggtgatgtttggttt

SEQ ID NO: 3223 - protein, 150 aa, Zea mays subsp. mays
  peptide (1)..(150): Ceres Seq. ID no. 12402651
  misc_feature (73)..(140): Pfam Name: Protein of unknown function (DUF923) Pfam Description: Protein of unknown function (DUF923)
  misc_feature (58)..(130): Homolog of NCBI NO: 27375364 NR Description: blr0253 [Bradyrhizobium japonicum]
  misc_feature (71)..(127): Homolog of NCBI NO: 15806172 NR Description: conserved hypothetical protein [Deinococcus
  misc_feature (9)..(125): Homolog of NCBI NO: 34901774 NR Description: OJ1058_B11.16 [Oryza sativa (japonica
  misc_feature (35)..(140): Homolog of NCBI NO: 22328740 NR Description: hypothetical protein; protein id: At4g17050.1
  misc_feature (9)..(140): Homolog of NCBI NO: 34393580 NR Description: putative glyoxylate induced protein
MTRIHRLRPLFLFVLLASLQCGAATAAAGYGGGAEGFCSAEPSSKCSGDQPLYWKVTHPTLAPAHLQDLPGFTRSVFKRDHALITPESHVFSPLPDWINTVGAYLISPAIGAHFIMYLANMQDGSKSALPPKDVERWILMDIFLQTQSIL

SEQ ID NO: 3224 - protein, 139 aa, Zea mays subsp. mays
  peptide (1)..(139): Ceres Seq. ID no. 12402652
  misc_feature (1)..(138): Pfam Name: Protein of unknown function (DUF923) Pfam Description: Protein of unknown function (DUF923)
  misc_feature (1)..(136): Homolog of NCBI NO: 16265139 NR Description: conserved hypothetical protein [Sinorhizobium
  misc_feature (1)..(139): Homolog of NCBI NO: 39933630 NR Description: conserved hypothetical protein [Rhodopseudomonas
  misc_feature (1)..(139): Homolog of NCBI NO: 22962544 NR Description: hypothetical protein [Rhodopseudomonas palustris]
  misc_feature (1)..(136): Homolog of NCBI NO: 23113628 NR Description: hypothetical protein [Desulfitobacterium
  misc_feature (1)..(139): Homolog of NCBI NO: 27375364 NR Description: blr0253 [Bradyrhizobium japonicum]
  misc_feature (1)..(138): Homolog of NCBI NO: 15806172 NR Description: conserved hypothetical protein [Deinococcus
  misc_feature (6)..(132): Homolog of NCBI NO: 7485211 NR Description: hypothetical protein - Arabidopsis thaliana
  misc_feature (1)..(74): Homolog of NCBI NO: 34901774 NR Description: OJ1058_B11.16 [Oryza sativa (japonica
  misc_feature (1)..(138): Homolog of NCBI NO: 22328740 NR Description: hypothetical protein; protein id: At4g17050.1
  misc_feature (1)..(139): Homolog of NCBI NO: 34393580 NR Description: putative glyoxylate induced protein
MISDEPTTLVIFERRYNAIEDSHPDLIVGSTDKQPLLETPGEVFQLRKLLPTSLSYDFNIHIMDFQPGEYLNVKEVHYNQHGLLLLEGQAIYRLGESWYPVQAGDTIWMAPFVPQWYAALGKTRTRYLLYKDVNRNPLI

SEQ ID NO: 3225 - protein, 100 aa, Zea mays subsp. mays
  peptide (1)..(100): Ceres Seq. ID no. 12402653
PCAFLVAISDSAPPLPPESIASSSAQHDAHPPPPPPLPLRSLGVAAMRCGDGGGWIRRWRRGVLLGGAVQQVLRGSAALLEGHPSHPRARAPPRFTWLHT

SEQ ID NO: 3226 - DNA, 686 bp, Zea mays subsp. mays
  misc_feature (1)..(686): Ceres Seq. ID no. 12345930
  misc_feature: MA Experiment ID: 108528 Result: Down-regulated in Transcription
  misc_feature: MA Experiment 108528 PARAMETER Experiment Name: Zm_Imbibed_Seeds_P Parameter: Age (day) Value: 5 vs. 2
  misc_feature: MA Experiment 108528 PARAMETER Experiment Name: Zm_Imbibed_Seeds_P Parameter: Organism Value: Zea mays
  misc_feature: MA Experiment 108528 PARAMETER Experiment Name: Zm_Imbibed_Seeds_P Parameter: Plant Line Value: 35A19
  misc_feature: MA Experiment 108528 PARAMETER Experiment Name: Zm_Imbibed_Seeds_P Parameter: Tissue Value: Aerial vs. Embryo
  misc_feature: MA Experiment ID: 108530 Result: Down-regulated in Transcription
  misc_feature: MA Experiment 108530 PARAMETER Experiment Name: Zm_Imbibed_Seeds_P Parameter: Age (day) Value: 6 vs. 2
  misc_feature: MA Experiment 108530 PARAMETER Experiment Name: Zm_Imbibed_Seeds_P Parameter: Organism Value: Zea mays
  misc_feature: MA Experiment 108530 PARAMETER Experiment Name: Zm_Imbibed_Seeds_P Parameter: Plant Line Value: 35A19
  misc_feature: MA Experiment 108530 PARAMETER Experiment Name: Zm_Imbibed_Seeds_P Parameter: Tissue Value: Aerial vs. Embryo
tttttttttccccacctactacttcctctgctcgcggctcgccttcgtcggatcggatccacagcaagcagcaacagcctgcagccggcagtcctcgcctccgcctcctccaccctgaccgtcaacagaggaagacgaggatgtcgggatccaaggtgtacaccctcgaggaggtggctaagcacaacaccaaggacgactgctggctcgtcatcggcggcaaggtgtacaatgtgaccaagtttctggaggatcaccctggaggcgatgatgttctgctgtcttccactgccaaggatgctaccgatgatttcgaagatgtggggcacagcagcactgcccgtgcaatgatggacgagtacttagtgggtgagattgatgcagccacgatacccaccaaggtgaagtacacgccccccaagcagccgcactacaaccaggacaagacccaggagttcgtcatcaagatcctccagtttttggtccccctcgcaatactgggtctgggccgtcgctgtaaggatgtacaccaagtcggaatctgcctagtctcttgtcatcaacgcttcaaacatcattcacaaactgaataagttagtgttgaaatgctgcaaagatcattaattctgaaacttgagtctttgctgtcgtgtgagacgtacgtctattagtataaaatcacttct

SEQ ID NO: 3227 - protein, 196 aa, Zea mays subsp. mays
  peptide (1)..(196): Ceres Seq. ID no. 12345931
  misc_feature (52)..(126): Pfam Name: Cytochrome b5-like Heme/Steroid binding domain Pfam Description: Cytochrome b5-like Heme/Steroid binding domain
  misc_feature (51)..(166): Homolog of NCBI NO: 12229735 NR Description: Cytochrome b5
  misc_feature (50)..(168): Homolog of NCBI NO: 2647949 NR Description: cytochrome b5 [Olea europaea]
  misc_feature (47)..(168): Homolog of NCBI NO: 1345879 NR Description: Cytochrome b5
  misc_feature (47)..(168): Homolog of NCBI NO: 1345882 NR Description: CYTOCHROME B5
  misc_feature (47)..(168): Homolog of NCBI NO: 1076621 NR Description: cytochrome b5 - common tobacco
  misc_feature (50)..(168): Homolog of NCBI NO: 15225731 NR Description: putative cytochrome b5; protein id: At2g32720.1
  misc_feature (47)..(168): Homolog of NCBI NO: 1345925 NR Description: Cytochrome b5, seed isoform
  misc_feature (51)..(168): Homolog of NCBI NO: 1345881 NR Description: Cytochrome b5
  misc_feature (51)..(168): Homolog of NCBI NO: 14719320 NR Description: cytochrome B5 [Oryza sativa]
  misc_feature (47)..(168): Homolog of NCBI NO: 34905998 NR Description: putative cytochrome B5 [Oryza sativa (japonica
FFSPPTTSSARGSPSSDRIHSKQQQPAAGSPRLRLLHPDRQQRKTRMSGSKVYTLEEVAKHNTKDDCWLVIGGKVYNVTKFLEDHPGGDDVLLSSTAKDATDDFEDVGHSSTARAMMDEYLVGEIDAATIPTKVKYTPPKQPHYNQDKTQEFVIKILQFLVPLAILGLGRRCKDVHQVGICLVSCHQRFKHHSQTE

SEQ ID NO: 3228 - protein, 150 aa, Zea mays subsp. mays
  peptide (1)..(150): Ceres Seq. ID no. 12345932
  misc_feature (6)..(80): Pfam Name: Cytochrome b5-like Heme/Steroid binding domain Pfam Description: Cytochrome b5-like Heme/Steroid binding domain
  misc_feature (5)..(120): Homolog of NCBI NO: 12229735 NR Description: Cytochrome b5
  misc_feature (4)..(122): Homolog of NCBI NO: 2647949 NR Description: cytochrome b5 [Olea europaea]
  misc_feature (1)..(122): Homolog of NCBI NO: 1345879 NR Description: Cytochrome b5
  misc_feature (1)..(122): Homolog of NCBI NO: 1345882 NR Description: CYTOCHROME B5
  misc_feature (1)..(122): Homolog of NCBI NO: 1076621 NR Description: cytochrome b5 - common tobacco
  misc_feature (4)..(122): Homolog of NCBI NO: 15225731 NR Description: putative cytochrome b5; protein id: At2g32720.1
  misc_feature (1)..(122): Homolog of NCBI NO: 1345925 NR Description: Cytochrome b5, seed isoform
  misc_feature (5)..(122): Homolog of NCBI NO: 1345881 NR Description: Cytochrome b5
  misc_feature (5)..(122): Homolog of NCBI NO: 14719320 NR Description: cytochrome B5 [Oryza sativa]
  misc_feature (1)..(122): Homolog of NCBI NO: 34905998 NR Description: putative cytochrome B5 [Oryza sativa (japonica
MSGSKVYTLEEVAKHNTKDDCWLVIGGKVYNVTKFLEDHPGGDDVLLSSTAKDATDDFEDVGHSSTARAMMDEYLVGEIDAATIPTKVKYTPPKQPHYNQDKTQEFVIKILQFLVPLAILGLGRRCKDVHQVGICLVSCHQRFKHHSQTE

SEQ ID NO: 3229 - DNA, 932 bp, Zea mays subsp. mays
  misc_feature (1)..(932): Ceres Seq. ID no. 12400274
  misc_feature: MA Experiment ID: 108528 Result: Up-regulated in Transcription
  misc_feature: MA Experiment 108528 PARAMETER Experiment Name: Zm_Imbibed_Seeds_P Parameter: Age (day) Value: 5 vs. 2
  misc_feature: MA Experiment 108528 PARAMETER Experiment Name: Zm_Imbibed_Seeds_P Parameter: Organism Value: Zea mays
  misc_feature: MA Experiment 108528 PARAMETER Experiment Name: Zm_Imbibed_Seeds_P Parameter: Plant Line Value: 35A19
  misc_feature: MA Experiment 108528 PARAMETER Experiment Name: Zm_Imbibed_Seeds_P Parameter: Tissue Value: Aerial vs. Embryo
  misc_feature: MA Experiment ID: 108530 Result: Up-regulated in Transcription
  misc_feature: MA Experiment 108530 PARAMETER Experiment Name: Zm_Imbibed_Seeds_P Parameter: Age (day) Value: 6 vs. 2
  misc_feature: MA Experiment 108530 PARAMETER Experiment Name: Zm_Imbibed_Seeds_P Parameter: Organism Value: Zea mays
  misc_feature: MA Experiment 108530 PARAMETER Experiment Name: Zm_Imbibed_Seeds_P Parameter: Plant Line Value: 35A19
  misc_feature: MA Experiment 108530 PARAMETER Experiment Name: Zm_Imbibed_Seeds_P Parameter: Tissue Value: Aerial vs. Embryo
  misc_feature: MA Experiment ID: 108545 Result: Up-regulated in Transcription
  misc_feature: MA Experiment 108545 PARAMETER Experiment Name: Zm_Imbibed_Seeds_P Parameter: Age (day) Value: 3 vs. 2
  misc_feature: MA Experiment 108545 PARAMETER Experiment Name: Zm_Imbibed_Seeds_P Parameter: Organism Value: Zea mays
  misc_feature: MA Experiment 108545 PARAMETER Experiment Name: Zm_Imbibed_Seeds_P Parameter: Plant Line Value: 35A19
  misc_feature: MA Experiment 108545 PARAMETER Experiment Name: Zm_Imbibed_Seeds_P Parameter: Tissue Value: Aerial vs. Embryo
  misc_feature: MA Experiment ID: 20000492 Result: Up-regulated in Transcription
  misc_feature: MA Experiment 20000492 PARAMETER Experiment Name: Zm_Hybrid_Seed_Dev_P Parameter: DAP Value: 12
  misc_feature: MA Experiment 20000492 PARAMETER Experiment Name: Zm_Hybrid_Seed_Dev_P Parameter: Organism Value: Zea mays
  misc_feature: MA Experiment 20000492 PARAMETER Experiment Name: Zm_Hybrid_Seed_Dev_P Parameter: Plant Line Value: 35A19
  misc_feature: MA Experiment 20000492 PARAMETER Experiment Name: Zm_Hybrid_Seed_Dev_P Parameter: Tissue Value: Fert Kernel vs. Unfert Floret
gccgccgtagctggtagctaagctacgtgaagaagatggttgggctcctccgtccactctccgccgccgccaccttactcctcgcccccgccacgccactcactggttcctcagtctccgctagttccgtcggcggcaggcggtggagaagcgtgagggcggacgccggcgggggctggctatccgggctgctgggcggcaagggcggcggcgcgtccacggcgatgatggtgacgccgggaaccgtgaaggccggcgaccccgtcctgcacgagcccgcgcaggaggtggcgccgggggacgtgctgtccgagaaggtgcagggcgtcatcgaccggatggtcgacgtcatgcgcagggccccaggcgtcggcctcgccgcccccgcagatcggcgtcccgctcaggattattgttctcgaggatacgcaggagtacatcagctatgcacccaagaaggacatcgaagcacaagaccgccgcccctttgatcttctcgtcggtcattatcaatccaaagattaagagcacgagtaaaagaaccgcgctgttctttgagggatgtctcagtgttgatggatacagggcggtcgtggagcggcatctggacgttgaagtttcaggtctggaccggaatgggagcaccatgaaggtacgggcttcaggatggcaagcgcgcatcctccagcatgaatgtgatcatcttgaaggcacgctgtatgttgacaagatggtagcaaggacattcagggtcgtcgagaacttggatttgccccttcccactggatgccctcaactaggtgcaagataatggggatagctttccatttttcctcgtcgaatagatgtgattctctctctctttttgaaaattacaacgtctcatgtacagtattgcattttgcttcccgtctaattgctgtgtttgttct

SEQ ID NO: 3230 - protein, 151 aa, Zea mays subsp. mays
  peptide (1)..(151): Ceres Seq. ID no. 12400275
  misc_feature (5)..(117): Homolog of NCBI NO: 34913982 NR Description: peptide deformylase-like protein [Oryza sativa
  misc_feature (26)..(117): Homolog of NCBI NO: 17433049 NR Description: Peptide deformylase, mitochondrial precursor (Polypeptide deformylase) >gi|11320968|gb|AAG33981.1|AF271258_1
  misc_feature (47)..(117): Homolog of NCBI NO: 17433051 NR Description: Peptide deformylase, mitochondrial precursor (Polypeptide deformylase) >gi|25518549|pir||E86288 hypothetical
  misc_feature (47)..(117): Homolog of NCBI NO: 18394237 NR Description: expressed protein; protein id: At1g15390.1, by cDNA: gi_11320951 [Arabidopsis thaliana]
  misc_feature (71)..(117): Homolog of NCBI NO: 37521298 NR Description: polypeptide deformylase [Gloeobacter violaceus]
  misc_feature (71)..(117): Homolog of NCBI NO: 39930960 NR Description: Peptide deformylase 1 (PDF 1) (Polypeptide
  misc_feature (74)..(117): Homolog of NCBI NO: 24645728 NR Description: CG31373-PA [Drosophila melanogaster]
  misc_feature (72)..(124): Homolog of NCBI NO: 11641243 NR Description: peptide deformylase-like protein [Homo sapiens] Peptide deformylase, mitochondrial precursor (PDF) (Polypeptide
  misc_feature (72)..(124): Homolog of NCBI NO: 18043802 NR Description: peptide deformylase-like protein [Homo sapiens]
  misc_feature (72)..(124): Homolog of NCBI NO: 34851655 NR Description: similar to peptide deformylase-like protein
MVGLLRPLSAAATLLLAPATPLTGSSVSASSVGGRRWRSVRADAGGGWLSGLLGGKGGGASTAMMVTPGTVKAGDPVLHEPAQEVAPGDVLSEKVQGVIDRMVDVMRRAPGVGLAAPADRRPAQDYCSRGYAGVHQLCTQEGHRSTRPPPL

SEQ ID NO: 3231 - protein, 121 aa, Zea mays subsp. mays
  peptide (1)..(121): Ceres Seq. ID no. 12400276
  misc_feature (20)..(102): Homolog of NCBI NO: 34913982 NR Description: peptide deformylase-like protein [Oryza sativa
  misc_feature (20)..(119): Homolog of NCBI NO: 17433049 NR Description: Peptide deformylase, mitochondrial precursor (Polypeptide deformylase) >gi|11320968|gb|AAG33981.1|AF271258_1
  misc_feature (20)..(119): Homolog of NCBI NO: 17433051 NR Description: Peptide deformylase, mitochondrial precursor (Polypeptide deformylase) >gi|25518549|pir||E86288 hypothetical
  misc_feature (20)..(119): Homolog of NCBI NO: 18394237 NR Description: expressed protein; protein id: At1g15390.1, by cDNA: gi_11320951 [Arabidopsis thaliana]
  misc_feature (8)..(108): Homolog of NCBI NO: 37521298 NR Description: polypeptide deformylase [Gloeobacter violaceus]
  misc_feature (8)..(108): Homolog of NCBI NO: 39930960 NR Description: Peptide deformylase 1 (PDF 1) (Polypeptide
  misc_feature (19)..(104): Homolog of NCBI NO: 24645728 NR Description: CG31373-PA [Drosophila melanogaster]
  misc_feature (20)..(101): Homolog of NCBI NO: 11641243 NR Description: peptide deformylase-like protein [Homo sapiens] Peptide deformylase, mitochondrial precursor (PDF) (Polypeptide
  misc_feature (20)..(101): Homolog of NCBI NO: 18043802 NR Description: peptide deformylase-like protein [Homo sapiens]
  misc_feature (1)..(101): Homolog of NCBI NO: 34851655 NR Description: similar to peptide deformylase-like protein
MHPRRTSKHKTAAPLIFSSVIINPKIKSTSKRTALFFEGCLSVDGYRAVVERHLDVEVSGLDRNGSTMKVRASGWQARILQHECDHLEGTLYVDKMVARTFRVVENLDLPLPTGCPQLGAR

SEQ ID NO: 3232 - protein, 88 aa, Zea mays subsp. mays
  peptide (1)..(88): Ceres Seq. ID no. 12400277
  misc_feature (1)..(54): Homolog of NCBI NO: 34913982 NR Description: peptide deformylase-like protein [Oryza sativa
  misc_feature (1)..(54): Homolog of NCBI NO: 17433049 NR Description: Peptide deformylase, mitochondrial precursor (Polypeptide deformylase) >gi|11320968|gb|AAG33981.1|AF271258_1
  misc_feature (1)..(54): Homolog of NCBI NO: 17433051 NR Description: Peptide deformylase, mitochondrial precursor (Polypeptide deformylase) >gi|25518549|pir||E86288 hypothetical
  misc_feature (1)..(54): Homolog of NCBI NO: 18394237 NR Description: expressed protein; protein id: At1g15390.1, by cDNA: gi_11320951 [Arabidopsis thaliana]
  misc_feature (8)..(54): Homolog of NCBI NO: 37521298 NR Description: polypeptide deformylase [Gloeobacter violaceus]
  misc_feature (8)..(54): Homolog of NCBI NO: 39930960 NR Description: Peptide deformylase 1 (PDF 1) (Polypeptide
  misc_feature (11)..(54): Homolog of NCBI NO: 24645728 NR Description: CG31373-PA [Drosophila melanogaster]
  misc_feature (9)..(61): Homolog of NCBI NO: 11641243 NR Description: peptide deformylase-like protein [Homo sapiens] Peptide deformylase, mitochondrial precursor (PDF) (Polypeptide
  misc_feature (9)..(61): Homolog of NCBI NO: 18043802 NR Description: peptide deformylase-like protein [Homo sapiens]
  misc_feature (9)..(61): Homolog of NCBI NO: 34851655 NR Description: similar to peptide deformylase-like protein
MMVTPGTVKAGDPVLHEPAQEVAPGDVLSEKVQGVIDRMVDVMRRAPGVGLAAPADRRPAQDYCSRGYAGVHQLCTQEGHRSTRPPPL

SEQ ID NO: 3233 - DNA, 921 bp, Zea mays subsp. mays
  misc_feature (1)..(921): Ceres Seq. ID no. 12588519
  misc_feature: MA Experiment ID: 108528 Result: Up-regulated in Transcription
  misc_feature: MA Experiment 108528 PARAMETER Experiment Name: Zm_Imbibed_Seeds_P Parameter: Age (day) Value: 5 vs. 2
  misc_feature: MA Experiment 108528 PARAMETER Experiment Name: Zm_Imbibed_Seeds_P Parameter: Organism Value: Zea mays
  misc_feature: MA Experiment 108528 PARAMETER Experiment Name: Zm_Imbibed_Seeds_P Parameter: Plant Line Value: 35A19
  misc_feature: MA Experiment 108528 PARAMETER Experiment Name: Zm_Imbibed_Seeds_P Parameter: Tissue Value: Aerial vs. Embryo
  misc_feature: MA Experiment ID: 108529 Result: Down-regulated in Transcription
  misc_feature: MA Experiment 108529 PARAMETER Experiment Name: Zm_Imbibed_Seeds_P Parameter: Age (day) Value: 5 vs. 2
  misc_feature: MA Experiment 108529 PARAMETER Experiment Name: Zm_Imbibed_Seeds_P Parameter: Organism Value: Zea mays
  misc_feature: MA Experiment 108529 PARAMETER Experiment Name: Zm_Imbibed_Seeds_P Parameter: Plant Line Value: 35A19
  misc_feature: MA Experiment 108529 PARAMETER Experiment Name: Zm_Imbibed_Seeds_P Parameter: Tissue Value: Roots vs. Embryo
  misc_feature: MA Experiment ID: 108530 Result: Up-regulated in Transcription
  misc_feature: MA Experiment 108530 PARAMETER Experiment Name: Zm_Imbibed_Seeds_P Parameter: Age (day) Value: 6 vs. 2
  misc_feature: MA Experiment 108530 PARAMETER Experiment Name: Zm_Imbibed_Seeds_P Parameter: Organism Value: Zea mays
  misc_feature: MA Experiment 108530 PARAMETER Experiment Name: Zm_Imbibed_Seeds_P Parameter: Plant Line Value: 35A19
  misc_feature: MA Experiment 108530 PARAMETER Experiment Name: Zm_Imbibed_Seeds_P Parameter: Tissue Value: Aerial vs. Embryo
  misc_feature: MA Experiment ID: 108536 Result: Down-regulated in Transcription
  misc_feature: MA Experiment 108536 PARAMETER Experiment Name: Zm_Meristem_P Parameter: Age (day) Value: 8
  misc_feature: MA Experiment 108536 PARAMETER Experiment Name: Zm_Meristem_P Parameter: Organism Value: Zea mays
  misc_feature: MA Experiment 108536 PARAMETER Experiment Name: Zm_Meristem_P Parameter: Plant Line Value: 35A19
  misc_feature: MA Experiment 108536 PARAMETER Experiment Name: Zm_Meristem_P Parameter: Tissue Value: Shoot Meristem vs. Above Shoot Meristem
  misc_feature: MA Experiment ID: 108545 Result: Up-regulated in Transcription
  misc_feature: MA Experiment 108545 PARAMETER Experiment Name: Zm_Imbibed_Seeds_P Parameter: Age (day) Value: 3 vs. 2
  misc_feature: MA Experiment 108545 PARAMETER Experiment Name: Zm_Imbibed_Seeds_P Parameter: Organism Value: Zea mays
  misc_feature: MA Experiment 108545 PARAMETER Experiment Name: Zm_Imbibed_Seeds_P Parameter: Plant Line Value: 35A19
  misc_feature: MA Experiment 108545 PARAMETER Experiment Name: Zm_Imbibed_Seeds_P Parameter: Tissue Value: Aerial vs. Embryo
  misc_feature: MA Experiment ID: 108546 Result: Down-regulated in Transcription
  misc_feature: MA Experiment 108546 PARAMETER Experiment Name: Zm_Imbibed_Seeds_P Parameter: Age (day) Value: 3 vs. 2
  misc_feature: MA Experiment 108546 PARAMETER Experiment Name: Zm_Imbibed_Seeds_P Parameter: Organism Value: Zea mays
  misc_feature: MA Experiment 108546 PARAMETER Experiment Name: Zm_Imbibed_Seeds_P Parameter: Plant Line Value: 35A19
  misc_feature: MA Experiment 108546 PARAMETER Experiment Name: Zm_Imbibed_Seeds_P Parameter: Tissue Value: Roots vs. Embryo
  misc_feature: MA Experiment ID: 108547 Result: Up-regulated in Transcription
  misc_feature: MA Experiment 108547 PARAMETER Experiment Name: Zm_Imbibed_Seeds_P Parameter: Age (day) Value: 4 vs. 2
  misc_feature: MA Experiment 108547 PARAMETER Experiment Name: Zm_Imbibed_Seeds_P Parameter: Organism Value: Zea mays
  misc_feature: MA Experiment 108547 PARAMETER Experiment Name: Zm_Imbibed_Seeds_P Parameter: Plant Line Value: 35A19
  misc_feature: MA Experiment 108547 PARAMETER Experiment Name: Zm_Imbibed_Seeds_P Parameter: Tissue Value: Aerial vs. Embryo
  misc_feature: MA Experiment ID: 108556 Result: Down-regulated in Transcription
  misc_feature: MA Experiment 108556 PARAMETER Experiment Name: Zm_Drought_P Parameter: Age (day) Value: 9
  misc_feature: MA Experiment 108556 PARAMETER Experiment Name: Zm_Drought_P Parameter: Organism Value: Zea mays
  misc_feature: MA Experiment 108556 PARAMETER Experiment Name: Zm_Drought_P Parameter: Plant Line Value: 35A19
  misc_feature: MA Experiment 108556 PARAMETER Experiment Name: Zm_Drought_P Parameter: Timepoint (hr) Value: 24
  misc_feature: MA Experiment 108556 PARAMETER Experiment Name: Zm_Drought_P Parameter: Tissue Value: Aerial
  misc_feature: MA Experiment 108556 PARAMETER Experiment Name: Zm_Drought_P Parameter: Treatment Value: Drought vs. No Drought
  misc_feature: MA Experiment ID: 108559 Result: Down-regulated in Transcription
  misc_feature: MA Experiment 108559 PARAMETER Experiment Name: Zm_5mM_NO_P Parameter: Age (day) Value: 8
  misc_feature: MA Experiment 108559 PARAMETER Experiment Name: Zm_5mM_NO_P Parameter: Organism Value: Zea mays
  misc_feature: MA Experiment 108559 PARAMETER Experiment Name: Zm_5mM_NO_P Parameter: Plant Line Value: 35A19
  misc_feature: MA Experiment 108559 PARAMETER Experiment Name: Zm_5mM_NO_P Parameter: Timepoint (hr) Value: 12
  misc_feature: MA Experiment 108559 PARAMETER Experiment Name: Zm_5mM_NO_P Parameter: Tissue Value: Aerial
  misc_feature: MA Experiment 108559 PARAMETER Experiment Name: Zm_5mM_NO_P Parameter: Treatment Value: 5mM NO vs. No Treatment
  misc_feature: MA Experiment ID: 108687 Result: Down-regulated in Transcription
  misc_feature: MA Experiment 108687 PARAMETER Experiment Name: Zm_Embryos-Flowers__P Parameter: Tissue Value: Embryo vs. Aerial+
  misc_feature: MA Experiment ID: 108688 Result: Down-regulated in Transcription
  misc_feature: MA Experiment 108688 PARAMETER Experiment Name: Zm_Embryos-Flowers__P Parameter: Tissue Value: Immature Flowers vs. Aerial+
  misc_feature: MA Experiment ID: 20000492 Result: Down-regulated in Transcription
  misc_feature: MA Experiment 20000492 PARAMETER Experiment Name: Zm_Hybrid_Seed_Dev_P Parameter: DAP Value: 12
  misc_feature: MA Experiment 20000492 PARAMETER Experiment Name: Zm_Hybrid_Seed_Dev_P Parameter: Organism Value: Zea mays
  misc_feature: MA Experiment 20000492 PARAMETER Experiment Name: Zm_Hybrid_Seed_Dev_P Parameter: Plant Line Value: 35A19
  misc_feature: MA Experiment 20000492 PARAMETER Experiment Name: Zm_Hybrid_Seed_Dev_P Parameter: Tissue Value: Fert Kernel vs. Unfert Floret
  misc_feature: MA Experiment ID: 20001608 Result: Up-regulated in Transcription
  misc_feature: MA Experiment 20001608 PARAMETER Experiment Name: Zm_50ppm_KNO3_L-to-H_P Parameter: Age (day) Value: 21
  misc_feature: MA Experiment 20001608 PARAMETER Experiment Name: Zm_50ppm_KNO3_L-to-H_P Parameter: Organism Value: Zea mays
  misc_feature: MA Experiment 20001608 PARAMETER Experiment Name: Zm_50ppm_KNO3_L-to-H_P Parameter: Plant Line Value: 35A19
  misc_feature: MA Experiment 20001608 PARAMETER Experiment Name: Zm_50ppm_KNO3_L-to-H_P Parameter: Timepoint (hr) Value: 48
  misc_feature: MA Experiment 20001608 PARAMETER Experiment Name: Zm_50ppm_KNO3_L-to-H_P Parameter: Tissue Value: Shoots
  misc_feature: MA Experiment 20001608 PARAMETER Experiment Name: Zm_50ppm_KNO3_L-to-H_P Parameter: Treatment Value: 50ppm KNO3 vs. 50ppm KCl
atcagaaccgatccttacagagagacacacccagcgcgcgagatatctacatcgatcatcatcaccagcgagcgagccggccgagcagcaccgatggcggcgtacatgcgcgtgacgcaccgcgacgaggaaggcaagaaggtgacggagaagatgccggtcccggagacgcggcgcccggacacggccaagcacttcgagcgcaagctggaggagcagggcctccaccgcttcgagcggcacccggcgaacgcgccccggggcgtgggcatcggcgccccgccgcccaagtccgggcgcggcggcaagtacacctgggagggccccggcagcgtcgtcgaggaccagctcgacccggcgcccgcccgccatcgaccccaacgaccccaactacgaggagggaggggcggcggacgaggacgacgaggcggccagtgagatcgccggattcgtggtgggtgccctgctgctcggcgccaccatcgctgcccccaaggtcgacggcttcatcgcctcctcccagagaaggtcactagggatgtgtaagaggtgcggtgaccttcggattgtagcatgctcgcagtgcaagggaacaggatcagctcggagcggagggatgctcagtttgggcgtgctggatgacctctacgagtctcttggagccgaagccaagactgagaatctggttccctgcacaaagtgcaggtcgagaggccgtctcatgtgtccagaatgctccaaggtcgcatgaccctggcctggagccgtgtactcggtcagaacacatgtacggctctgacaaacacaaatcactgctgtcactgtttgtgtttgaacattattatgtgcatggaattcctgacccgactactggtggttagggatggtccactgtctcaatgcagttgttttcagtgcttt

SEQ ID NO: 3234 - protein, 177 aa, Zea mays subsp. mays
  peptide (1)..(177): Ceres Seq. ID no. 12588520
QNRSLQRDTPSARDIYIDHHHQRASRPSSTDGGVHARDAPRRGRQEGDGEDAGPGDAAPGHGQALRAQAGGAGPPPLRAAPGERAPGRGHRRPAAQVRARRQVHLGGPRQRRRGPARPGARPPSTPTTPTTRREGRRTRTTRRPVRSPDSWWVPCCSAPPSLPPRSTASSPPPREGH

SEQ ID NO: 3235 - protein, 145 aa, Zea mays subsp. mays
  peptide (1)..(145): Ceres Seq. ID no. 12588521
  misc_feature (36)..(121): Homolog of NCBI NO: 18398726 NR Description: expressed protein
IRTDPYRETHPAREISTSIIITSERAGRAAPMAAYMRVTHRDEEGKKVTEKMPVPETRRPDTAKHFERKLEEQGLHRFERHPANAPRGVGIGAPPPKSGRGGKYTWEGPGSVVEDQLDPAPARHRPQRPQLRGGRGGGRGRRGGQ

SEQ ID NO: 3236 - protein, 114 aa, Zea mays subsp. mays
  peptide (1)..(114): Ceres Seq. ID no. 12588522
  misc_feature (5)..(90): Homolog of NCBI NO: 18398726 NR Description: expressed protein
MAAYMRVTHRDEEGKKVTEKMPVPETRRPDTAKHFERKLEEQGLHRFERHPANAPRGVGIGAPPPKSGRGGKYTWEGPGSVVEDQLDPAPARHRPQRPQLRGGRGGGRGRRGGQ

SEQ ID NO: 3237 - DNA, 1510 bp, Zea mays subsp. mays
  misc_feature (1)..(1510): Ceres Seq. ID no. 12364196
  misc_feature: MA Experiment ID: 108535 Result: Up-regulated in Transcription
  misc_feature: MA Experiment 108535 PARAMETER Experiment Name: Zm_Meristem_P Parameter: Age (day) Value: 8
  misc_feature: MA Experiment 108535 PARAMETER Experiment Name: Zm_Meristem_P Parameter: Organism Value: Zea mays
  misc_feature: MA Experiment 108535 PARAMETER Experiment Name: Zm_Meristem_P Parameter: Plant Line Value: 35A19
  misc_feature: MA Experiment 108535 PARAMETER Experiment Name: Zm_Meristem_P Parameter: Tissue Value: Root Meristem vs. Above Root Meristem
  misc_feature: MA Experiment ID: 20000108 Result: Up-regulated in Transcription
  misc_feature: MA Experiment 20000108 PARAMETER Experiment Name: Zm_Root-Tips_P Parameter: Age (day) Value: 12
  misc_feature: MA Experiment 20000108 PARAMETER Experiment Name: Zm_Root-Tips_P Parameter: Organism Value: Zea mays
  misc_feature: MA Experiment 20000108 PARAMETER Experiment Name: Zm_Root-Tips_P Parameter: Tissue Value: Root tips vs. Root mid region    35
  misc_feature: MA Experiment 20000108 PARAMETER Experiment Name: Zm_Root-Tips_P Parameter: Tissue Value: Root tips vs. Root mid region   Sequence Listing-Misc Features (4)
  misc_feature: MA Experiment ID: 20000487 Result: Up-regulated in Transcription
  misc_feature: MA Experiment 20000487 PARAMETER Experiment Name: Zm_50mM_NH4NO3_L_to_H_P Parameter: Organism Value: Zea mays
  misc_feature: MA Experiment 20000487 PARAMETER Experiment Name: Zm_50mM_NH4NO3_L_to_H_P Parameter: Timepoint (hr) Value: 4
  misc_feature: MA Experiment 20000487 PARAMETER Experiment Name: Zm_50mM_NH4NO3_L_to_H_P Parameter: Tissue Value: Leaves
  misc_feature: MA Experiment 20000487 PARAMETER Experiment Name: Zm_50mM_NH4NO3_L_to_H_P Parameter: Treatment Value: 50mM NH4NO3 vs. 100mM Mannitol
  misc_feature: MA Experiment ID: 20000492 Result: Up-regulated in Transcription
  misc_feature: MA Experiment 20000492 PARAMETER Experiment Name: Zm_Hybrid_Seed_Dev_P Parameter: DAP Value: 12
  misc_feature: MA Experiment 20000492 PARAMETER Experiment Name: Zm_Hybrid_Seed_Dev_P Parameter: Organism Value: Zea mays
  misc_feature: MA Experiment 20000492 PARAMETER Experiment Name: Zm_Hybrid_Seed_Dev_P Parameter: Plant Line Value: 35A19
  misc_feature: MA Experiment 20000492 PARAMETER Experiment Name: Zm_Hybrid_Seed_Dev_P Parameter: Tissue Value: Fert Kernel vs. Unfert Floret
  misc_feature: MA Experiment ID: 20000534 Result: Down-regulated in Transcription
  misc_feature: MA Experiment 20000534 PARAMETER Experiment Name: Zm_Hybrid_Pollen_P Parameter: Age (day) Value: 8
  misc_feature: MA Experiment 20000534 PARAMETER Experiment Name: Zm_Hybrid_Pollen_P Parameter: Organism Value: Zea mays
  misc_feature: MA Experiment 20000534 PARAMETER Experiment Name: Zm_Hybrid_Pollen_P Parameter: Plant Line Value: 35A19
  misc_feature: MA Experiment 20000534 PARAMETER Experiment Name: Zm_Hybrid_Pollen_P Parameter: Tissue Value: Pollen vs. Aerial
gcacgagaccattacctagaacatcctaatcgaaaacctgctgcagtgtgcaggactgcagggcaggccctgccgtctgccgcaaaagagagcactaggaaaagaagtgttgcggcgttgcgtggtgggggacgaggccagagcgccccaaaaccaaaaaccccagaaccccgacctagggttacgccatcgccatgggatctgttgcctccgccgctgtgccaccacctcctcctcaatcagcgctgcctcaggcgggcgcgccgccctacgggcccgggctcgccgggatcctcccgcagatgtcgaagggggaggagaagaaggatgagaaggtggactacctcaacctcccctgccccgtgcccttcgaggagatccagcgcgaggctctcatgtctttgaagcctgaactttttgaaggattgagatttgacttcacaaaaggattgaatcagaagttttctcttagccacagcatttttatgggctccttagaagttccagcccaggcatctgaaactattaaagttccaactgcacattatgaatttggcgccaattttttagatccaaagttaatgctcattggaagggtgatgacagatggaaggcttaatgctcgtgtgaaatgtgatttgacagacaatctgacgttgaaagtaaatgcacagcttacccaagaggcacattactcacaagggatgtttaacttcgactacaagggaagtgactatcgagcacaattccaaattgggaacaatgcattctatggtgcaaattatattcagagtgttactccgaacctatcaatgggaactgaaatgttctggcttggtcaccaaaggaagtctggaattggttttgcctctcgctacaacacagacaaaatggtgggcactctacaggtcgcaagcactggaatagttgccttaagttatgtccagaagatttccgagaaggtttcccttgcgtctgacttcatgtataaccatatgtcaagagatgtaactgccagctttggttatgattacttgcttaggcagtgccgcctaagaggcaaaatagactcgaatggtgttgttgccgcatacttggaagagaggttgaacatgggtgtcaacttccttctatctgctgagattgaccattgtaagaagaactacaagtttggttttggaatgaccgtaggagagtaattctgccaaaacaattgctgtgagcgcacatgagatacttatgcagtcggcttcgcgcgtatgttgacttgttaaagatatttcaggtctcagttttgactgatcaggttttgccattgcgccgtggaaaaacacaggccgttgctgctttacagggttttgtgttttttcagctacttgagcatgggggccatgattctttgttcatcttggatgtaactagctgattggtgttccaacaatgttgtattggcggaacaatttttacctttttaaatcactaccaatccacctcactaggccttttctgc

SEQ ID NO: 3238 - protein, 334 aa, Zea mays subsp. mays
  peptide (1)..(334): Ceres Seq. ID no. 12364197
  misc_feature (56)..(327): Pfam Name: Eukaryotic porin Pfam Description: Eukaryotic porin
  misc_feature (1)..(277): Homolog of NCBI NO: 34903264 NR Description: unnamed protein product [Oryza sativa (japonica
  misc_feature (242)..(334): Homolog of NCBI NO: 2982293 NR Description: ISP42-like protein [Picea mariana]
  misc_feature (98)..(129): Homolog of NCBI NO: 25405370 NR Description: hypothetical protein F14I3.2 [imported] -
  misc_feature (157)..(330): Homolog of NCBI NO: 25405370 NR Description: hypothetical protein F14I3.2 [imported] -
  misc_feature (43)..(129): Homolog of NCBI NO: 13162531 NR Description: Hypothetical protein [Arabidopsis thaliana]
  misc_feature (157)..(330): Homolog of NCBI NO: 13162531 NR Description: Hypothetical protein [Arabidopsis thaliana]
  misc_feature (30)..(129): Homolog of NCBI NO: 11994775 NR Description: membrane import protein-like [Arabidopsis
  misc_feature (160)..(333): Homolog of NCBI NO: 11994775 NR Description: membrane import protein-like [Arabidopsis
  misc_feature (43)..(330): Homolog of NCBI NO: 15222963 NR Description: hypothetical protein; protein id: At1g50400.1
  misc_feature (30)..(333): Homolog of NCBI NO: 15231008 NR Description: membrane import protein, putative
MGSVASAAVPPPPPQSALPQAGAPPYGPGLAGILPQMSKGEEKKDEKVDYLNLPCPVPFEEIQREALMSLKPELFEGLRFDFTKGLNQKFSLSHSIFMGSLEVPAQASETIKVPTAHYEFGANFLDPKLMLIGRVMTDGRLNARVKCDLTDNLTLKVNAQLTQEAHYSQGMFNFDYKGSDYRAQFQIGNNAFYGANYIQSVTPNLSMGTEMFWLGHQRKSGIGFASRYNTDKMVGTLQVASTGIVALSYVQKISEKVSLASDFMYNHMSRDVTASFGYDYLLRQCRLRGKIDSNGVVAAYLEERLNMGVNFLLSAEIDHCKKNYKFGFGMTVGE

SEQ ID NO: 3239 - protein, 298 aa, Zea mays subsp. mays
  peptide (1)..(298): Ceres Seq. ID no. 12364198
  misc_feature (20)..(291): Pfam Name: Eukaryotic porin Pfam Description: Eukaryotic porin
  misc_feature (1)..(241): Homolog of NCBI NO: 34903264 NR Description: unnamed protein product [Oryza sativa (japonica
  misc_feature (206)..(298): Homolog of NCBI NO: 2982293 NR Description: ISP42-like protein [Picea mariana]
  misc_feature (62)..(93): Homolog of NCBI NO: 25405370 NR Description: hypothetical protein F14I3.2 [imported] -
  misc_feature (121)..(294): Homolog of NCBI NO: 25405370 NR Description: hypothetical protein F14I3.2 [imported] -
  misc_feature (7)..(93): Homolog of NCBI NO: 13162531 NR Description: Hypothetical protein [Arabidopsis thaliana]
  misc_feature (121)..(294): Homolog of NCBI NO: 13162531 NR Description: Hypothetical protein [Arabidopsis thaliana]
  misc_feature (1)..(93): Homolog of NCBI NO: 11994775 NR Description: membrane import protein-like [Arabidopsis
  misc_feature (124)..(297): Homolog of NCBI NO: 11994775 NR Description: membrane import protein-like [Arabidopsis
  misc_feature (7)..(294): Homolog of NCBI NO: 15222963 NR Description: hypothetical protein; protein id: At1g50400.1
  misc_feature (1)..(297): Homolog of NCBI NO: 15231008 NR Description: membrane import protein, putative
MSKGEEKKDEKVDYLNLPCPVPFEEIQREALMSLKPELFEGLRFDFTKGLNQKFSLSHSIFMGSLEVPAQASETIKVPTAHYEFGANFLDPKLMLIGRVMTDGRLNARVKCDLTDNLTLKVNAQLTQEAHYSQGMFNFDYKGSDYRAQFQIGNNAFYGANYIQSVTPNLSMGTEMFWLGHQRKSGIGFASRYNTDKMVGTLQVASTGIVALSYVQKISEKVSLASDFMYNHMSRDVTASFGYDYLLRQCRLRGKIDSNGVVAAYLEERLNMGVNFLLSAEIDHCKKNYKFGFGMTVGE

SEQ ID NO: 3240 - protein, 267 aa, Zea mays subsp. mays
  peptide (1)..(267): Ceres Seq. ID no. 12364199
  misc_feature (1)..(260): Pfam Name: Eukaryotic porin Pfam Description: Eukaryotic porin
  misc_feature (1)..(210): Homolog of NCBI NO: 34903264 NR Description: unnamed protein product [Oryza sativa (japonica
  misc_feature (175)..(267): Homolog of NCBI NO: 2982293 NR Description: ISP42-like protein [Picea mariana]
  misc_feature (31)..(62): Homolog of NCBI NO: 25405370 NR Description: hypothetical protein F14I3.2 [imported] -
  misc_feature (90)..(263): Homolog of NCBI NO: 25405370 NR Description: hypothetical protein F14I3.2 [imported] -
  misc_feature (1)..(62): Homolog of NCBI NO: 13162531 NR Description: Hypothetical protein [Arabidopsis thaliana]
  misc_feature (90)..(263): Homolog of NCBI NO: 13162531 NR Description: Hypothetical protein [Arabidopsis thaliana]
  misc_feature (1)..(62): Homolog of NCBI NO: 11994775 NR Description: membrane import protein-like [Arabidopsis
  misc_feature (93)..(266): Homolog of NCBI NO: 11994775 NR Description: membrane import protein-like [Arabidopsis
  misc_feature (1)..(263): Homolog of NCBI NO: 15222963 NR Description: hypothetical protein; protein id: At1g50400.1
  misc_feature (1)..(266): Homolog of NCBI NO: 15231008 NR Description: membrane import protein, putative
MSLKPELFEGLRFDFTKGLNQKFSLSHSIFMGSLEVPAQASETIKVPTAHYEFGANFLDPKLMLIGRVMTDGRLNARVKCDLTDNLTLKVNAQLTQEAHYSQGMFNFDYKGSDYRAQFQIGNNAFYGANYIQSVTPNLSMGTEMFWLGHQRKSGIGFASRYNTDKMVGTLQVASTGIVALSYVQKISEKVSLASDFMYNHMSRDVTASFGYDYLLRQCRLRGKIDSNGVVAAYLEERLNMGVNFLLSAEIDHCKKNYKFGFGMTVGE

SEQ ID NO: 3241 - DNA, 1559 bp, Zea mays subsp. mays
  misc_feature (1)..(1559): Ceres Seq. ID no. 12367597
  misc_feature: MA Experiment ID: 108522 Result: Down-regulated in Transcription
  misc_feature: MA Experiment 108522 PARAMETER Experiment Name: Zm_42deg_Heat_P Parameter: Age (day) Value: 8
  misc_feature: MA Experiment 108522 PARAMETER Experiment Name: Zm_42deg_Heat_P Parameter: Organism Value: Zea mays
  misc_feature: MA Experiment 108522 PARAMETER Experiment Name: Zm_42deg_Heat_P Parameter: Plant Line Value: 35A19
  misc_feature: MA Experiment 108522 PARAMETER Experiment Name: Zm_42deg_Heat_P Parameter: Temperature (deg C) Value: 42 vs. 22
  misc_feature: MA Experiment 108522 PARAMETER Experiment Name: Zm_42deg_Heat_P Parameter: Timepoint (hr) Value: 1
  misc_feature: MA Experiment 108522 PARAMETER Experiment Name: Zm_42deg_Heat_P Parameter: Tissue Value: Aerial
  misc_feature: MA Experiment ID: 108535 Result: Up-regulated in Transcription
  misc_feature: MA Experiment 108535 PARAMETER Experiment Name: Zm_Meristem_P Parameter: Age (day) Value: 8
  misc_feature: MA Experiment 108535 PARAMETER Experiment Name: Zm_Meristem_P Parameter: Organism Value: Zea mays
  misc_feature: MA Experiment 108535 PARAMETER Experiment Name: Zm_Meristem_P Parameter: Plant Line Value: 35A19
  misc_feature: MA Experiment 108535 PARAMETER Experiment Name: Zm_Meristem_P Parameter: Tissue Value: Root Meristem vs. Above Root Meristem
  misc_feature: MA Experiment ID: 108687 Result: Up-regulated in Transcription
  misc_feature: MA Experiment 108687 PARAMETER Experiment Name: Zm_Embryos-Flowers__P Parameter: Tissue Value: Embryo vs. Aerial+
cctaatcgaaaactggtctgaaagccctcactccaaatctcgcgcactgtcagctgacgccaccgcctgcgccagccctcgccaagccggtgaaaacctcgtgccctccgccgcctccgcccgcctcttccagagtaccgcggtctcatctcctcccgggacgggcatgcagagcgcggctgccatcggtctcgttcggccatgcgccgcgcggccgctccccacctaccctagcccacggcgcggcgccggcgcgtgcagcggcgccgcccagccgatcctcgcgccccgcggcctctgcctctccgcccgcgccagcctactgccggcctcgccgctggaggaggagtaccggagatgcagggccggccggcacgtgccggcgcgggaaggtggccgcggctgatggggccgtagaggaagcggggggagggctcgtcaagacgctgcagctggggtcgctcttcgggctctggtacctcttcaacatctacttcaacatctacaacaagcaggttctgaaggttctgccataccctataaacatcaccacagtgcagtttgccgttggaagtgccattgctttgtttatgtggatcaccggtatccttaaaaggccaaagatttctggtgcccagctttttgctatccttcctctagctatcgttcataccatgggcaatcttttcacaaacatgagccttggaaaggttgcggtgtcatttacacatactatcaaggccatggaacctttcttctcagttctcctttcagcaattttccttggtgagttgcctacgccttgggttgtgttgtctcttcttccgatcgttggtggtgtggcattggcatcccttactgaggcctcctttaactgggctggattttggagtgcaatggcttcaaatgtaaccttccagtcaaggaatgtgctaagcaagaaacttatggtgaagaaagaggaatctctcgacaacattaatctattttcgataattacagtcatgtcattcttcctgttggccccagtaaccttacttacagaaggtgttaaagttagtccagcagttttgcagtctgctggtttgaacttgaaacagatatacacaaggtcattgattgctgcatgctgcttccatgcataccaacaggtgtcatacatgatcctcgccagggtatccccagtcacacattcagtgggcaattgcgtcaagcgtgtggtggtcattgtgacctctgttctgttcttcaggacccctgtttctcccatcaactcactcggtaccgggatcgctcttgctggagttttcctatactcgcaattgaagaggcttaagcccaagcccaaggctgcttgatcatagacctttgcaggtccatccaatagaacttttgaagttatgctatgccattggaatgattagtgagtgccgtagttagaatgatgtttaaagaagagctaccacttcagcagataatttgtgacttgcttgcattttttggacggatttgttcgtgtattaataattttgcagtgacgatacttctgttgtgctgtt

SEQ ID NO: 3242 - protein, 255 aa, Zea mays subsp. mays
  peptide (1)..(255): Ceres Seq. ID no. 12367598
  misc_feature (1)..(89): Pfam Name: Integral membrane protein DUF6 Pfam Description: Integral membrane protein DUF6
  misc_feature (1)..(255): Homolog of NCBI NO: 7546829 NR Description: phosphate/phosphoenolpyruvate translocator
  misc_feature (1)..(255): Homolog of NCBI NO: 1778141 NR Description: phosphate/phosphoenolpyruvate translocator
  misc_feature (1)..(255): Homolog of NCBI NO: 15242801 NR Description: phosphate/phosphoenolpyruvate translocator
  misc_feature (1)..(255): Homolog of NCBI NO: 7489170 NR Description: phosphate/phosphoenolpyruvate translocator
  misc_feature (1)..(253): Homolog of NCBI NO: 7489171 NR Description: phosphate/phosphoenolpyruvate translocator
  misc_feature (1)..(255): Homolog of NCBI NO: 1706110 NR Description: Triose phosphate/phosphate translocator,
  misc_feature (1)..(255): Homolog of NCBI NO: 29647427 NR Description: putative phosphoenolpyruvate/phosphate
  misc_feature (1)..(255): Homolog of NCBI NO: 13991929 NR Description: phosphoenolpyruvate/phosphate translocator [Oryza
  misc_feature (1)..(255): Homolog of NCBI NO: 7489743 NR Description: glucose-6-phosphate/phosphate-translocator
  misc_feature (1)..(255): Homolog of NCBI NO: 7489742 NR Description: glucose-6-phosphate/phosphate-translocator
MWITGILKRPKISGAQLFAILPLAIVHTMGNLFTNMSLGKVAVSFTHTIKAMEPFFSVLLSAIFLGELPTPWVVLSLLPIVGGVALASLTEASFNWAGFWSAMASNVTFQSRNVLSKKLMVKKEESLDNINLFSIITVMSFFLLAPVTLLTEGVKVSPAVLQSAGLNLKQIYTRSLIAACCFHAYQQVSYMILARVSPVTHSVGNCVKRVVVIVTSVLFFRTPVSPINSLGTGIALAGVFLYSQLKRLKPKPKAA

SEQ ID NO: 3243 - protein, 227 aa, Zea mays subsp. mays
  peptide (1)..(227): Ceres Seq. ID no. 12367599
  misc_feature (1)..(61): Pfam Name: Integral membrane protein DUF6 Pfam Description: Integral membrane protein DUF6
  misc_feature (1)..(227): Homolog of NCBI NO: 7546829 NR Description: phosphate/phosphoenolpyruvate translocator
  misc_feature (1)..(227): Homolog of NCBI NO: 1778141 NR Description: phosphate/phosphoenolpyruvate translocator
  misc_feature (1)..(227): Homolog of NCBI NO: 15242801 NR Description: phosphate/phosphoenolpyruvate translocator
  misc_feature (1)..(227): Homolog of NCBI NO: 7489170 NR Description: phosphate/phosphoenolpyruvate translocator
  misc_feature (1)..(225): Homolog of NCBI NO: 7489171 NR Description: phosphate/phosphoenolpyruvate translocator
  misc_feature (1)..(227): Homolog of NCBI NO: 1706110 NR Description: Triose phosphate/phosphate translocator,
  misc_feature (1)..(227): Homolog of NCBI NO: 29647427 NR Description: putative phosphoenolpyruvate/phosphate
  misc_feature (1)..(227): Homolog of NCBI NO: 13991929 NR Description: phosphoenolpyruvate/phosphate translocator [Oryza
  misc_feature (1)..(227): Homolog of NCBI NO: 7489743 NR Description: glucose-6-phosphate/phosphate-translocator
  misc_feature (1)..(227): Homolog of NCBI NO: 7489742 NR Description: glucose-6-phosphate/phosphate-translocator
MGNLFTNMSLGKVAVSFTHTIKAMEPFFSVLLSAIFLGELPTPWVVLSLLPIVGGVALASLTEASFNWAGFWSAMASNVTFQSRNVLSKKLMVKKEESLDNINLFSIITVMSFFLLAPVTLLTEGVKVSPAVLQSAGLNLKQIYTRSLIAACCFHAYQQVSYMILARVSPVTHSVGNCVKRVVVIVTSVLFFRTPVSPINSLGTGIALAGVFLYSQLKRLKPKPKAA

SEQ ID NO: 3244 - protein, 220 aa, Zea mays subsp. mays
  peptide (1)..(220): Ceres Seq. ID no. 12367600
  misc_feature (1)..(54): Pfam Name: Integral membrane protein DUF6 Pfam Description: Integral membrane protein DUF6
  misc_feature (1)..(220): Homolog of NCBI NO: 7546829 NR Description: phosphate/phosphoenolpyruvate translocator
  misc_feature (1)..(220): Homolog of NCBI NO: 1778141 NR Description: phosphate/phosphoenolpyruvate translocator
  misc_feature (1)..(220): Homolog of NCBI NO: 15242801 NR Description: phosphate/phosphoenolpyruvate translocator
  misc_feature (1)..(220): Homolog of NCBI NO: 7489170 NR Description: phosphate/phosphoenolpyruvate translocator
  misc_feature (1)..(218): Homolog of NCBI NO: 7489171 NR Description: phosphate/phosphoenolpyruvate translocator
  misc_feature (1)..(220): Homolog of NCBI NO: 1706110 NR Description: Triose phosphate/phosphate translocator,
  misc_feature (1)..(220): Homolog of NCBI NO: 29647427 NR Description: putative phosphoenolpyruvate/phosphate
  misc_feature (1)..(220): Homolog of NCBI NO: 13991929 NR Description: phosphoenolpyruvate/phosphate translocator [Oryza
  misc_feature (1)..(220): Homolog of NCBI NO: 7489743 NR Description: glucose-6-phosphate/phosphate-translocator
  misc_feature (1)..(220): Homolog of NCBI NO: 7489742 NR Description: glucose-6-phosphate/phosphate-translocator
MSLGKVAVSFTHTIKAMEPFFSVLLSAIFLGELPTPWVVLSLLPIVGGVALASLTEASFNWAGFWSAMASNVTFQSRNVLSKKLMVKKEESLDNINLFSIITVMSFFLLAPVTLLTEGVKVSPAVLQSAGLNLKQIYTRSLIAACCFHAYQQVSYMILARVSPVTHSVGNCVKRVVVIVTSVLFFRTPVSPINSLGTGIALAGVFLYSQLKRLKPKPKAA

SEQ ID NO: 3245 - DNA, 1225 bp, Zea mays subsp. mays
  misc_feature (1)..(1225): Ceres Seq. ID no. 13499081
  misc_feature: MA Experiment ID: 108528 Result: Up-regulated in Transcription
  misc_feature: MA Experiment 108528 PARAMETER Experiment Name: Zm_Imbibed_Seeds_P Parameter: Age (day) Value: 5 vs. 2
  misc_feature: MA Experiment 108528 PARAMETER Experiment Name: Zm_Imbibed_Seeds_P Parameter: Organism Value: Zea mays
  misc_feature: MA Experiment 108528 PARAMETER Experiment Name: Zm_Imbibed_Seeds_P Parameter: Plant Line Value: 35A19
  misc_feature: MA Experiment 108528 PARAMETER Experiment Name: Zm_Imbibed_Seeds_P Parameter: Tissue Value: Aerial vs. Embryo
  misc_feature: MA Experiment ID: 108530 Result: Up-regulated in Transcription
  misc_feature: MA Experiment 108530 PARAMETER Experiment Name: Zm_Imbibed_Seeds_P Parameter: Age (day) Value: 6 vs. 2
  misc_feature: MA Experiment 108530 PARAMETER Experiment Name: Zm_Imbibed_Seeds_P Parameter: Organism Value: Zea mays
  misc_feature: MA Experiment 108530 PARAMETER Experiment Name: Zm_Imbibed_Seeds_P Parameter: Plant Line Value: 35A19
  misc_feature: MA Experiment 108530 PARAMETER Experiment Name: Zm_Imbibed_Seeds_P Parameter: Tissue Value: Aerial vs. Embryo
  misc_feature: MA Experiment ID: 108545 Result: Up-regulated in Transcription
  misc_feature: MA Experiment 108545 PARAMETER Experiment Name: Zm_Imbibed_Seeds_P Parameter: Age (day) Value: 3 vs. 2
  misc_feature: MA Experiment 108545 PARAMETER Experiment Name: Zm_Imbibed_Seeds_P Parameter: Organism Value: Zea mays
  misc_feature: MA Experiment 108545 PARAMETER Experiment Name: Zm_Imbibed_Seeds_P Parameter: Plant Line Value: 35A19
  misc_feature: MA Experiment 108545 PARAMETER Experiment Name: Zm_Imbibed_Seeds_P Parameter: Tissue Value: Aerial vs. Embryo
  misc_feature: MA Experiment ID: 108547 Result: Up-regulated in Transcription
  misc_feature: MA Experiment 108547 PARAMETER Experiment Name: Zm_Imbibed_Seeds_P Parameter: Age (day) Value: 4 vs. 2
  misc_feature: MA Experiment 108547 PARAMETER Experiment Name: Zm_Imbibed_Seeds_P Parameter: Organism Value: Zea mays
  misc_feature: MA Experiment 108547 PARAMETER Experiment Name: Zm_Imbibed_Seeds_P Parameter: Plant Line Value: 35A19
  misc_feature: MA Experiment 108547 PARAMETER Experiment Name: Zm_Imbibed_Seeds_P Parameter: Tissue Value: Aerial vs. Embryo
  misc_feature: MA Experiment ID: 20000480 Result: Down-regulated in Transcription
  misc_feature: MA Experiment 20000480 PARAMETER Experiment Name: Zm_Drought_P Parameter: Age (day) Value: 11
  misc_feature: MA Experiment 20000480 PARAMETER Experiment Name: Zm_Drought_P Parameter: Organism Value: Zea mays
  misc_feature: MA Experiment 20000480 PARAMETER Experiment Name: Zm_Drought_P Parameter: Plant Line Value: 35A19
  misc_feature: MA Experiment 20000480 PARAMETER Experiment Name: Zm_Drought_P Parameter: Timepoint (hr) Value: 72
  misc_feature: MA Experiment 20000480 PARAMETER Experiment Name: Zm_Drought_P Parameter: Tissue Value: Aerial
  misc_feature: MA Experiment 20000480 PARAMETER Experiment Name: Zm_Drought_P Parameter: Treatment Value: Drought vs. No Drought
aattttatgaccgtcgaaaaccaaaatttagataggccacccaaatccaggtgcaaatcccaacctccctccctcccaggccccctccccacctccacctccaggcaccactggtcccacctcctcacctgcgaggatgctgctcgtgagtcaggcagcgaacggctccctctccgcgcggcgctgccgtcgaagccgccggggccgtccaccaccaacccctacccgctcttcgccaaccctcgcctcctgcgccgccgcctggcgctctccggcgntggcgccgaccaagccccgcgccgcgccgcgccgaccccagccgccgcgggcgagggcccctccgcctcctccaccgaggacccggtccttgtccgcgtcnccgacgacggcgtgccgctcgagggcgtcatccagattgagaagcccggggatgcggccgccgagtccaagctcgtctcctacgcgaagctgggtcttctggccggcggggacgtgttctgccttctgctgttctctgcgattggaaggttcagccatggcctgcccgtcctcgacgccgagacgttcaagacggccgaccccttcattgctgagtggctgctgagcgcctaccttcttggcggatttggcgatgatgccaaagggcgcaatggcgtcggaagcgcggttatcaccgcagctaaatcatgggctgttgggataccgttgggacttgctatccgagcagtgacgtctggtcatcttccaccaactccttttatcttggtaaccatgggaagtacaggggtcttgttaactgcatggcgtgctttggtatcacaactgttttccaaccagcaaaagcagcaggatgatgtctaccggcgtggaagtccttttgagctttttgagctactcacatcgctggtgcggaggtggtgacatctgaaggctgaagcctatagaaggtaagaagggcattgttccgctctggtatccgcaatcatcaggttcagccatctgtgtctattgtgtaagtacaattttgaaggtgaagaagagcaggctaaaacctagtttggagcatttgccgaacccaaaaaaaatgtttggcaataacacgcccgcgatgttggtttagtatattatattatattcataagatgtactcatattcctgatcttccacttgtaaaattgtatccagcttaacaaatcctaatcgataagaccgttgcctcttgtt

SEQ ID NO: 3246 - protein, 306 aa, Zea mays subsp. mays
  peptide (1)..(306): Ceres Seq. ID no. 13499082
  misc_feature (152)..(269): Homolog of NCBI NO: 22970530 NR Description: hypothetical protein [Chloroflexus aurantiacus]
  misc_feature (58)..(304): Homolog of NCBI NO: 25405875 NR Description: protein F27F5.3 [imported] - Arabidopsis thaliana
  misc_feature (58)..(306): Homolog of NCBI NO: 18401414 NR Description: expressed protein [Arabidopsis thaliana]
  misc_feature (41)..(306): Homolog of NCBI NO: 28273393 NR Description: unknown protein [Oryza sativa (japonica
  misc_feature (93)..(93): Xaa is any aa, unknown or other
  misc_feature (127)..(127): Xaa is any aa, unknown or other
NFMTVENQNLDRPPKSRCKSQPPSLPGPLPTSTSRHHWSHLLTCEDAARESGSERLPLRAALPSKPPGPSTTNPYPLFANPRLLRRRLALSGXGADQAPRRAAPTPAAAGEGPSASSTEDPVLVRVXDDGVPLEGVIQIEKPGDAAAESKLVSYAKLGLLAGGDVFCLLLFSAIGRFSHGLPVLDAETFKTADPFIAEWLLSAYLLGGFGDDAKGRNGVGSAVITAAKSWAVGIPLGLAIRAVTSGHLPPTPFILVTMGSTGVLLTAWRALVSQLFSNQQKQQDDVYRRGSPFELFELLTSLVRRW

SEQ ID NO: 3247 - protein, 304 aa, Zea mays subsp. mays
  peptide (1)..(304): Ceres Seq. ID no. 13499083
  misc_feature (56)..(302): Homolog of NCBI NO: 25405875 NR Description: protein F27F5.3 [imported] - Arabidopsis thaliana
  misc_feature (56)..(304): Homolog of NCBI NO: 18401414 NR Description: expressed protein [Arabidopsis thaliana]
  misc_feature (39)..(304): Homolog of NCBI NO: 28273393 NR Description: unknown protein [Oryza sativa (japonica
  misc_feature (150)..(267): Homolog of NCBI NO: 22970530 NR Description: hypothetical protein [Chloroflexus aurantiacus]
  misc_feature (91)..(91): Xaa is any aa, unknown or other
  misc_feature (125)..(125): Xaa is any aa, unknown or other
MTVENQNLDRPPKSRCKSQPPSLPGPLPTSTSRHHWSHLLTCEDAARESGSERLPLRAALPSKPPGPSTTNPYPLFANPRLLRRRLALSGXGADQAPRRAAPTPAAAGEGPSASSTEDPVLVRVXDDGVPLEGVIQIEKPGDAAAESKLVSYAKLGLLAGGDVFCLLLFSAIGRFSHGLPVLDAETFKTADPFIAEWLLSAYLLGGFGDDAKGRNGVGSAVITAAKSWAVGIPLGLAIRAVTSGHLPPTPFILVTMGSTGVLLTAWRALVSQLFSNQQKQQDDVYRRGSPFELFELLTSLVRRW

SEQ ID NO: 3248 - protein, 155 aa, Zea mays subsp. mays
  peptide (1)..(155): Ceres Seq. ID no. 13499084
  misc_feature (1)..(108): Pfam Name: Formin Homology 2 Domain Pfam Description: Formin Homology 2 Domain
  misc_feature (1)..(109): Homolog of NCBI NO: 1076205 NR Description: hypothetical protein WP6 - Chlamydomonas
  misc_feature (1)..(110): Homolog of NCBI NO: 6523547 NR Description: hydroxyproline-rich glycoprotein DZ-HRGP
  misc_feature (1)..(108): Homolog of NCBI NO: 30387315 NR Description: unknown [Choristoneura fumiferana MNPV]
  misc_feature (1)..(147): Homolog of NCBI NO: 25143299 NR Description: pre-mRNA splicing SR protein related RSR-1 (68.2
  misc_feature (1)..(108): Homolog of NCBI NO: 6523547 NR Description: hydroxyproline-rich glycoprotein DZ-HRGP
  misc_feature (1)..(147): Homolog of NCBI NO: 25143299 NR Description: pre-mRNA splicing SR protein related RSR-1 (68.2
  misc_feature (1)..(109): Homolog of NCBI NO: 15419013 NR Description: subtilisin-like protein [Toxoplasma gondii]
  misc_feature (1)..(155): Homolog of NCBI NO: 40787890 NR Description: UL36 very large tegument protein [Bovine
  misc_feature (1)..(155): Homolog of NCBI NO: 23017082 NR Description: hypothetical protein [Thermobifida fusca]
  misc_feature (1)..(108): Homolog of NCBI NO: 2429362 NR Description: proline rich protein [Santalum album]
  misc_feature (48)..(48): Xaa is any aa, unknown or other
  misc_feature (81)..(81): Xaa is any aa, unknown or other
MLLVSQAANGSLSARRCRRSRRGRPPPTPTRSSPTLASCAAAWRSPAXAPTKPRAAPRRPQPPRARAPPPPPPRTRSLSAXPTTACRSRASSRLRSPGMRPPSPSSSPTRSWVFWPAGTCSAFCCSLRLEGSAMACPSSTPRRSRRPTPSLLSGC

SEQ ID NO: 3249 - DNA, 925 bp, Zea mays subsp. mays
  misc_feature (1)..(925): Ceres Seq. ID no. 12351451
  misc_feature: MA Experiment ID: 108527 Result: Down-regulated in Transcription
  misc_feature: MA Experiment 108527 PARAMETER Experiment Name: Zm_5mM_NO_P Parameter: Age (day) Value: 8
  misc_feature: MA Experiment 108527 PARAMETER Experiment Name: Zm_5mM_NO_P Parameter: Organism Value: Zea mays
  misc_feature: MA Experiment 108527 PARAMETER Experiment Name: Zm_5mM_NO_P Parameter: Plant Line Value: 35A19
  misc_feature: MA Experiment 108527 PARAMETER Experiment Name: Zm_5mM_NO_P Parameter: Timepoint (hr) Value: 6
  misc_feature: MA Experiment 108527 PARAMETER Experiment Name: Zm_5mM_NO_P Parameter: Tissue Value: Aerial
  misc_feature: MA Experiment 108527 PARAMETER Experiment Name: Zm_5mM_NO_P Parameter: Treatment Value: 5mM NO vs. No Treatment
  misc_feature: MA Experiment ID: 108528 Result: Up-regulated in Transcription
  misc_feature: MA Experiment 108528 PARAMETER Experiment Name: Zm_Imbibed_Seeds_P Parameter: Age (day) Value: 5 vs. 2
  misc_feature: MA Experiment 108528 PARAMETER Experiment Name: Zm_Imbibed_Seeds_P Parameter: Organism Value: Zea mays
  misc_feature: MA Experiment 108528 PARAMETER Experiment Name: Zm_Imbibed_Seeds_P Parameter: Plant Line Value: 35A19
  misc_feature: MA Experiment 108528 PARAMETER Experiment Name: Zm_Imbibed_Seeds_P Parameter: Tissue Value: Aerial vs. Embryo
  misc_feature: MA Experiment ID: 108530 Result: Up-regulated in Transcription
  misc_feature: MA Experiment 108530 PARAMETER Experiment Name: Zm_Imbibed_Seeds_P Parameter: Age (day) Value: 6 vs. 2
  misc_feature: MA Experiment 108530 PARAMETER Experiment Name: Zm_Imbibed_Seeds_P Parameter: Organism Value: Zea mays
  misc_feature: MA Experiment 108530 PARAMETER Experiment Name: Zm_Imbibed_Seeds_P Parameter: Plant Line Value: 35A19
  misc_feature: MA Experiment 108530 PARAMETER Experiment Name: Zm_Imbibed_Seeds_P Parameter: Tissue Value: Aerial vs. Embryo
  misc_feature: MA Experiment ID: 108534 Result: Down-regulated in Transcription
  misc_feature: MA Experiment 108534 PARAMETER Experiment Name: Zm_4deg_Cold_P Parameter: Age (hr) Value: 8
  misc_feature: MA Experiment 108534 PARAMETER Experiment Name: Zm_4deg_Cold_P Parameter: Organism Value: Zea mays
  misc_feature: MA Experiment 108534 PARAMETER Experiment Name: Zm_4deg_Cold_P Parameter: Plant Line Value: 35A19
  misc_feature: MA Experiment 108534 PARAMETER Experiment Name: Zm_4deg_Cold_P Parameter: Temperature (deg C) Value: 4 vs. 22
  misc_feature: MA Experiment 108534 PARAMETER Experiment Name: Zm_4deg_Cold_P Parameter: Timepoint (hr) Value: 6
  misc_feature: MA Experiment 108534 PARAMETER Experiment Name: Zm_4deg_Cold_P Parameter: Tissue Value: Aerial
  misc_feature: MA Experiment ID: 108535 Result: Up-regulated in Transcription
  misc_feature: MA Experiment 108535 PARAMETER Experiment Name: Zm_Meristem_P Parameter: Age (day) Value: 8
  misc_feature: MA Experiment 108535 PARAMETER Experiment Name: Zm_Meristem_P Parameter: Organism Value: Zea mays
  misc_feature: MA Experiment 108535 PARAMETER Experiment Name: Zm_Meristem_P Parameter: Plant Line Value: 35A19
  misc_feature: MA Experiment 108535 PARAMETER Experiment Name: Zm_Meristem_P Parameter: Tissue Value: Root Meristem vs. Above Root Meristem
  misc_feature: MA Experiment ID: 108543 Result: Up-regulated in Transcription
  misc_feature: MA Experiment ID: 108545 Result: Up-regulated in Transcription
  misc_feature: MA Experiment 108545 PARAMETER Experiment Name: Zm_Imbibed_Seeds_P Parameter: Age (day) Value: 3 vs. 2
  misc_feature: MA Experiment 108545 PARAMETER Experiment Name: Zm_Imbibed_Seeds_P Parameter: Organism Value: Zea mays
  misc_feature: MA Experiment 108545 PARAMETER Experiment Name: Zm_Imbibed_Seeds_P Parameter: Plant Line Value: 35A19
  misc_feature: MA Experiment 108545 PARAMETER Experiment Name: Zm_Imbibed_Seeds_P Parameter: Tissue Value: Aerial vs. Embryo
  misc_feature: MA Experiment ID: 108547 Result: Up-regulated in Transcription
  misc_feature: MA Experiment 108547 PARAMETER Experiment Name: Zm_Imbibed_Seeds_P Parameter: Age (day) Value: 4 vs. 2
  misc_feature: MA Experiment 108547 PARAMETER Experiment Name: Zm_Imbibed_Seeds_P Parameter: Organism Value: Zea mays
  misc_feature: MA Experiment 108547 PARAMETER Experiment Name: Zm_Imbibed_Seeds_P Parameter: Plant Line Value: 35A19
  misc_feature: MA Experiment 108547 PARAMETER Experiment Name: Zm_Imbibed_Seeds_P Parameter: Tissue Value: Aerial vs. Embryo
  misc_feature: MA Experiment ID: 108556 Result: Down-regulated in Transcription
  misc_feature: MA Experiment 108556 PARAMETER Experiment Name: Zm_Drought_P Parameter: Age (day) Value: 9
  misc_feature: MA Experiment 108556 PARAMETER Experiment Name: Zm_Drought_P Parameter: Organism Value: Zea mays
  misc_feature: MA Experiment 108556 PARAMETER Experiment Name: Zm_Drought_P Parameter: Plant Line Value: 35A19
  misc_feature: MA Experiment 108556 PARAMETER Experiment Name: Zm_Drought_P Parameter: Timepoint (hr) Value: 24
  misc_feature: MA Experiment 108556 PARAMETER Experiment Name: Zm_Drought_P Parameter: Tissue Value: Aerial
  misc_feature: MA Experiment 108556 PARAMETER Experiment Name: Zm_Drought_P Parameter: Treatment Value: Drought vs. No Drought
  misc_feature: MA Experiment ID: 108559 Result: Down-regulated in Transcription
  misc_feature: MA Experiment 108559 PARAMETER Experiment Name: Zm_5mM_NO_P Parameter: Age (day) Value: 8
  misc_feature: MA Experiment 108559 PARAMETER Experiment Name: Zm_5mM_NO_P Parameter: Organism Value: Zea mays
  misc_feature: MA Experiment 108559 PARAMETER Experiment Name: Zm_5mM_NO_P Parameter: Plant Line Value: 35A19
  misc_feature: MA Experiment 108559 PARAMETER Experiment Name: Zm_5mM_NO_P Parameter: Timepoint (hr) Value: 12
  misc_feature: MA Experiment 108559 PARAMETER Experiment Name: Zm_5mM_NO_P Parameter: Tissue Value: Aerial
  misc_feature: MA Experiment 108559 PARAMETER Experiment Name: Zm_5mM_NO_P Parameter: Treatment Value: 5mM NO vs. No Treatment
  misc_feature: MA Experiment ID: 20000626 Result: Down-regulated in Transcription
  misc_feature: MA Experiment 20000626 PARAMETER Experiment Name: Zm_Herbicide-Treatments_P Parameter: Timepoint (hr) Value: 12
  misc_feature: MA Experiment 20000626 PARAMETER Experiment Name: Zm_Herbicide-Treatments_P Parameter: Tissue Value: Aerial
  misc_feature: MA Experiment 20000626 PARAMETER Experiment Name: Zm_Herbicide-Treatments_P Parameter: Treatment Value: Roundup vs. No Treatment
gccagttcacctccgcctccgctcctcccctccccctcccgtcctgccatggccaccgcagcacgcgccctcgtcgccgcacgcccggcacggccgctgctgccgtctcggcgcctcccgtcctcctcttccatccgtcccgcgcggcaacgtgctggcgtcgggtgcgtccgctgcatggctcggcggccggattccacctattccccgctgcgttcgggccagggcggtgaccgtgcaccgactgaaatggcgcctctgttccctggctgcgactacgagcactggctcatcgtcatggacaagcccgggggcgagggcgccaccaagcagcaaatgatagattgttacatccagacccttgcccaggtggtagggagtgaagaggaggcgaagaagaggatatataatgtgtcctgcgagcgctattttggattcggatgcgaaattgacgaggagacctcccaacaaactcgaaggccttccaggggttctttttgtgcttcctgactcttacgttgatgctgagaacaaggattatggtgctgagttatttgtgaacggtgaaatcgttcagcgatctccagaaaggcagagaagggtggagccagtgcctcagagagctcaggatcgaccacggtacagtgaccggacccgctatgtgaagcggagggagaaccaatcttaccagagatgatgtttccgtctctgaagatgtaaaatgtcacggtttccacaagtgtccaaatgcggtactgaagatgcagcagcaactccccactactcatatgagaatggcatccgttctgtttgccgcgcattttaagctgtatatgcttattatgcatttgggcttgtacctcagtcgatatgaacgatgtatcctttgaactaacgcattataatttttgaaaccgttttagcc

SEQ ID NO: 3250 - protein, 169 aa, Zea mays subsp. mays
  peptide (1)..(169): Ceres Seq. ID no. 12351452
  misc_feature (8)..(157): Homolog of NCBI NO: 6014904 NR Description: DAG PROTEIN, CHLOROPLAST PRECURSOR
  misc_feature (13)..(157): Homolog of NCBI NO: 38636775 NR Description: putative DAG protein [Oryza sativa (japonica
  misc_feature (33)..(155): Homolog of NCBI NO: 2440029 NR Description: DAL1 protein [Arabidopsis thaliana]
  misc_feature (38)..(155): Homolog of NCBI NO: 25370552 NR Description: DAG protein homolog [imported] - Arabidopsis
  misc_feature (33)..(155): Homolog of NCBI NO: 21617909 NR Description: plastid protein [Arabidopsis thaliana]
  misc_feature (33)..(155): Homolog of NCBI NO: 15226108 NR Description: plastid protein
  misc_feature (57)..(157): Homolog of NCBI NO: 15226934 NR Description: unknown protein
  misc_feature (57)..(157): Homolog of NCBI NO: 15223247 NR Description: plastid protein, putative
  misc_feature (16)..(157): Homolog of NCBI NO: 34897972 NR Description: putative plastid protein [Oryza sativa (japonica
  misc_feature (18)..(157): Homolog of NCBI NO: 38344141 NR Description: OSJNBa0041A02.8 [Oryza sativa (japonica
ASSPPPPLLPSPSRPAMATAARALVAARPARPLLPSRRLPSSSSIRPARQRAGVGCVRCMARRPDSTYSPLRSGQGGDRAPTEMAPLFPGCDYEHWLIVMDKPGGEGATKQQMIDCYIQTLAQVVGSEEEAKKRIYNVSCERYFGFGCEIDEETSQQTRRPSRGSFCAS

SEQ ID NO: 3251 - protein, 153 aa, Zea mays subsp. mays
  peptide (1)..(153): Ceres Seq. ID no. 12351453
  misc_feature (1)..(141): Homolog of NCBI NO: 6014904 NR Description: DAG PROTEIN, CHLOROPLAST PRECURSOR
  misc_feature (1)..(141): Homolog of NCBI NO: 38636775 NR Description: putative DAG protein [Oryza sativa (japonica
  misc_feature (17)..(139): Homolog of NCBI NO: 2440029 NR Description: DAL1 protein [Arabidopsis thaliana]
  misc_feature (22)..(139): Homolog of NCBI NO: 25370552 NR Description: DAG protein homolog [imported] - Arabidopsis
  misc_feature (17)..(139): Homolog of NCBI NO: 21617909 NR Description: plastid protein [Arabidopsis thaliana]
  misc_feature (17)..(139): Homolog of NCBI NO: 15226108 NR Description: plastid protein
  misc_feature (41)..(141): Homolog of NCBI NO: 15226934 NR Description: unknown protein
  misc_feature (41)..(141): Homolog of NCBI NO: 15223247 NR Description: plastid protein, putative
  misc_feature (1)..(141): Homolog of NCBI NO: 34897972 NR Description: putative plastid protein [Oryza sativa (japonica
  misc_feature (2)..(141): Homolog of NCBI NO: 38344141 NR Description: OSJNBa0041A02.8 [Oryza sativa (japonica
MATAARALVAARPARPLLPSRRLPSSSSIRPARQRAGVGCVRCMARRPDSTYSPLRSGQGGDRAPTEMAPLFPGCDYEHWLIVMDKPGGEGATKQQMIDCYIQTLAQVVGSEEEAKKRIYNVSCERYFGFGCEIDEETSQQTRRPSRGSFCAS

SEQ ID NO: 3252 - protein, 112 aa, Zea mays subsp. mays
  peptide (1)..(112): Ceres Seq. ID no. 12351454
PVHLRLRSSPPPPVLPWPPQHAPSSPHARHGRCCRLGASRPPLPSVPRGNVLASGASAAWLGGRIPPIPRCVRARAVTVHRLKWRLCSLAATTSTGSSSWTSPGARAPPSSK

SEQ ID NO: 3253 - DNA, 748 bp, Zea mays subsp. mays
  misc_feature (1)..(748): Ceres Seq. ID no. 12405725
  misc_feature: MA Experiment ID: 108504 Result: Down-regulated in Transcription
  misc_feature: MA Experiment 108504 PARAMETER Experiment Name: Zm_Drought_P Parameter: Age (day) Value: 8
  misc_feature: MA Experiment 108504 PARAMETER Experiment Name: Zm_Drought_P Parameter: Organism Value: Zea mays
  misc_feature: MA Experiment 108504 PARAMETER Experiment Name: Zm_Drought_P Parameter: Plant Line Value: 35A19
  misc_feature: MA Experiment 108504 PARAMETER Experiment Name: Zm_Drought_P Parameter: Timepoint (hr) Value: 12
  misc_feature: MA Experiment 108504 PARAMETER Experiment Name: Zm_Drought_P Parameter: Tissue Value: Aerial
  misc_feature: MA Experiment 108504 PARAMETER Experiment Name: Zm_Drought_P Parameter: Treatment Value: Drought vs. No Drought
  misc_feature: MA Experiment ID: 108522 Result: Down-regulated in Transcription
  misc_feature: MA Experiment 108522 PARAMETER Experiment Name: Zm_42deg_Heat_P Parameter: Age (day) Value: 8
  misc_feature: MA Experiment 108522 PARAMETER Experiment Name: Zm_42deg_Heat_P Parameter: Organism Value: Zea mays
  misc_feature: MA Experiment 108522 PARAMETER Experiment Name: Zm_42deg_Heat_P Parameter: Plant Line Value: 35A19
  misc_feature: MA Experiment 108522 PARAMETER Experiment Name: Zm_42deg_Heat_P Parameter: Temperature (deg C) Value: 42 vs. 22
  misc_feature: MA Experiment 108522 PARAMETER Experiment Name: Zm_42deg_Heat_P Parameter: Timepoint (hr) Value: 1
  misc_feature: MA Experiment 108522 PARAMETER Experiment Name: Zm_42deg_Heat_P Parameter: Tissue Value: Aerial
  misc_feature: MA Experiment ID: 108528 Result: Down-regulated in Transcription
  misc_feature: MA Experiment 108528 PARAMETER Experiment Name: Zm_Imbibed_Seeds_P Parameter: Age (day) Value: 5 vs. 2
  misc_feature: MA Experiment 108528 PARAMETER Experiment Name: Zm_Imbibed_Seeds_P Parameter: Organism Value: Zea mays
  misc_feature: MA Experiment 108528 PARAMETER Experiment Name: Zm_Imbibed_Seeds_P Parameter: Plant Line Value: 35A19
  misc_feature: MA Experiment 108528 PARAMETER Experiment Name: Zm_Imbibed_Seeds_P Parameter: Tissue Value: Aerial vs. Embryo
  misc_feature: MA Experiment ID: 108529 Result: Down-regulated in Transcription
  misc_feature: MA Experiment 108529 PARAMETER Experiment Name: Zm_Imbibed_Seeds_P Parameter: Age (day) Value: 5 vs. 2
  misc_feature: MA Experiment 108529 PARAMETER Experiment Name: Zm_Imbibed_Seeds_P Parameter: Organism Value: Zea mays
  misc_feature: MA Experiment 108529 PARAMETER Experiment Name: Zm_Imbibed_Seeds_P Parameter: Plant Line Value: 35A19
  misc_feature: MA Experiment 108529 PARAMETER Experiment Name: Zm_Imbibed_Seeds_P Parameter: Tissue Value: Roots vs. Embryo
  misc_feature: MA Experiment ID: 108530 Result: Down-regulated in Transcription
  misc_feature: MA Experiment 108530 PARAMETER Experiment Name: Zm_Imbibed_Seeds_P Parameter: Age (day) Value: 6 vs. 2
  misc_feature: MA Experiment 108530 PARAMETER Experiment Name: Zm_Imbibed_Seeds_P Parameter: Organism Value: Zea mays
  misc_feature: MA Experiment 108530 PARAMETER Experiment Name: Zm_Imbibed_Seeds_P Parameter: Plant Line Value: 35A19
  misc_feature: MA Experiment 108530 PARAMETER Experiment Name: Zm_Imbibed_Seeds_P Parameter: Tissue Value: Aerial vs. Embryo
  misc_feature: MA Experiment ID: 108535 Result: Up-regulated in Transcription
  misc_feature: MA Experiment 108535 PARAMETER Experiment Name: Zm_Meristem_P Parameter: Age (day) Value: 8
  misc_feature: MA Experiment 108535 PARAMETER Experiment Name: Zm_Meristem_P Parameter: Organism Value: Zea mays
  misc_feature: MA Experiment 108535 PARAMETER Experiment Name: Zm_Meristem_P Parameter: Plant Line Value: 35A19
  misc_feature: MA Experiment 108535 PARAMETER Experiment Name: Zm_Meristem_P Parameter: Tissue Value: Root Meristem vs. Above Root Meristem
  misc_feature: MA Experiment ID: 108544 Result: Down-regulated in Transcription
  misc_feature: MA Experiment ID: 108556 Result: Down-regulated in Transcription
  misc_feature: MA Experiment 108556 PARAMETER Experiment Name: Zm_Drought_P Parameter: Age (day) Value: 9
  misc_feature: MA Experiment 108556 PARAMETER Experiment Name: Zm_Drought_P Parameter: Organism Value: Zea mays
  misc_feature: MA Experiment 108556 PARAMETER Experiment Name: Zm_Drought_P Parameter: Plant Line Value: 35A19
  misc_feature: MA Experiment 108556 PARAMETER Experiment Name: Zm_Drought_P Parameter: Timepoint (hr) Value: 24
  misc_feature: MA Experiment 108556 PARAMETER Experiment Name: Zm_Drought_P Parameter: Tissue Value: Aerial
  misc_feature: MA Experiment 108556 PARAMETER Experiment Name: Zm_Drought_P Parameter: Treatment Value: Drought vs. No Drought
  misc_feature: MA Experiment ID: 20000108 Result: Up-regulated in Transcription
  misc_feature: MA Experiment 20000108 PARAMETER Experiment Name: Zm_Root-Tips_P Parameter: Age (day) Value: 12
  misc_feature: MA Experiment 20000108 PARAMETER Experiment Name: Zm_Root-Tips_P Parameter: Organism Value: Zea mays
  misc_feature: MA Experiment 20000108 PARAMETER Experiment Name: Zm_Root-Tips_P Parameter: Tissue Value: Root tips vs. Root mid region    35
  misc_feature: MA Experiment 20000108 PARAMETER Experiment Name: Zm_Root-Tips_P Parameter: Tissue Value: Root tips vs. Root mid region   Sequence Listing-Misc Features (4)
  misc_feature: MA Experiment ID: 20000478 Result: Down-regulated in Transcription
  misc_feature: MA Experiment 20000478 PARAMETER Experiment Name: Zm_5mM_SA_P Parameter: Age (day) Value: 11
  misc_feature: MA Experiment 20000478 PARAMETER Experiment Name: Zm_5mM_SA_P Parameter: Organism Value: Zea mays
  misc_feature: MA Experiment 20000478 PARAMETER Experiment Name: Zm_5mM_SA_P Parameter: Plant Line Value: 35A19
  misc_feature: MA Experiment 20000478 PARAMETER Experiment Name: Zm_5mM_SA_P Parameter: Timepoint (hr) Value: 72
  misc_feature: MA Experiment 20000478 PARAMETER Experiment Name: Zm_5mM_SA_P Parameter: Tissue Value: Aerial
  misc_feature: MA Experiment 20000478 PARAMETER Experiment Name: Zm_5mM_SA_P Parameter: Treatment Value: 5mM SA vs. No Treatment
  misc_feature: MA Experiment ID: 20000479 Result: Down-regulated in Transcription
  misc_feature: MA Experiment 20000479 PARAMETER Experiment Name: Zm_Drought_P Parameter: Age (day) Value: 10
  misc_feature: MA Experiment 20000479 PARAMETER Experiment Name: Zm_Drought_P Parameter: Organism Value: Zea mays
  misc_feature: MA Experiment 20000479 PARAMETER Experiment Name: Zm_Drought_P Parameter: Plant Line Value: 35A19
  misc_feature: MA Experiment 20000479 PARAMETER Experiment Name: Zm_Drought_P Parameter: Timepoint (hr) Value: 48
  misc_feature: MA Experiment 20000479 PARAMETER Experiment Name: Zm_Drought_P Parameter: Tissue Value: Aerial
  misc_feature: MA Experiment 20000479 PARAMETER Experiment Name: Zm_Drought_P Parameter: Treatment Value: Drought vs. No Drought
  misc_feature: MA Experiment ID: 20000480 Result: Down-regulated in Transcription
  misc_feature: MA Experiment 20000480 PARAMETER Experiment Name: Zm_Drought_P Parameter: Age (day) Value: 11
  misc_feature: MA Experiment 20000480 PARAMETER Experiment Name: Zm_Drought_P Parameter: Organism Value: Zea mays
  misc_feature: MA Experiment 20000480 PARAMETER Experiment Name: Zm_Drought_P Parameter: Plant Line Value: 35A19
  misc_feature: MA Experiment 20000480 PARAMETER Experiment Name: Zm_Drought_P Parameter: Timepoint (hr) Value: 72
  misc_feature: MA Experiment 20000480 PARAMETER Experiment Name: Zm_Drought_P Parameter: Tissue Value: Aerial
  misc_feature: MA Experiment 20000480 PARAMETER Experiment Name: Zm_Drought_P Parameter: Treatment Value: Drought vs. No Drought
  misc_feature: MA Experiment ID: 20000487 Result: Up-regulated in Transcription
  misc_feature: MA Experiment 20000487 PARAMETER Experiment Name: Zm_50mM_NH4NO3_L_to_H_P Parameter: Organism Value: Zea mays
  misc_feature: MA Experiment 20000487 PARAMETER Experiment Name: Zm_50mM_NH4NO3_L_to_H_P Parameter: Timepoint (hr) Value: 4
  misc_feature: MA Experiment 20000487 PARAMETER Experiment Name: Zm_50mM_NH4NO3_L_to_H_P Parameter: Tissue Value: Leaves
  misc_feature: MA Experiment 20000487 PARAMETER Experiment Name: Zm_50mM_NH4NO3_L_to_H_P Parameter: Treatment Value: 50mM NH4NO3 vs. 100mM Mannitol
  misc_feature: MA Experiment ID: 20000488 Result: Up-regulated in Transcription
  misc_feature: MA Experiment 20000488 PARAMETER Experiment Name: Zm_50mM_NH4NO3_L_to_H_P Parameter: Organism Value: Zea mays
  misc_feature: MA Experiment 20000488 PARAMETER Experiment Name: Zm_50mM_NH4NO3_L_to_H_P Parameter: Timepoint (hr) Value: 8
  misc_feature: MA Experiment 20000488 PARAMETER Experiment Name: Zm_50mM_NH4NO3_L_to_H_P Parameter: Tissue Value: Leaves
  misc_feature: MA Experiment 20000488 PARAMETER Experiment Name: Zm_50mM_NH4NO3_L_to_H_P Parameter: Treatment Value: 50mM NH4NO3 vs. 100mM Mannitol
  misc_feature: MA Experiment ID: 20000626 Result: Up-regulated in Transcription
  misc_feature: MA Experiment 20000626 PARAMETER Experiment Name: Zm_Herbicide-Treatments_P Parameter: Timepoint (hr) Value: 12
  misc_feature: MA Experiment 20000626 PARAMETER Experiment Name: Zm_Herbicide-Treatments_P Parameter: Tissue Value: Aerial
  misc_feature: MA Experiment 20000626 PARAMETER Experiment Name: Zm_Herbicide-Treatments_P Parameter: Treatment Value: Roundup vs. No Treatment
  misc_feature: MA Experiment ID: 20001608 Result: Up-regulated in Transcription
  misc_feature: MA Experiment 20001608 PARAMETER Experiment Name: Zm_50ppm_KNO3_L-to-H_P Parameter: Age (day) Value: 21
  misc_feature: MA Experiment 20001608 PARAMETER Experiment Name: Zm_50ppm_KNO3_L-to-H_P Parameter: Organism Value: Zea mays
  misc_feature: MA Experiment 20001608 PARAMETER Experiment Name: Zm_50ppm_KNO3_L-to-H_P Parameter: Plant Line Value: 35A19
  misc_feature: MA Experiment 20001608 PARAMETER Experiment Name: Zm_50ppm_KNO3_L-to-H_P Parameter: Timepoint (hr) Value: 48
  misc_feature: MA Experiment 20001608 PARAMETER Experiment Name: Zm_50ppm_KNO3_L-to-H_P Parameter: Tissue Value: Shoots
  misc_feature: MA Experiment 20001608 PARAMETER Experiment Name: Zm_50ppm_KNO3_L-to-H_P Parameter: Treatment Value: 50ppm KNO3 vs. 50ppm KCl
  misc_feature: MA Experiment ID: 20001612 Result: Up-regulated in Transcription
  misc_feature: MA Experiment 20001612 PARAMETER Experiment Name: Zm_50ppm_KNO3_L-to-H_P Parameter: Age (day) Value: 19
  misc_feature: MA Experiment 20001612 PARAMETER Experiment Name: Zm_50ppm_KNO3_L-to-H_P Parameter: Organism Value: Zea mays
  misc_feature: MA Experiment 20001612 PARAMETER Experiment Name: Zm_50ppm_KNO3_L-to-H_P Parameter: Plant Line Value: 35A19
  misc_feature: MA Experiment 20001612 PARAMETER Experiment Name: Zm_50ppm_KNO3_L-to-H_P Parameter: Timepoint (hr) Value: 8
  misc_feature: MA Experiment 20001612 PARAMETER Experiment Name: Zm_50ppm_KNO3_L-to-H_P Parameter: Tissue Value: Roots
  misc_feature: MA Experiment 20001612 PARAMETER Experiment Name: Zm_50ppm_KNO3_L-to-H_P Parameter: Treatment Value: 50ppm KNO3 vs. 50ppm KCl
aacttaaccactactccgcatctactgacgccgccgccgccgccgccgcgctctctccgtcggactagtcagagcatccgtcatggcgaagaaccccaaggtgttcttcgacatcctcatcggcaagtccaaggccgggcgggtcgtgatggagctcttcgccgacaaggtgcccaagacggccgagaacttccgctgcctgtgcacgggcgagaagggcctgggctccgcggggaagccgctgcactacaagggctcggccttccaccgcgtcatcccgggcttcatgtgccagggcggcgacttcacccggggcaacggcacgggcggcgagtccatctacggcgccaggttcgccgacgagaacttcaagctgcgccacacgggacccggcgtgctctccatggccaacgcggggcccgacaccaacggctcccagttcttcatctgcaccgcgcagacgccctggcttgacggcaagcacgtcgtcttcggcaaggtcgtcgatggctacgccgtcgtggacaagatggaggctgtcggttctcagtcaggtgccacggccgagagcgtacgcatcgaggactgcggccagcttgccgacgactgagggcctcgctgtgtccgattgtaaccaaatgaatgatcaataaatttctttctttcattcttttgtttctgtggagatggataccggcctgtagttaattaaccaatataaactatggatggatggggcggtgatttg

SEQ ID NO: 3254 - protein, 175 aa, Zea mays subsp. mays
  peptide (1)..(175): Ceres Seq. ID no. 12405726
  misc_feature (4)..(172): Homolog of NCBI NO: 118103 NR Description: Peptidyl-prolyl cis-trans isomerase (PPIase)
  misc_feature (4)..(173): Homolog of NCBI NO: 18376589 NR Description: putative cyclosporin A-binding protein [Picea
  misc_feature (4)..(173): Homolog of NCBI NO: 3334157 NR Description: Peptidyl-prolyl cis-trans isomerase (PPIase)
  misc_feature (4)..(172): Homolog of NCBI NO: 11270316 NR Description: peptidylprolyl isomerase (EC 5.2.1.8)
  misc_feature (5)..(172): Homolog of NCBI NO: 1480465 NR Description: cyclophilin Ovcyp-2
  misc_feature (1)..(173): Homolog of NCBI NO: 18076088 NR Description: cyclophilin [Ricinus communis]
  misc_feature (4)..(172): Homolog of NCBI NO: 11270314 NR Description: peptidylprolyl isomerase (EC 5.2.1.8) ATCYP4
  misc_feature (4)..(172): Homolog of NCBI NO: 15228814 NR Description: peptidylprolyl isomerase
  misc_feature (4)..(172): Homolog of NCBI NO: 1305457 NR Description: cytosolic cyclophilin [Arabidopsis thaliana]
  misc_feature (2)..(175): Homolog of NCBI NO: 1084454 NR Description: peptidylprolyl isomerase (EC 5.2.1.8) Cyp1 - rice
MAKNPKVFFDILIGKSKAGRVVMELFADKVPKTAENFRCLCTGEKGLGSAGKPLHYKGSAFHRVIPGFMCQGGDFTRGNGTGGESIYGARFADENFKLRHTGPGVLSMANAGPDTNGSQFFICTAQTPWLDGKHVVFGKVVDGYAVVDKMEAVGSQSGATAESVRIEDCGQLADD

SEQ ID NO: 3255 - protein, 157 aa, Zea mays subsp. mays
  peptide (1)..(157): Ceres Seq. ID no. 12405727
NLTTTPHLLTPPPPPPRSLRRTSQSIRHGEEPQGVLRHPHRQVQGRAGRDGALRRQGAQDGRELPLPVHGREGPGLRGEAAALQGLGLPPRHPGLHVPGRRLHPGQRHGRRVHLRRQVRRRELQAAPHGTRRALHGQRGARHQRLPVLHLHRADALA

SEQ ID NO: 3256 - protein, 153 aa, Zea mays subsp. mays
  peptide (1)..(153): Ceres Seq. ID no. 12405728
  misc_feature (1)..(150): Homolog of NCBI NO: 118103 NR Description: Peptidyl-prolyl cis-trans isomerase (PPIase)
  misc_feature (1)..(151): Homolog of NCBI NO: 18376589 NR Description: putative cyclosporin A-binding protein [Picea
  misc_feature (1)..(151): Homolog of NCBI NO: 3334157 NR Description: Peptidyl-prolyl cis-trans isomerase (PPIase)
  misc_feature (1)..(150): Homolog of NCBI NO: 11270316 NR Description: peptidylprolyl isomerase (EC 5.2.1.8)
  misc_feature (1)..(150): Homolog of NCBI NO: 1480465 NR Description: cyclophilin Ovcyp-2
  misc_feature (1)..(151): Homolog of NCBI NO: 18076088 NR Description: cyclophilin [Ricinus communis]
  misc_feature (1)..(150): Homolog of NCBI NO: 11270314 NR Description: peptidylprolyl isomerase (EC 5.2.1.8) ATCYP4
  misc_feature (1)..(150): Homolog of NCBI NO: 15228814 NR Description: peptidylprolyl isomerase
  misc_feature (1)..(150): Homolog of NCBI NO: 1305457 NR Description: cytosolic cyclophilin [Arabidopsis thaliana]
  misc_feature (1)..(153): Homolog of NCBI NO: 1084454 NR Description: peptidylprolyl isomerase (EC 5.2.1.8) Cyp1 - rice
MELFADKVPKTAENFRCLCTGEKGLGSAGKPLHYKGSAFHRVIPGFMCQGGDFTRGNGTGGESIYGARFADENFKLRHTGPGVLSMANAGPDTNGSQFFICTAQTPWLDGKHVVFGKVVDGYAVVDKMEAVGSQSGATAESVRIEDCGQLADD

SEQ ID NO: 3257 - DNA, 1712 bp, Zea mays subsp. mays
  misc_feature (1)..(1712): Ceres Seq. ID no. 12346894
  misc_feature: MA Experiment ID: 108528 Result: Down-regulated in Transcription
  misc_feature: MA Experiment 108528 PARAMETER Experiment Name: Zm_Imbibed_Seeds_P Parameter: Age (day) Value: 5 vs. 2
  misc_feature: MA Experiment 108528 PARAMETER Experiment Name: Zm_Imbibed_Seeds_P Parameter: Organism Value: Zea mays
  misc_feature: MA Experiment 108528 PARAMETER Experiment Name: Zm_Imbibed_Seeds_P Parameter: Plant Line Value: 35A19
  misc_feature: MA Experiment 108528 PARAMETER Experiment Name: Zm_Imbibed_Seeds_P Parameter: Tissue Value: Aerial vs. Embryo
  misc_feature: MA Experiment ID: 108529 Result: Down-regulated in Transcription
  misc_feature: MA Experiment 108529 PARAMETER Experiment Name: Zm_Imbibed_Seeds_P Parameter: Age (day) Value: 5 vs. 2
  misc_feature: MA Experiment 108529 PARAMETER Experiment Name: Zm_Imbibed_Seeds_P Parameter: Organism Value: Zea mays
  misc_feature: MA Experiment 108529 PARAMETER Experiment Name: Zm_Imbibed_Seeds_P Parameter: Plant Line Value: 35A19
  misc_feature: MA Experiment 108529 PARAMETER Experiment Name: Zm_Imbibed_Seeds_P Parameter: Tissue Value: Roots vs. Embryo
  misc_feature: MA Experiment ID: 108535 Result: Up-regulated in Transcription
  misc_feature: MA Experiment 108535 PARAMETER Experiment Name: Zm_Meristem_P Parameter: Age (day) Value: 8
  misc_feature: MA Experiment 108535 PARAMETER Experiment Name: Zm_Meristem_P Parameter: Organism Value: Zea mays
  misc_feature: MA Experiment 108535 PARAMETER Experiment Name: Zm_Meristem_P Parameter: Plant Line Value: 35A19
  misc_feature: MA Experiment 108535 PARAMETER Experiment Name: Zm_Meristem_P Parameter: Tissue Value: Root Meristem vs. Above Root Meristem
acaaatcgggtttgccgtgcggcacttgcgtttcgggtcgggtacggacccgcaaaaagagctccgtcagttcctctacctcctctgtaggagcacacttgtttcggaaaggaacgcagattcacgccacgccgccgcctcaattatatggcgccggcgttctcggcacaggtccccgcgctccgacgggcagcactgcgcgtgcggtgggtcacggctgcgctgttctcatcggggattctcgccggcaacaagccgattctggtgcgtgacttcgtgaggtcagcgttgtacgaccccaaccatggctacttctccaagcgggcggggccggtgggcgttcttgacgccagcatccgcttcaaccagctcgaggggaggagtgcatatatacagcaccttgataagctgtataagaagcatgatatcgcttggtttactcccgtggagctctttaagccatggtatgcctacgcaatagcagcatcgattctgcgtacagcaaatctttcagtcccattgaagatatacgagattggtggtggctctggaacatgcgcaaagtgcatacttgattacatgatgctgaatgcgccaccaaaagtctacaatgatatgaaatacatctcagtagagattagctcctctcttgctgagaagcaattggaaactgttggtgaagtgcaaagccatttgtcaaagttcacggtggagcaccgggatgcaattaacagacctggatggggccgcacggatcctcacccatgttgggtgcttatgcttgaggtacttgacaatctaccacatgaccttgtctattcaccagatcaggtctctccatggatggaagtgtggattgaaaaagtaaaaggcagtttacaagcctccgaagtctataagccattacaagacccattgatttctcgctgtgttgatattattggcatgaatgaagacaaagcttctgtcagtgaaaaactagcatttgctgcaaaaggagttctatcaaaagtattcccaaagcctcgtagagcttggttgcccaccggctgcttgaaactaatggatactctacatcaagctttaccgagcatgtcccttattgcttcagacttcagctatcttccagacgttagcatacctggtgacagggctccattggtttcatcaaagaacgatggaaagacatcagatcatcgcaactactttgatgctcagggtgacgcggacatcttcttcccaaccgatttccggctcctggagcagatcgaccataactgcgctggcttctcaaaggagcagaagaatcccggcgcattcaaacccgtgaagaagaggagaacgatcatacttgatactgcagccttcatggaggagtttggcatgccgctgaagacgaggaccaaagacgggtataatccgcttctcgacgatttcaagaacacaaagttctatctcagcgtccctacacacaacgttcctacccatagcaggaggaactagtcttctttccttttgctgatgcgtcacgagtcaggaaaagacgtctgccaggctagaatcggtctgtcattttgagcagtctgaatttgcaagttttcttaccttaaggtgttgaaaattttatagtttctcttttttgtagaacaaagtttttattatcatttttgacattgatgcatgggtaataaaaggtggaagaagactgactg

SEQ ID NO: 3258 - protein, 451 aa, Zea mays subsp. mays
  peptide (1)..(451): Ceres Seq. ID no. 12346895
  misc_feature (35)..(89): Pfam Name: Uncharacterized ACR, COG1565 Pfam Description: Uncharacterized ACR, COG1565
  misc_feature (50)..(374): Homolog of NCBI NO: 19114528 NR Description: hypothetical protein [Schizosaccharomyces pombe]
  misc_feature (20)..(374): Homolog of NCBI NO: 26401557 NR Description: Hypothetical protein C25A8.03c in chromosome I
  misc_feature (18)..(260): Homolog of NCBI NO: 32422641 NR Description: hypothetical protein [Neurospora crassa]
  misc_feature (1)..(89): Homolog of NCBI NO: 34906872 NR Description: P0470A12.14 [Oryza sativa (japonica
  misc_feature (38)..(374): Homolog of NCBI NO: 40744669 NR Description: hypothetical protein AN1512.2 [Aspergillus
  misc_feature (1)..(201): Homolog of NCBI NO: 25406821 NR Description: protein F13M7.11 [imported] - Arabidopsis
  misc_feature (203)..(443): Homolog of NCBI NO: 25406821 NR Description: protein F13M7.11 [imported] - Arabidopsis
  misc_feature (1)..(443): Homolog of NCBI NO: 18390452 NR Description: expressed protein
  misc_feature (1)..(443): Homolog of NCBI NO: 34906872 NR Description: P0470A12.14 [Oryza sativa (japonica
MAPAFSAQVPALRRAALRVRWVTAALFSSGILAGNKPILVRDFVRSALYDPNHGYFSKRAGPVGVLDASIRFNQLEGRSAYIQHLDKLYKKHDIAWFTPVELFKPWYAYAIAASILRTANLSVPLKIYEIGGGSGTCAKCILDYMMLNAPPKVYNDMKYISVEISSSLAEKQLETVGEVQSHLSKFTVEHRDAINRPGWGRTDPHPCWVLMLEVLDNLPHDLVYSPDQVSPWMEVWIEKVKGSLQASEVYKPLQDPLISRCVDIIGMNEDKASVSEKLAFAAKGVLSKVFPKPRRAWLPTGCLKLMDTLHQALPSMSLIASDFSYLPDVSIPGDRAPLVSSKNDGKTSDHRNYFDAQGDADIFFPTDFRLLEQIDHNCAGFSKEQKNPGAFKPVKKRRTIILDTAAFMEEFGMPLKTRTKDGYNPLLDDFKNTKFYLSVPTHNVPTHSRRN

SEQ ID NO: 3259 - protein, 307 aa, Zea mays subsp. mays
  peptide (1)..(307): Ceres Seq. ID no. 12346896
  misc_feature (1)..(231): Pfam Name: Uncharacterized ACR, COG1565 Pfam Description: Uncharacterized ACR, COG1565
  misc_feature (1)..(230): Homolog of NCBI NO: 19114528 NR Description: hypothetical protein [Schizosaccharomyces pombe]
  misc_feature (1)..(230): Homolog of NCBI NO: 26401557 NR Description: Hypothetical protein C25A8.03c in chromosome I
  misc_feature (1)..(116): Homolog of NCBI NO: 32422641 NR Description: hypothetical protein [Neurospora crassa]
  misc_feature (1)..(230): Homolog of NCBI NO: 40744669 NR Description: hypothetical protein AN1512.2 [Aspergillus
  misc_feature (1)..(57): Homolog of NCBI NO: 25406821 NR Description: protein F13M7.11 [imported] - Arabidopsis
  misc_feature (59)..(299): Homolog of NCBI NO: 25406821 NR Description: protein F13M7.11 [imported] - Arabidopsis
  misc_feature (1)..(299): Homolog of NCBI NO: 18390452 NR Description: expressed protein
  misc_feature (1)..(299): Homolog of NCBI NO: 34906872 NR Description: P0470A12.14 [Oryza sativa (japonica
MMLNAPPKVYNDMKYISVEISSSLAEKQLETVGEVQSHLSKFTVEHRDAINRPGWGRTDPHPCWVLMLEVLDNLPHDLVYSPDQVSPWMEVWIEKVKGSLQASEVYKPLQDPLISRCVDIIGMNEDKASVSEKLAFAAKGVLSKVFPKPRRAWLPTGCLKLMDTLHQALPSMSLIASDFSYLPDVSIPGDRAPLVSSKNDGKTSDHRNYFDAQGDADIFFPTDFRLLEQIDHNCAGFSKEQKNPGAFKPVKKRRTIILDTAAFMEEFGMPLKTRTKDGYNPLLDDFKNTKFYLSVPTHNVPTHSRRN

SEQ ID NO: 3260 - protein, 306 aa, Zea mays subsp. mays
  peptide (1)..(306): Ceres Seq. ID no. 12346897
  misc_feature (1)..(230): Pfam Name: Uncharacterized ACR, COG1565 Pfam Description: Uncharacterized ACR, COG1565
  misc_feature (1)..(229): Homolog of NCBI NO: 19114528 NR Description: hypothetical protein [Schizosaccharomyces pombe]
  misc_feature (1)..(229): Homolog of NCBI NO: 26401557 NR Description: Hypothetical protein C25A8.03c in chromosome I
  misc_feature (1)..(115): Homolog of NCBI NO: 32422641 NR Description: hypothetical protein [Neurospora crassa]
  misc_feature (1)..(229): Homolog of NCBI NO: 40744669 NR Description: hypothetical protein AN1512.2 [Aspergillus
  misc_feature (1)..(56): Homolog of NCBI NO: 25406821 NR Description: protein F13M7.11 [imported] - Arabidopsis
  misc_feature (58)..(298): Homolog of NCBI NO: 25406821 NR Description: protein F13M7.11 [imported] - Arabidopsis
  misc_feature (1)..(298): Homolog of NCBI NO: 18390452 NR Description: expressed protein
  misc_feature (1)..(298): Homolog of NCBI NO: 34906872 NR Description: P0470A12.14 [Oryza sativa (japonica
MLNAPPKVYNDMKYISVEISSSLAEKQLETVGEVQSHLSKFTVEHRDAINRPGWGRTDPHPCWVLMLEVLDNLPHDLVYSPDQVSPWMEVWIEKVKGSLQASEVYKPLQDPLISRCVDIIGMNEDKASVSEKLAFAAKGVLSKVFPKPRRAWLPTGCLKLMDTLHQALPSMSLIASDFSYLPDVSIPGDRAPLVSSKNDGKTSDHRNYFDAQGDADIFFPTDFRLLEQIDHNCAGFSKEQKNPGAFKPVKKRRTIILDTAAFMEEFGMPLKTRTKDGYNPLLDDFKNTKFYLSVPTHNVPTHSRRN

SEQ ID NO: 3261 - DNA, 1318 bp, Zea mays subsp. mays
  misc_feature (1)..(1318): Ceres Seq. ID no. 12356113
  misc_feature: MA Experiment ID: 108515 Result: Down-regulated in Transcription
  misc_feature: MA Experiment 108515 PARAMETER Experiment Name: Zm_2mM_SA_P Parameter: Age (day) Value: 8
  misc_feature: MA Experiment 108515 PARAMETER Experiment Name: Zm_2mM_SA_P Parameter: Organism Value: Zea mays
  misc_feature: MA Experiment 108515 PARAMETER Experiment Name: Zm_2mM_SA_P Parameter: Plant Line Value: 35A19
  misc_feature: MA Experiment 108515 PARAMETER Experiment Name: Zm_2mM_SA_P Parameter: Timepoint (hr) Value: 12
  misc_feature: MA Experiment 108515 PARAMETER Experiment Name: Zm_2mM_SA_P Parameter: Tissue Value: Aerial
  misc_feature: MA Experiment 108515 PARAMETER Experiment Name: Zm_2mM_SA_P Parameter: Treatment Value: 2mM SA vs. No Treatment
  misc_feature: MA Experiment ID: 108523 Result: Down-regulated in Transcription
  misc_feature: MA Experiment 108523 PARAMETER Experiment Name: Zm_42deg_Heat_P Parameter: Age (day) Value: 8
  misc_feature: MA Experiment 108523 PARAMETER Experiment Name: Zm_42deg_Heat_P Parameter: Organism Value: Zea mays
  misc_feature: MA Experiment 108523 PARAMETER Experiment Name: Zm_42deg_Heat_P Parameter: Plant Line Value: 35A19
  misc_feature: MA Experiment 108523 PARAMETER Experiment Name: Zm_42deg_Heat_P Parameter: Temperature (deg C) Value: 42 vs. 22
  misc_feature: MA Experiment 108523 PARAMETER Experiment Name: Zm_42deg_Heat_P Parameter: Timepoint (hr) Value: 6
  misc_feature: MA Experiment 108523 PARAMETER Experiment Name: Zm_42deg_Heat_P Parameter: Tissue Value: Aerial
  misc_feature: MA Experiment ID: 108527 Result: Down-regulated in Transcription
  misc_feature: MA Experiment 108527 PARAMETER Experiment Name: Zm_5mM_NO_P Parameter: Age (day) Value: 8
  misc_feature: MA Experiment 108527 PARAMETER Experiment Name: Zm_5mM_NO_P Parameter: Organism Value: Zea mays
  misc_feature: MA Experiment 108527 PARAMETER Experiment Name: Zm_5mM_NO_P Parameter: Plant Line Value: 35A19
  misc_feature: MA Experiment 108527 PARAMETER Experiment Name: Zm_5mM_NO_P Parameter: Timepoint (hr) Value: 6
  misc_feature: MA Experiment 108527 PARAMETER Experiment Name: Zm_5mM_NO_P Parameter: Tissue Value: Aerial
  misc_feature: MA Experiment 108527 PARAMETER Experiment Name: Zm_5mM_NO_P Parameter: Treatment Value: 5mM NO vs. No Treatment
  misc_feature: MA Experiment ID: 108528 Result: Up-regulated in Transcription
  misc_feature: MA Experiment 108528 PARAMETER Experiment Name: Zm_Imbibed_Seeds_P Parameter: Age (day) Value: 5 vs. 2
  misc_feature: MA Experiment 108528 PARAMETER Experiment Name: Zm_Imbibed_Seeds_P Parameter: Organism Value: Zea mays
  misc_feature: MA Experiment 108528 PARAMETER Experiment Name: Zm_Imbibed_Seeds_P Parameter: Plant Line Value: 35A19
  misc_feature: MA Experiment 108528 PARAMETER Experiment Name: Zm_Imbibed_Seeds_P Parameter: Tissue Value: Aerial vs. Embryo
  misc_feature: MA Experiment ID: 108529 Result: Down-regulated in Transcription
  misc_feature: MA Experiment 108529 PARAMETER Experiment Name: Zm_Imbibed_Seeds_P Parameter: Age (day) Value: 5 vs. 2
  misc_feature: MA Experiment 108529 PARAMETER Experiment Name: Zm_Imbibed_Seeds_P Parameter: Organism Value: Zea mays
  misc_feature: MA Experiment 108529 PARAMETER Experiment Name: Zm_Imbibed_Seeds_P Parameter: Plant Line Value: 35A19
  misc_feature: MA Experiment 108529 PARAMETER Experiment Name: Zm_Imbibed_Seeds_P Parameter: Tissue Value: Roots vs. Embryo
  misc_feature: MA Experiment ID: 108530 Result: Up-regulated in Transcription
  misc_feature: MA Experiment 108530 PARAMETER Experiment Name: Zm_Imbibed_Seeds_P Parameter: Age (day) Value: 6 vs. 2
  misc_feature: MA Experiment 108530 PARAMETER Experiment Name: Zm_Imbibed_Seeds_P Parameter: Organism Value: Zea mays
  misc_feature: MA Experiment 108530 PARAMETER Experiment Name: Zm_Imbibed_Seeds_P Parameter: Plant Line Value: 35A19
  misc_feature: MA Experiment 108530 PARAMETER Experiment Name: Zm_Imbibed_Seeds_P Parameter: Tissue Value: Aerial vs. Embryo
  misc_feature: MA Experiment ID: 108545 Result: Up-regulated in Transcription
  misc_feature: MA Experiment 108545 PARAMETER Experiment Name: Zm_Imbibed_Seeds_P Parameter: Age (day) Value: 3 vs. 2
  misc_feature: MA Experiment 108545 PARAMETER Experiment Name: Zm_Imbibed_Seeds_P Parameter: Organism Value: Zea mays
  misc_feature: MA Experiment 108545 PARAMETER Experiment Name: Zm_Imbibed_Seeds_P Parameter: Plant Line Value: 35A19
  misc_feature: MA Experiment 108545 PARAMETER Experiment Name: Zm_Imbibed_Seeds_P Parameter: Tissue Value: Aerial vs. Embryo
  misc_feature: MA Experiment ID: 108546 Result: Down-regulated in Transcription
  misc_feature: MA Experiment 108546 PARAMETER Experiment Name: Zm_Imbibed_Seeds_P Parameter: Age (day) Value: 3 vs. 2
  misc_feature: MA Experiment 108546 PARAMETER Experiment Name: Zm_Imbibed_Seeds_P Parameter: Organism Value: Zea mays
  misc_feature: MA Experiment 108546 PARAMETER Experiment Name: Zm_Imbibed_Seeds_P Parameter: Plant Line Value: 35A19
  misc_feature: MA Experiment 108546 PARAMETER Experiment Name: Zm_Imbibed_Seeds_P Parameter: Tissue Value: Roots vs. Embryo
  misc_feature: MA Experiment ID: 108547 Result: Up-regulated in Transcription
  misc_feature: MA Experiment 108547 PARAMETER Experiment Name: Zm_Imbibed_Seeds_P Parameter: Age (day) Value: 4 vs. 2
  misc_feature: MA Experiment 108547 PARAMETER Experiment Name: Zm_Imbibed_Seeds_P Parameter: Organism Value: Zea mays
  misc_feature: MA Experiment 108547 PARAMETER Experiment Name: Zm_Imbibed_Seeds_P Parameter: Plant Line Value: 35A19
  misc_feature: MA Experiment 108547 PARAMETER Experiment Name: Zm_Imbibed_Seeds_P Parameter: Tissue Value: Aerial vs. Embryo
  misc_feature: MA Experiment ID: 108556 Result: Down-regulated in Transcription
  misc_feature: MA Experiment 108556 PARAMETER Experiment Name: Zm_Drought_P Parameter: Age (day) Value: 9
  misc_feature: MA Experiment 108556 PARAMETER Experiment Name: Zm_Drought_P Parameter: Organism Value: Zea mays
  misc_feature: MA Experiment 108556 PARAMETER Experiment Name: Zm_Drought_P Parameter: Plant Line Value: 35A19
  misc_feature: MA Experiment 108556 PARAMETER Experiment Name: Zm_Drought_P Parameter: Timepoint (hr) Value: 24
  misc_feature: MA Experiment 108556 PARAMETER Experiment Name: Zm_Drought_P Parameter: Tissue Value: Aerial
  misc_feature: MA Experiment 108556 PARAMETER Experiment Name: Zm_Drought_P Parameter: Treatment Value: Drought vs. No Drought
  misc_feature: MA Experiment ID: 108687 Result: Down-regulated in Transcription
  misc_feature: MA Experiment 108687 PARAMETER Experiment Name: Zm_Embryos-Flowers__P Parameter: Tissue Value: Embryo vs. Aerial+
  misc_feature: MA Experiment ID: 20000479 Result: Down-regulated in Transcription
  misc_feature: MA Experiment 20000479 PARAMETER Experiment Name: Zm_Drought_P Parameter: Age (day) Value: 10
  misc_feature: MA Experiment 20000479 PARAMETER Experiment Name: Zm_Drought_P Parameter: Organism Value: Zea mays
  misc_feature: MA Experiment 20000479 PARAMETER Experiment Name: Zm_Drought_P Parameter: Plant Line Value: 35A19
  misc_feature: MA Experiment 20000479 PARAMETER Experiment Name: Zm_Drought_P Parameter: Timepoint (hr) Value: 48
  misc_feature: MA Experiment 20000479 PARAMETER Experiment Name: Zm_Drought_P Parameter: Tissue Value: Aerial
  misc_feature: MA Experiment 20000479 PARAMETER Experiment Name: Zm_Drought_P Parameter: Treatment Value: Drought vs. No Drought
  misc_feature: MA Experiment ID: 20000480 Result: Down-regulated in Transcription
  misc_feature: MA Experiment 20000480 PARAMETER Experiment Name: Zm_Drought_P Parameter: Age (day) Value: 11
  misc_feature: MA Experiment 20000480 PARAMETER Experiment Name: Zm_Drought_P Parameter: Organism Value: Zea mays
  misc_feature: MA Experiment 20000480 PARAMETER Experiment Name: Zm_Drought_P Parameter: Plant Line Value: 35A19
  misc_feature: MA Experiment 20000480 PARAMETER Experiment Name: Zm_Drought_P Parameter: Timepoint (hr) Value: 72
  misc_feature: MA Experiment 20000480 PARAMETER Experiment Name: Zm_Drought_P Parameter: Tissue Value: Aerial
  misc_feature: MA Experiment 20000480 PARAMETER Experiment Name: Zm_Drought_P Parameter: Treatment Value: Drought vs. No Drought
atccaatcgaagctctggaacctcctccactcccagcttccgccgacgctcgcttcagctgctgctttccttcccatccttcaacaggtgcaatttgcatttcccatggagctcactgattaataacgtcccttgggttcatctatgccggtaaagagggcgcatttgaagccacatgccgcagacatcaagaggaacccccatgtacatgagctttacaaattggtttaccgacttccggagaaccttagctggctgttggcaccaccagaaattcctaaaagacctgcctcaaagaagaaaaaacaaaaagacgaaatagtggccggtaacagctttggtgtgatcttggagtgggagggagttgttgtggatgatgatgatccagacttggagccccgggtttggtatgttctatcactagaagaggggaagtctttccctccagatgcattgctgaagaaaatcgagggaatgagaactgaccaggctattgcagaagtcttatgttggtcagaagattcagcagaaatccaaaggttggcaacacacaaggaggttatatatcaaaaactccaaggcggatactaccagctgcgaccacatgtgcttgatttcttgaacacccttgtgggttttgacattccaatagcaattgcagctcctcgctcaaggaagagccttgaagaagggatcaaaactgttggtctgcaaggctacttcgatgctataattgcattggatgacttctgcctagggaaacctgatggtgagatgtttgaagtcgcagcggagcaacttggtctggagccagatgtctgtgttgtgtttggtaactcaaacttgacgacggaatctgcacataacgctgggatgaggtgtgtggcagttgcaggccgacaccctgcctatgagctccaatcagcaaaccatgttgtgagatggcttgaccagctctctattgttgacttgcagaggcttgctaatggtgaagttattggtcgcaggggtagagaatctgacatggatatggaaattgtgattgaggaatgatgatgtttctgcaaaaatgacgcactaatatattgttgtgcttataatctgatacacctaagtaatgcgttacattttctaaacaggccaagcagtgcaagttccggactaaggatactctggagtttgcattaccttcctggtttgcttgtgatgaattggaattcgcctaaaactcttttagtcattagagttggaagtgaagacaactcccacccgtaacttgtgtatgtacagtatatatatgtattacctattcttcccc

SEQ ID NO: 3262 - protein, 302 aa, Zea mays subsp. mays
  peptide (1)..(302): Ceres Seq. ID no. 12356114
  misc_feature (150)..(252): Pfam Name: haloacid dehalogenase-like hydrolase Pfam Description: haloacid dehalogenase-like hydrolase
  misc_feature (110)..(266): Homolog of NCBI NO: 21219634 NR Description: putative hydrolase [Streptomyces coelicolor
  misc_feature (105)..(279): Homolog of NCBI NO: 22297853 NR Description: ORF_ID:tlr0310~hypothetical protein
  misc_feature (114)..(281): Homolog of NCBI NO: 6016697 NR Description: unknown protein [Arabidopsis thaliana]
  misc_feature (64)..(281): Homolog of NCBI NO: 14532506 NR Description: AT3g10970/F9F8_21 [Arabidopsis thaliana]
  misc_feature (64)..(281): Homolog of NCBI NO: 21592870 NR Description: unknown [Arabidopsis thaliana]
  misc_feature (64)..(281): Homolog of NCBI NO: 18399067 NR Description: expressed protein
  misc_feature (39)..(297): Homolog of NCBI NO: 15234236 NR Description: putative protein
  misc_feature (1)..(302): Homolog of NCBI NO: 38345597 NR Description: OSJNBb0012E24.15 [Oryza sativa (japonica
  misc_feature (1)..(302): Homolog of NCBI NO: 10444400 NR Description: genetic modifier [Zea mays]
  misc_feature (1)..(302): Homolog of NCBI NO: 18542168 NR Description: putative genetic modifier [Zea mays]
MPVKRAHLKPHAADIKRNPHVHELYKLVYRLPENLSWLLAPPEIPKRPASKKKKQKDEIVAGNSFGVILEWEGVVVDDDDPDLEPRVWYVLSLEEGKSFPPDALLKKIEGMRTDQAIAEVLCWSEDSAEIQRLATHKEVIYQKLQGGYYQLRPHVLDFLNTLVGFDIPIAIAAPRSRKSLEEGIKTVGLQGYFDAIIALDDFCLGKPDGEMFEVAAEQLGLEPDVCVVFGNSNLTTESAHNAGMRCVAVAGRHPAYELQSANHVVRWLDQLSIVDLQRLANGEVIGRRGRESDMDMEIVIEE

SEQ ID NO: 3263 - protein, 192 aa, Zea mays subsp. mays
  peptide (1)..(192): Ceres Seq. ID no. 12356115
  misc_feature (40)..(142): Pfam Name: haloacid dehalogenase-like hydrolase Pfam Description: haloacid dehalogenase-like hydrolase
  misc_feature (1)..(187): Homolog of NCBI NO: 15234236 NR Description: putative protein
  misc_feature (1)..(192): Homolog of NCBI NO: 38345597 NR Description: OSJNBb0012E24.15 [Oryza sativa (japonica
  misc_feature (1)..(156): Homolog of NCBI NO: 21219634 NR Description: putative hydrolase [Streptomyces coelicolor
  misc_feature (4)..(171): Homolog of NCBI NO: 6016697 NR Description: unknown protein [Arabidopsis thaliana]
  misc_feature (1)..(171): Homolog of NCBI NO: 21592870 NR Description: unknown [Arabidopsis thaliana]
  misc_feature (1)..(171): Homolog of NCBI NO: 18399067 NR Description: expressed protein
  misc_feature (1)..(171): Homolog of NCBI NO: 14532506 NR Description: AT3g10970/F9F8_21 [Arabidopsis thaliana]
  misc_feature (1)..(169): Homolog of NCBI NO: 22297853 NR Description: ORF_ID:tlr0310~hypothetical protein
  misc_feature (1)..(192): Homolog of NCBI NO: 10444400 NR Description: genetic modifier [Zea mays]
  misc_feature (1)..(192): Homolog of NCBI NO: 18542168 NR Description: putative genetic modifier [Zea mays]
MRTDQAIAEVLCWSEDSAEIQRLATHKEVIYQKLQGGYYQLRPHVLDFLNTLVGFDIPIAIAAPRSRKSLEEGIKTVGLQGYFDAIIALDDFCLGKPDGEMFEVAAEQLGLEPDVCVVFGNSNLTTESAHNAGMRCVAVAGRHPAYELQSANHVVRWLDQLSIVDLQRLANGEVIGRRGRESDMDMEIVIEE

SEQ ID NO: 3264 - DNA, 1338 bp, Zea mays subsp. mays
  misc_feature (1)..(1338): Ceres Seq. ID no. 12410332
  misc_feature: MA Experiment ID: 108527 Result: Up-regulated in Transcription
  misc_feature: MA Experiment 108527 PARAMETER Experiment Name: Zm_5mM_NO_P Parameter: Age (day) Value: 8
  misc_feature: MA Experiment 108527 PARAMETER Experiment Name: Zm_5mM_NO_P Parameter: Organism Value: Zea mays
  misc_feature: MA Experiment 108527 PARAMETER Experiment Name: Zm_5mM_NO_P Parameter: Plant Line Value: 35A19
  misc_feature: MA Experiment 108527 PARAMETER Experiment Name: Zm_5mM_NO_P Parameter: Timepoint (hr) Value: 6
  misc_feature: MA Experiment 108527 PARAMETER Experiment Name: Zm_5mM_NO_P Parameter: Tissue Value: Aerial
  misc_feature: MA Experiment 108527 PARAMETER Experiment Name: Zm_5mM_NO_P Parameter: Treatment Value: 5mM NO vs. No Treatment
  misc_feature: MA Experiment ID: 108530 Result: Down-regulated in Transcription
  misc_feature: MA Experiment 108530 PARAMETER Experiment Name: Zm_Imbibed_Seeds_P Parameter: Age (day) Value: 6 vs. 2
  misc_feature: MA Experiment 108530 PARAMETER Experiment Name: Zm_Imbibed_Seeds_P Parameter: Organism Value: Zea mays
  misc_feature: MA Experiment 108530 PARAMETER Experiment Name: Zm_Imbibed_Seeds_P Parameter: Plant Line Value: 35A19
  misc_feature: MA Experiment 108530 PARAMETER Experiment Name: Zm_Imbibed_Seeds_P Parameter: Tissue Value: Aerial vs. Embryo
  misc_feature: MA Experiment ID: 108535 Result: Down-regulated in Transcription
  misc_feature: MA Experiment 108535 PARAMETER Experiment Name: Zm_Meristem_P Parameter: Age (day) Value: 8
  misc_feature: MA Experiment 108535 PARAMETER Experiment Name: Zm_Meristem_P Parameter: Organism Value: Zea mays
  misc_feature: MA Experiment 108535 PARAMETER Experiment Name: Zm_Meristem_P Parameter: Plant Line Value: 35A19
  misc_feature: MA Experiment 108535 PARAMETER Experiment Name: Zm_Meristem_P Parameter: Tissue Value: Root Meristem vs. Above Root Meristem
  misc_feature: MA Experiment ID: 108559 Result: Up-regulated in Transcription
  misc_feature: MA Experiment 108559 PARAMETER Experiment Name: Zm_5mM_NO_P Parameter: Age (day) Value: 8
  misc_feature: MA Experiment 108559 PARAMETER Experiment Name: Zm_5mM_NO_P Parameter: Organism Value: Zea mays
  misc_feature: MA Experiment 108559 PARAMETER Experiment Name: Zm_5mM_NO_P Parameter: Plant Line Value: 35A19
  misc_feature: MA Experiment 108559 PARAMETER Experiment Name: Zm_5mM_NO_P Parameter: Timepoint (hr) Value: 12
  misc_feature: MA Experiment 108559 PARAMETER Experiment Name: Zm_5mM_NO_P Parameter: Tissue Value: Aerial
  misc_feature: MA Experiment 108559 PARAMETER Experiment Name: Zm_5mM_NO_P Parameter: Treatment Value: 5mM NO vs. No Treatment
  misc_feature: MA Experiment ID: 108687 Result: Down-regulated in Transcription
  misc_feature: MA Experiment 108687 PARAMETER Experiment Name: Zm_Embryos-Flowers__P Parameter: Tissue Value: Embryo vs. Aerial+
  misc_feature: MA Experiment ID: 108689 Result: Down-regulated in Transcription
  misc_feature: MA Experiment 108689 PARAMETER Experiment Name: Zm_Drought_Roots_P Parameter: Age (day) Value: 9
  misc_feature: MA Experiment 108689 PARAMETER Experiment Name: Zm_Drought_Roots_P Parameter: Organism Value: Zea mays
  misc_feature: MA Experiment 108689 PARAMETER Experiment Name: Zm_Drought_Roots_P Parameter: Plant Line Value: 35A19
  misc_feature: MA Experiment 108689 PARAMETER Experiment Name: Zm_Drought_Roots_P Parameter: Timepoint (hr) Value: 24
  misc_feature: MA Experiment 108689 PARAMETER Experiment Name: Zm_Drought_Roots_P Parameter: Tissue Value: Roots
  misc_feature: MA Experiment 108689 PARAMETER Experiment Name: Zm_Drought_Roots_P Parameter: Treatment Value: Drought vs. No Drought
  misc_feature: MA Experiment ID: 20000478 Result: Up-regulated in Transcription
  misc_feature: MA Experiment 20000478 PARAMETER Experiment Name: Zm_5mM_SA_P Parameter: Age (day) Value: 11
  misc_feature: MA Experiment 20000478 PARAMETER Experiment Name: Zm_5mM_SA_P Parameter: Organism Value: Zea mays
  misc_feature: MA Experiment 20000478 PARAMETER Experiment Name: Zm_5mM_SA_P Parameter: Plant Line Value: 35A19
  misc_feature: MA Experiment 20000478 PARAMETER Experiment Name: Zm_5mM_SA_P Parameter: Timepoint (hr) Value: 72
  misc_feature: MA Experiment 20000478 PARAMETER Experiment Name: Zm_5mM_SA_P Parameter: Tissue Value: Aerial
  misc_feature: MA Experiment 20000478 PARAMETER Experiment Name: Zm_5mM_SA_P Parameter: Treatment Value: 5mM SA vs. No Treatment
  misc_feature: MA Experiment ID: 20000479 Result: Up-regulated in Transcription
  misc_feature: MA Experiment 20000479 PARAMETER Experiment Name: Zm_Drought_P Parameter: Age (day) Value: 10
  misc_feature: MA Experiment 20000479 PARAMETER Experiment Name: Zm_Drought_P Parameter: Organism Value: Zea mays
  misc_feature: MA Experiment 20000479 PARAMETER Experiment Name: Zm_Drought_P Parameter: Plant Line Value: 35A19
  misc_feature: MA Experiment 20000479 PARAMETER Experiment Name: Zm_Drought_P Parameter: Timepoint (hr) Value: 48
  misc_feature: MA Experiment 20000479 PARAMETER Experiment Name: Zm_Drought_P Parameter: Tissue Value: Aerial
  misc_feature: MA Experiment 20000479 PARAMETER Experiment Name: Zm_Drought_P Parameter: Treatment Value: Drought vs. No Drought
  misc_feature: MA Experiment ID: 20000480 Result: Up-regulated in Transcription
  misc_feature: MA Experiment 20000480 PARAMETER Experiment Name: Zm_Drought_P Parameter: Age (day) Value: 11
  misc_feature: MA Experiment 20000480 PARAMETER Experiment Name: Zm_Drought_P Parameter: Organism Value: Zea mays
  misc_feature: MA Experiment 20000480 PARAMETER Experiment Name: Zm_Drought_P Parameter: Plant Line Value: 35A19
  misc_feature: MA Experiment 20000480 PARAMETER Experiment Name: Zm_Drought_P Parameter: Timepoint (hr) Value: 72
  misc_feature: MA Experiment 20000480 PARAMETER Experiment Name: Zm_Drought_P Parameter: Tissue Value: Aerial
  misc_feature: MA Experiment 20000480 PARAMETER Experiment Name: Zm_Drought_P Parameter: Treatment Value: Drought vs. No Drought
  misc_feature: MA Experiment ID: 20000535 Result: Down-regulated in Transcription
  misc_feature: MA Experiment 20000535 PARAMETER Experiment Name: Zm_Hybrid_Seed_Dev_P Parameter: DAP Value: 30 vs. 12
  misc_feature: MA Experiment 20000535 PARAMETER Experiment Name: Zm_Hybrid_Seed_Dev_P Parameter: Organism Value: Zea mays
  misc_feature: MA Experiment 20000535 PARAMETER Experiment Name: Zm_Hybrid_Seed_Dev_P Parameter: Plant Line Value: 35A19
  misc_feature: MA Experiment 20000535 PARAMETER Experiment Name: Zm_Hybrid_Seed_Dev_P Parameter: Tissue Value: Embryo vs. Unfert Floret
  misc_feature: MA Experiment ID: 20000626 Result: Up-regulated in Transcription
  misc_feature: MA Experiment 20000626 PARAMETER Experiment Name: Zm_Herbicide-Treatments_P Parameter: Timepoint (hr) Value: 12
  misc_feature: MA Experiment 20000626 PARAMETER Experiment Name: Zm_Herbicide-Treatments_P Parameter: Tissue Value: Aerial
  misc_feature: MA Experiment 20000626 PARAMETER Experiment Name: Zm_Herbicide-Treatments_P Parameter: Treatment Value: Roundup vs. No Treatment
aagcccattcgcgtcccgtcccgtcccgtcaaacaagcactcaaacctccctcccaagccctcttttttccctcgccgcggcgcaggcagagcagaggcagcagcatgccgccgttcgccgcccgcctggccgcaccggtcgccttggccgcgctgctgctcgccctcctgctcgcggcgccggcctcggccgccaacttcacctgcgccacggtgggcaaaacgtgccagtcggcgatcgggtacgcggtgcccaacggcgaccacgtacggggagctggtggcgcggttcaacgccaccacgacgctggcggagctgctgggcgccaacggcctccccgccacgacgccggcctcgacgccgctggcggccaaggccacggtgcgcgtgccgttccggtgccggtgcgggagcaacggcgtggggcagtcggacgggggacccttctacgtggtgtacccgctggacgggctggaccacatcgcgcgggaggtgttcggcgccttcgtcacctaccaggagatcgccaccgccaacaacatcaccaacgtcaacctcatcgtcgtcgggcagaagctcaggatcccgctgccctgcacctgcgaccaggtggacggcgccgacgtcatgcacttcgcctacagcgtcgccaagggggacgacccgcccggcatcgccgccaggttcggggtcaccgagaccacgctgctgagtgtgaataagatcaccgaccccaagaccagcctgcagcaggggcagatcctggatgtccccctccctgtgtgcaagtcatcggtcggcaacgcctcggctgactacaacctgctcgtcccgaacggcacctacgtgctcaccgccgacgactgcatccagtgcagctgcagcgcgagcaactacgagcaactgcactccggtgaaaggcggaaggtgcccggcggtgccgccgtgcagtggaggcctgacgctcgggcaggtcaacggcaccggttgcgcgtccaggatgtgcgcttacagcggttataccaacaccacgtccctcaccatacataccagccttgtgcctgcaaatgagactgcgtgccagaagggaggagctgcgagagcggagtttgccgggtccgtgttgaggacgtctctcatcgccttcatcatgtcgctgatcctcatctgcttgctatagacgttagagcagtagatggtgtattatatgccactgtcagatactcagattgctgttgtggtctattcattggcgattggtctagctgtttgaataaagcaaacattaaagtttgcatctgtgagtgaatacgtatttattagaattgggatgatcc

SEQ ID NO: 3265 - protein, 356 aa, Zea mays subsp. mays
  peptide (1)..(356): Ceres Seq. ID no. 12410333
  misc_feature (150)..(196): Pfam Name: LysM domain Pfam Description: LysM domain
  misc_feature (122)..(294): Homolog of NCBI NO: 30699276 NR Description: expressed protein [Arabidopsis thaliana]
  misc_feature (122)..(294): Homolog of NCBI NO: 25406518 NR Description: unknown protein T5M16.22 [imported] - Arabidopsis
  misc_feature (106)..(295): Homolog of NCBI NO: 18395044 NR Description: expressed protein
  misc_feature (106)..(295): Homolog of NCBI NO: 30687570 NR Description: expressed protein [Arabidopsis thaliana]
  misc_feature (81)..(296): Homolog of NCBI NO: 21593990 NR Description: unknown [Arabidopsis thaliana]
  misc_feature (81)..(296): Homolog of NCBI NO: 18398317 NR Description: expressed protein
  misc_feature (85)..(299): Homolog of NCBI NO: 28207683 NR Description: Erwinia induced protein 1 [Solanum tuberosum]
  misc_feature (85)..(300): Homolog of NCBI NO: 22758281 NR Description: Unknown protein [Oryza sativa (japonica
SPFASRPVPSNKHSNLPPKPSFFPRRGAGRAEAAACRRSPPAWPHRSPWPRCCSPSCSRRRPRPPTSPAPRWAKRASRRSGTRCPTATTYGELVARFNATTTLAELLGANGLPATTPASTPLAAKATVRVPFRCRCGSNGVGQSDGGPFYVVYPLDGLDHIAREVFGAFVTYQEIATANNITNVNLIVVGQKLRIPLPCTCDQVDGADVMHFAYSVAKGDDPPGIAARFGVTETTLLSVNKITDPKTSLQQGQILDVPLPVCKSSVGNASADYNLLVPNGTYVLTADDCIQCSCSASNYEQLHSGERRKVPGGAAVQWRPDARAGQRHRLRVQDVRLQRLYQHHVPHHTYQPCACK

SEQ ID NO: 3266 - protein, 240 aa, Zea mays subsp. mays
  peptide (1)..(240): Ceres Seq. ID no. 12410334
  misc_feature (101)..(225): Pfam Name: Amidohydrolase family Pfam Description: Amidohydrolase family
  misc_feature (36)..(86): Homolog of NCBI NO: 22758281 NR Description: Unknown protein [Oryza sativa (japonica
KPIRVPSRPVKQALKPPSQALFFPSPRRRQSRGSSMPPFAARLAAPVALAALLLALLLAAPASAANFTCATVGKTCQSAIGYAVPNGDHVRGAGGAVQRHHDAGGAAGRQRPPRHDAGLDAAGGQGHGARAVPVPVREQRRGAVGRGTLLRGVPAGRAGPHRAGGVRRLRHLPGDRHRQQHHQRQPHRRRAEAQDPAALHLRPGGRRRRHALRLQRRQGGRPARHRRQVRGHRDHAAECE

SEQ ID NO: 3267 - protein, 236 aa, Zea mays subsp. mays
  peptide (1)..(236): Ceres Seq. ID no. 12410335
  misc_feature (128)..(236): Pfam Name: Equine herpesvirus glycoprotein gp2 Pfam Description: Equine herpesvirus glycoprotein gp2
  misc_feature (128)..(236): Homolog of NCBI NO: 17221110 NR Description: glycoprotein gp2 [Equine herpesvirus 1]
  misc_feature (109)..(236): Homolog of NCBI NO: 28574039 NR Description: Salivary gland secretion 1 CG3047-PA
  misc_feature (5)..(236): Homolog of NCBI NO: 11360494 NR Description: antifreeze glycopeptide AFGP polyprotein
  misc_feature (88)..(236): Homolog of NCBI NO: 28574039 NR Description: Salivary gland secretion 1 CG3047-PA
  misc_feature (139)..(236): Homolog of NCBI NO: 6322611 NR Description: Delayed Anaerobic Gene; Dan4p [Saccharomyces
  misc_feature (97)..(236): Homolog of NCBI NO: 23017082 NR Description: hypothetical protein [Thermobifida fusca]
  misc_feature (97)..(236): Homolog of NCBI NO: 28574039 NR Description: Salivary gland secretion 1 CG3047-PA
  misc_feature (97)..(236): Homolog of NCBI NO: 28574039 NR Description: Salivary gland secretion 1 CG3047-PA
  misc_feature (40)..(236): Homolog of NCBI NO: 25989119 NR Description: unknown [Streptomyces aureofaciens]
  misc_feature (97)..(236): Homolog of NCBI NO: 28574039 NR Description: Salivary gland secretion 1 CG3047-PA
AHSRPVPSRQTSTQTSLPSPLFSLAAAQAEQRQQHAAVRRPPGRTGRLGRAAARPPARGAGLGRQLHLRHGGQNVPVGDRVRGAQRRPRTGSWWRGSTPPRRWRSCWAPTASPPRRRPRRRWRPRPRCACRSGAGAGATAWGSRTGDPSTWCTRWTGWTTSRGRCSAPSSPTRRSPPPTTSPTSTSSSSGRSSGSRCPAPATRWTAPTSCTSPTASPRGTTRPASPPGSGSPRPRC
